United States Patent Application Publication US 2018/0126003 A1 - sequence listing, part 4

SEQ ID NO: 2694 - DNA, 5460 bp, Artificial Sequence
  derived and/or modified sequence
cgggcgcagggagccgccgccggggctgtaggcgccaaggccatgtccgactcgtgggtcccgaactccgcctcgggccaggacccagggggccgccggagggcctgggccgagctgctggcgggaagggtcaagagggaaaaatataatcctgaaagggcacagaaattaaaggaatcagctgtgcgcctcctgcgaagccatcaggacctgaatgcccttttgcttgaggtagaaggtccactgtgtaaaaaattgtctctcagcaaagtgattgactgtgacagttctgaggcctatgctaatcattctagttcatttataggctctgctttgcaggatcaagcctcaaggctgggggttcccgtgggtattctctcagccgggatggttgcctctagcgtgggacagatctgcacggctccagcggagaccagtcaccctgtgctgctgactgtggagcagagaaagaagctgtcttccctgttagagtttgctcagtatttattggcacacagtatgttctcccgtctttccttctgtcaagaattatggaaaatacagagttctttgttgcttgaagcggtgtggcatcttcacgtacaaggcattgtgagcctgcaagagctgctggaaagccatcccgacatgcatgctgtgggatcgtggctcttcaggaatctgtgctgcctttgtgaacagatggaagcatcctgccagcatgctgacgtcgccagggccatgctttctgattttgttcaaatgtttgttttgaggggatttcagaaaaactcagatctgagaagaactgtggagcctgaaaaaatgccgcaggtcacggttgatgtactgcagagaatgctgatttttgcacttgacgctttggctgctggagtacaggaggagtcctccactcacaagatcgtgaggtgctggttcggagtgttcagtggacacacgcttggcagtgtaatttccacagatcctctgaagaggttcttcagtcataccctgactcagatactcactcacagccctgtgctgaaagcatctgatgctgttcagatgcagagagagtggagctttgcgcggacacaccctctgctcacctcactgtaccgcaggctctttgtgatgctgagtgcagaggagttggttggccatttgcaagaagttctggaaacgcaggaggttcactggcagagagtgctctcctttgtgtctgccctggttgtctgctttccagaagcgcagcagctgcttgaagactgggtggcgcgtttgatggcccaggcattcgagagctgccagctggacagcatggtcactgcgttcctggttgtgcgccaggcagcactggagggcccctctgcgttcctgtcatatgcagactggttcaaggcctcctttgggagcacacgaggctaccatggctgcagcaagaaggccctggtcttcctgtttacgttcttgtcagaactcgtgccttttgagtctccccggtacctgcaggtgcacattctccacccacccctggttcccggcaagtaccgctccctcctcacagactacatctcattggccaagacacggctggccgacctcaaggtttctatagaaaacatgggactctacgaggatttgtcatcagctggggacattactgagccccacagccaagctcttcaggatgttgaaaaggccatcatggtgtttgagcatacggggaacatcccagtcaccgtcatggaggccagcatattcaggaggccttactacgtgtcccacttcctccccgccctgctcacacctcgagtgctccccaaagtccctgactcccgtgtggcgtttatagagtctctgaagagagcagataaaatccccccatctctgtactccacctactgccaggcctgctctgctgctgaagagaagccagaagatgcagccctgggagtgagggcagaacccaactctgctgaggagcccctgggacagctcacagctgcactgggagagctgagagcctccatgacagaccccagccagcgtgatgttatatcggcacaggtggcagtgatttctgaaagactgagggctgtcctgggccacaatgaggatgacagcagcgttgagatatcaaagattcagctcagcatcaacacgccgagactggagccacgggaacacatggctgtggacctcctgctgacgtctttctgtcagaacctgatggctgcctccagtgtcgctcccccggagaggcagggtccctgggctgccctcttcgtgaggaccatgtgtggacgtgtgctccctgcagtgctcacccggctctgccagctgctccgtcaccagggcccgagcctgagtgccccacatgtgctggggttggctgccctggccgtgcacctgggtgagtccaggtctgcgctcccagaggtggatgtgggtcctcctgcacctggtgctggccttcctgtccctgcgctctttgacagcctcctgacctgtaggacgagggattccttgttcttctgcctgaaattttgtacagcagcaatttcttactctctctgcaagttttcttcccagtcacgagatactttgtgcagctgcttatctccaggccttattaaaaagtttcagttcctcatgttcagattgttctcagaggcccgacagcctctttctgaggaggacgtagccagcctttcctggagacccttgcaccttccttctgcagactggcagagagctgccctctctctctggacacacagaaccttccgagaggtgttgaaagaggaagatgttcacttaacttaccaagactggttacacctggagctggaaattcaacctgaagctgatgctctttcagatactgaacggcaggacttccaccagtgggcgatccatgagcactttctccctgagtcctcggcttcagggggctgtgacggagacctgcaggctgcgtgtaccattcttgtcaacgcactgatggatttccaccaaagctcaaggagttatgaccactcagaaaattctgatttggtctttggtggccgcacaggaaatgaggatattatttccagattgcaggagatggtagctgacctggagctgcagcaagacctcatagtgcctctcggccacaccccttcccaggagcacttcctctttgagattttccgcagacggctccaggctctgacaagcgggtggagcgtggctgccagccttcagagacagagggagctgctaatgtacaaacggatcctcctccgcctgccttcgtctgtcctctgcggcagcagcttccaggcagaacagcccatcactgccagatgcgagcagttcttccacttggtcaactctgagatgagaaacttctgctcccacggaggtgccctgacacaggacatcactgcccacttcttcaggggcctcctgaacgcctgtctgcggagcagagacccctccctgatggtcgacttcatactggccaagtgccagacgaaatgccccttaattttgacctctgctctggtgtggtggccgagcctggagcctgtgctgctctgccggtggaggagacactgccagagcccgctgccccgggaactgcagaagctacaagaaggccggcagtttgccagcgatttcctctcccctgaggctgcctccccagcacccaacccggactggctctcagctgctgcactgcactttgcgattcaacaagtcagggaagaaaacatcaggaagcagctaaagaagctggactgcgagagagaggagctattggttttccttttcttcttctccttgatgggcctgctgtcgtcacatctgacctcaaatagcaccacagacctgccaaaggctttccacgtttgtgcagcaatcctcgagtgtttagagaagaggaagatatcctggctggcactctttcagttgacagagagtgacctcaggctggggcggctcctcctccgtgtggccccggatcagcacaccaggctgctgcctttcgctttttacagtcttctctcctacttccatgaagacgcggccatcagggaagaggccttcctgcatgttgctgtggacatgtacttgaagctggtccagctcttcgtggctggggatacaagcacagtttcacctccagctggcaggagcctggagctcaagggtcagggcaaccccgtggaactgataacaaaagctcgtctttttctgctgcagttaatacctcggtgcccgaaaaagagcttctcacacgtggcagagctgctggctgatcgtggggactgcgacccagaggtgagcgccgccctccagagcagacagcaggctgcccctgacgctgacctgtcccaggagcctcatctcttctgacgggacctgccactgcacaccagcccagctcccgtgtaaataatttattacaagcataacatggagctcttgttgcactaaaaagtggattacaaatctcctcgactgctttagtggggaaaggaatcaattatttatgaactgtccggccccgagtcactcagcgtttgcgggaaaataaaccactggtcccagagcagaggaaggctacttgagccggacaccaagcccgcctccagcaccaagggcgggcagcaccctccgaccctcccatgcgggtgcacacgaagggtgaggctgacacagccactgcggagtccaggctgctagaggtgctcatcctcactgccgtcctcaggtgggttcgggcttcaccgcctggccctctgtggtcacagaggggctcggtggcccaggtggtggttccgcctccaggggcagggccttgtcctgggtctgtgtcagcgggtgcaccatggacatgtgtacattgaggttgtgggccttctcaaaccgccggccacactggtcacaggcaaagtccagctcagtctcagccttgtgtttggtcatgtggtacttgagggatgcccgctgcctgcactggaacccacagacctcacacctgggggacagaggcagataagaaggtgcgagggccacagccctgggagggggtcctgactcacacttactgcaaaggcttggctcccgaatgtcgcatttggtggacgagaaggtgcttccgctgcttgaaggtttgtccacattcgtcacagatatagttccgcacctctgagaggggagagtccagtgagtccaggcccctgatgctccaacctcccggggggacgacgatgacaatgtgaaaccatcacagctgggaagacatttctgcacatggttcaccatgcagtgggcccaagcaaggggcctatgagggcctcgtttattaagatctttaaactgctttatacactgtcacgtggcttcatcagctgtgtgcatttcaggatggtttttaaagaaacctcagaaagctatttcctt

SEQ ID NO: 2695 - DNA, 4368 bp, Artificial Sequence
  derived and/or modified sequence
atgtctgacagctgggtgcccaacagcgccagcggccaggaccccggcggcagaagaagagcctgggccgagctgctggccggccgggtgaagcgggagaagtacaaccctgagcgggcccagaagctgaaggagagcgctgtgcggctgctgcggagccaccaggacctgaatgccctgctgctggaggtggagggccccctgtgcaagaagctgagcctgagcaaggtgattgactgtgacagcagcgaggcctatgccaaccacagcagcagcttcatcggcagcgccctgcaggaccaggccagccggctgggcgtgcctgtgggcatcctgtctgctggcatggtggccagctctgtgggccagatctgcacagccccagctgagaccagccaccctgtgctgctgactgtggagcagaggaagaagctgagcagcctgctggagtttgcccagtacctgctggcccacagcatgttcagccggctgtccttctgccaggagctgtggaagatccagagcagcctgctgctggaggccgtgtggcacctgcacgtgcagggcatcgtgtccctgcaggagctgctggagagccacccagacatgcatgctgtgggctcctggctgttcaggaacctgtgctgcctgtgtgagcagatggaggccagctgccagcacgcagatgtggcccgggccatgctgagtgactttgtgcagatgtttgtgctgcggggcttccagaagaacagcgacctgcggaggacagtggagcctgagaagatgccccaggtgacagtggatgtgctgcagaggatgctgatctttgccctggatgccctggccgccggcgtgcaggaggagagcagcacccacaagatcgtgcgctgctggtttggagtcttcagcggccacaccctgggcagcgtcatcagcacagaccccctgaagcgcttcttcagccacaccctgacccagatcctgacccacagccctgtgctgaaggccagtgatgctgtgcagatgcagcgggagtggagctttgcccggacccaccccctgctgaccagcctgtaccgccgcctgtttgtgatgctgtctgctgaggagctggtgggccacctgcaggaggtgctggagacccaggaggtgcactggcagagggtgctgagctttgtgtctgccctggtggtgtgcttccctgaggcccagcagctgctggaggactgggtggcccggctgatggcccaggcctttgagagctgccagctggacagcatggtgacagccttcctggtggtgcggcaggccgccctggagggccccagcgccttcctgtcctatgctgactggttcaaggccagctttggcagcacccggggctaccacggctgcagcaagaaggccctggtgttcctgttcaccttcctgtctgagctggtgccctttgagagcccccgctacctgcaggtgcacatcctgcacccccccctggtgcctgggaagtaccgcagcctgctgacagactacatcagcctggccaagacccggctggccgacctgaaggtgtccattgagaacatgggcctgtatgaggacctgagcagcgctggggacatcacagagccccacagccaggccctgcaggatgtggagaaggccatcatggtgtttgagcacactggaaacatccctgtgacagtgatggaggccagcatcttcagaagaccctactacgtgagccacttcctgcctgccctgctgaccccccgggtgctgcccaaggtgcctgacagccgggtggccttcatcgagagcctgaagagagctgacaagatcccccccagcctgtacagcacctactgccaggcctgcagcgctgctgaggagaagccagaagatgctgccctgggcgtgcgggcagagcccaacagcgctgaggagcccctgggccagctgacagctgccctgggggagctgcgggcctccatgacagaccccagccagagagatgtgatcagcgcccaggtggccgtcatcagcgagcggctgcgggctgtgctgggccacaatgaagatgacagctctgtggagatcagcaagatccagctgagcatcaacaccccccggctggagccccgggagcacatggctgtggacctgctgctgaccagcttctgccagaacctgatggccgccagctctgtggcccctcctgagcggcagggcccctgggccgccctgtttgtgaggaccatgtgtggccgggtgctgcctgctgtgctgacccggctgtgccagctgctgcggcaccagggccccagcctgagcgccccccacgtgctgggcctggccgccctggccgtgcacctgggggagagccgcagcgccctgcctgaggtggatgtgggccccccagcccctggggccggcctgcctgtgcctgccctgtttgacagcctgctgacctgcaggacccgggacagcctcttcttctgcctgaagttctgcacagctgccatctcctacagcctgtgcaagttcagcagccagagccgggacaccctgtgcagctgcctgagccctggcctcatcaagaagttccagttcctgatgttccgcctcttcagcgaggcccggcagcccctgtctgaggaggatgtggccagcctgtcctggaggcccctgcacctgcccagcgctgactggcagagagctgccctgagcctgtggacccacaggaccttccgggaggtgctgaaggaggaggatgtgcacctgacctaccaggactggctgcacctggagctggagatccagcctgaggctgatgccctgagtgacacagagcggcaggacttccaccagtgggccatccacgagcacttcctgcctgagagcagcgccagcggcggctgtgatggagacctgcaggccgcctgcaccatcctggtgaatgccctgatggacttccaccagagcagccgctcctatgaccacagcgagaacagcgacctggtgtttggaggccgcactggaaatgaagacatcatcagccggctgcaggagatggtggccgacctggagctgcagcaggacctgattgtgcccctgggccacacccccagccaggagcacttcctgtttgagatcttcagaagaaggctgcaggccctgaccagcggctggagcgtggccgccagcctgcagaggcagcgggagctgctgatgtacaagaggatcctgctgcggctgcccagctctgtgctgtgtggcagcagcttccaggccgagcagcccatcacagcccgctgtgagcagttcttccacctggtgaacagcgagatgaggaacttctgcagccacggcggggccctgacccaggacatcacagcccacttcttccggggcctgctgaatgcctgcctgcggagccgggaccccagcctgatggtggacttcatcctggccaagtgccagaccaagtgccccctcatcctgaccagcgccctggtgtggtggcccagcctggagcctgtgctgctgtgccgctggaggaggcactgccagagccccctgccccgggagctgcagaagctgcaggagggccggcagtttgccagtgacttcctgagccctgaggccgccagccctgcccccaacccagactggctgtctgctgctgccctgcactttgccatccagcaggtgcgggaggagaacatcaggaagcagctgaagaagctggactgtgagcgggaggagctgctggtgttcctgttcttcttcagcctgatgggcctgctgagcagccacctgaccagcaacagcaccacagacctgcccaaggccttccacgtgtgtgccgccatcctggagtgcctggagaagaggaagatctcctggctggccctcttccagctgacagaaagtgacctgcggctgggccgcctgctgctgcgggtggccccagaccagcacacccggctgctgccctttgccttctacagcctgctgagctacttccatgaagatgctgccatccgggaggaggccttcctgcacgtggccgtggacatgtacctgaagctggtgcagctgtttgtggccggggacaccagcacagtgagccccccagctggccgcagcctggagctgaagggccagggcaaccctgtggagctgatcaccaaggcccggctcttcctgctgcagctgatcccccgctgccccaagaagagcttcagccacgtggccgagctgctggccgacagaggagactgtgaccctgaggtgtctgctgccctgcagagccggcagcaggccgccccagatgctgacctgagccaggagccccacctgttctag

SEQ ID NO: 2696 - DNA, 4368 bp, Artificial Sequence
  derived and/or modified sequence
atgagcgacagctgggtgcccaacagcgccagcggccaggaccccgggggtcgccgcagggcttgggctgaactccttgctgggagagtgaagcgcgagaagtataacccagagcgagcgcagaaattaaaggaaagcgcggtacgcctcctcagatcccaccaagatctcaacgccctgctcctggaagtggagggccctctgtgcaagaagctatccctgtccaaggttatcgactgtgatagcagtgaggcatacgccaaccactcctcaagttttattgggagcgctttacaggatcaagcttctcgattgggggtccctgtgggtattctttcagcagggatggttgcaagctctgtgggacagatctgcaccgcccccgccgaaacttctcatccggtgcttctgacagtcgaacagagaaaaaagctttcttcattactggaattcgctcagtatctgctggcccacagcatgttctcgcgtctgtccttctgtcaagagctgtggaagatccaaagttccctacttctagaagctgtctggcatttacacgtgcagggcatagtgtctttgcaggaattgttagagagtcacccagacatgcacgccgtggggagctggctcttcaggaatctttgttgtttgtgtgaacagatggaagccagttgtcagcacgctgatgtcgcccgagcaatgttgagtgattttgtacagatgttcgtcctgaggggatttcagaaaaactccgatttgaggagaacagtcgaacctgagaagatgccacaagtaacagtggacgtcctgcaaaggatgctgattttcgcactggacgctcttgcagcaggagtacaagaggagtcttctacacacaagattgttcgctgctggtttggtgttttttctggacatactcttggttccgttatctctacagaccctctgaagcggtttttctcccataccctgacgcagattctgacgcactcgccagtgttgaaggcctctgacgctgttcagatgcagcgcgagtggagtttcgctcgcacccaccctcttctgacatccttatacaggcgcctatttgtgatgctgtcagctgaagagctggtgggccacttacaagaagttctggagactcaggaggtccactggcagcgcgtcctctcattcgtctcagcactcgtggtatgttttcctgaggctcagcagctcctggaagattgggtggcaagactgatggcacaggcctttgagtcttgccagctcgattcaatggtgacggccttcctggttgtccggcaggccgctcttgaaggaccctctgccttcctgtcttacgcagattggttcaaggcctcctttgggagcacgaggggataccacggatgctccaagaaggcactggtgtttctgtttacatttttatccgagctcgtgccattcgagtcccccaggtatctccaagtgcacatcctgcaccccccgcttgtgcccggcaaatatcggagtctgctaacagactacataagccttgcgaagacccggctagccgatctcaaagtctcaatcgagaacatggggctttatgaagatctttcctccgcaggcgacatcaccgaaccccatagtcaagccctgcaagacgtggaaaaggctataatggtatttgagcacacaggaaacattccagtgacagtgatggaggcaagtatatttaggcgcccctattatgttagccactttctgccagcgttgcttaccccccgggtgctgcccaaggttccggattcaagggttgccttcatagaatctctgaaaagggcagataaaatcccccctagcctatattccacctactgccaggcttgcagtgcggcggaagagaaacctgaagacgctgccctcggagttagagcagaacctaactctgccgaagaacctctcgggcagctcactgccgcacttggagaactgcgggcctctatgaccgatccgtcacaaagggacgttatctccgcacaggttgcagtgatttcggagcggctgagggctgtcctaggacacaatgaagatgattcaagcgtggagatcagcaagattcagctctccataaacactcctcgcctggaacccagggagcatatggctgtggacctgctactgaccagcttttgtcaaaacttgatggctgcttcttctgtcgctccccctgaacggcagggaccctgggccgcgcttttcgttcgtacgatgtgtggccgagttctgcctgctgtactcacacggttgtgtcagctgcttagacaccaaggccctagtctaagtgcccctcacgtgctgggcctggctgctcttgccgtgcatctgggcgagagtcgtagcgcattacctgaggtggatgttggccctcccgcccccggggcgggactgcccgtgcctgccctgtttgatagtctgctaacctgtcgaactcgggacagtttattcttttgcttgaagttctgtacagctgcaattagctacagcctgtgcaagtttagcagtcagtcaagggacactctctgttcctgtctgagtccaggtcttatcaaaaagtttcagtttctgatgtttagacttttttccgaggcgcggcagcccctgtccgaggaggacgttgctagtctttcttggaggccactgcatctcccctctgcggactggcagcgcgctgcgctgagtctgtggactcatagaaccttcagagaagtgctgaaggaggaagatgtccacctgacctaccaggattggcttcatctcgagctggaaattcagccagaggccgatgccctgagtgatactgagcggcaggacttccaccagtgggccatccatgaacactttttgcctgaatcatccgcgagcggcggctgtgacggcgatctccaggccgcctgcactattcttgtaaatgccctcatggattttcatcagagttcgaggagctacgaccacagtgaaaacagtgacctggtgttcggaggccgcactgggaatgaggacattatctctcggctccaagaaatggtggctgatctggagttacaacaggacctgattgtgccgcttggccacactccttcccaggaacatttcttgttcgagatttttaggagacggttgcaggccctcaccagcggctggtccgtcgcagcctcccttcagcgccagcgcgagcttctgatgtacaagagaatcttgctgaggctgccttctagtgtgctgtgtggctcttcctttcaggccgaacagcccataaccgcacgctgcgaacagttcttccacttagtgaacagcgagatgcgtaacttttgttctcacggtggggccctcacacaagacatcacagcacacttctttcgaggactacttaatgcttgtctgcgaagtcgcgacccaagcttaatggttgacttcattctggccaagtgccaaaccaagtgtcccctgatccttacaagcgccctggtctggtggcccagcctggaaccagtcctgctgtgcagatggagacggcactgtcagtcccctcttccaagggagctgcaaaagttgcaggagggtcgtcagttcgcctccgattttttgtctcctgaggccgcctctcccgcccccaatccagactggctgtccgcagctgccctgcactttgcgatccagcaggtccgcgaagagaatattcgcaaacagctgaaaaagctggattgtgagcgagaggaactgctggtgttcctcttcttttttagcctgatggggctgcttagttctcatctgacatccaatagcaccactgatctccccaaggccttccacgtgtgcgcggccatccttgaatgtctggagaagcgcaaaattagctggctggctctcttccagcttaccgagagtgatctgcgcctcggacgacttctgctgcgggtggctcccgaccagcatacccgactcctgccctttgcgttttacagcctgctgtcctactttcatgaggacgctgctatacgtgaggaagccttcctgcacgtcgcggtcgacatgtacctgaagttagtccagctgttcgttgcaggcgacacatcgacggtaagccctcccgccggccgatcactggagcttaaagggcagggtaacccagtggagctgataaccaaggcccgcctgttcttgctccagctgattcccagatgtccgaagaaatccttcagccacgttgccgagcttctagccgacaggggagattgtgatcctgaggtcagcgccgcactacaatctcgtcagcaggcagcgcctgacgcagacctaagccaggaaccccaccttttctag

SEQ ID NO: 2697 - DNA, 4368 bp, Artificial Sequence
  derived and/or modified sequence
atgtcagacagctgggtgccaaattcagcgtcaggtcaggatccagggggacgcaggcgggcatgggccgagctcttagccggtagagtaaaaagggaaaagtacaaccctgaaagggcccaaaagctgaaggagtccgcagttcgtctgttacggtctcaccaagacctcaacgccttacttctggaagtggaaggcccactgtgtaagaagctttctttgtccaaggtgattgactgcgactctagtgaggcctacgctaaccacagctcatcgttcattggatctgcactacaggaccaggcttccagattgggtgtaccagttgggattttatccgcgggaatggtggctagctcagtgggccagatttgcacagcacctgccgagacgtcccaccctgtgctccttactgtcgagcagcggaagaagctctcctccttgttggagtttgcccagtacctgctcgcccatagcatgttttcaagactctccttttgtcaggaactgtggaagatccagtctagtcttcttttggaggctgtatggcatttacacgtgcagggtatcgtgtcactccaggaactactggagagccatcctgatatgcatgcagtagggagctggctattccggaacctgtgctgcctatgcgagcagatggaagccagctgtcagcatgcagatgtcgctagagccatgctcagcgacttcgtacagatgttcgtgctccgaggctttcagaagaatagtgatctcagacgcactgtcgagcccgagaagatgcctcaggttaccgttgatgtcctccagcgcatgctgatatttgctctggacgccctagcggctggcgttcaggaagagtctagtactcataagatcgtccgatgctggttcggtgtgtttagcggacacactctggggtcagtaatctctaccgatcctttaaagcgcttcttcagccataccctcacacagatcttgacccatagtcctgtgctgaaggcgtctgatgccgtccaaatgcagagggagtggagtttcgcccgaacgcaccccctgctaaccagcctataccgcagactgttcgttatgctgagcgcagaggagttggtgggccacctccaggaggtgctggagacacaggaggtgcattggcagagggtgcttagttttgtgtctgccctggtggtctgcttcccggaagctcagcagctgctggaagattgggtcgcccgtctcatggcccaggccttcgagagctgtcagctggatagcatggtgaccgccttcctggtggtgcgtcaggcagctcttgaagggccttccgccttcttatcctacgctgactggttcaaagccagtttcggtagcacacgcggataccacggatgtagcaaaaaggcattggttttcttattcacattcctgtctgaattggtgccttttgagagcccaagatatttgcaggtgcatattctgcaccctcccttggtccctggtaagtaccgaagtttattaactgattatattagtctagccaagacccgcctggcggacctcaaagtttcaatcgaaaacatgggcctgtacgaggatctgtcatccgccggagacatcaccgagccccactctcaggcactgcaggacgtcgaaaaagctatcatggtatttgagcataccgggaatatccctgtgactgtcatggaggccagcatattccgaaggccttactacgttagccactttcttccggctctcctgactcccagggtgctgcccaaggtacctgatagcagggtggccttcatcgaatcacttaagcgcgctgacaagatcccaccaagtttatactctacttattgtcaggcttgctctgccgcagaggaaaagcccgaggacgctgcccttggcgtaagagcagagcctaacagcgcagaagaacccctgggtcaacttactgcagcactgggggagctacgagcatctatgaccgatccgtctcaaagagacgtgatctctgctcaggtggccgtgatctctgagcggctgcgagccgtgctcgggcacaatgaagatgactcatctgtggagatcagcaagattcagctgtcaatcaacaccccgcgactggagcccagagagcacatggccgtcgatttattgctgaccagcttctgtcaaaacttgatggccgcaagctcggtggctccgccagaaaggcaggggccttgggcagccctcttcgtgcggactatgtgtggacgggttttgcctgcagtgttgactcgcctgtgtcagctcttacgtcaccagggaccatccctgagcgcccctcatgtattagggctcgctgcattggccgtccacctgggcgagtcacggtctgcgctacctgaagtcgacgtgggaccacccgcacccggagctggactcccagtgccggcactgttcgatagcctcctcacttgccgcaccagagactccctgtttttttgtttgaagttctgcaccgcggctatctcatatagtctgtgtaagtttagttcacagagccgagacaccttgtgtagctgcttgagccctggattaatcaaaaaatttcaatttctgatgttcagactgttttctgaagccaggcagcccctctcagaggaggatgtggcatccctgtcttggcgcccacttcacctgccctcagctgattggcaaagagctgccctgtccctctggacacacaggacttttcgcgaggtgctgaaggaggaggatgtacacctgacttaccaggactggctccatcttgaactggagatccagcctgaggccgatgcactaagcgacaccgagaggcaggacttccaccagtgggccattcatgagcactttttacctgagagctctgcttcaggaggctgtgatggagatctccaggccgcttgcaccatcctggtgaacgccctgatggattttcaccaatccagcagaagttacgaccactctgaaaactctgacctggtttttggcggaaggacaggtaacgaagatattatctcgagactgcaggaaatggttgcggacctagaactccaacaggatctcattgtacccctcgggcacaccccgagccaggagcacttcctgtttgagatttttcggaggcggctgcaagccctgaccagtggctggagcgtggcagcaagtctacaaaggcagcgtgaactccttatgtacaagcggatcctcttgcggttaccatcttccgttctgtgtgggtcgtctttccaggcagaacagcctattaccgcacggtgcgaacagttttttcacctcgtgaacagcgagatgagaaatttttgttctcacggcggagccctaacgcaggatatcactgctcattttttcagaggtctgcttaatgcctgccttaggagtcgcgatcctagtcttatggtcgattttatcctcgcgaaatgtcagactaagtgccctttgattctgacttctgctttagtctggtggcccagtctcgaaccagtgctgctctgtagatggagacgtcattgtcagtcgccccttccgagagagctccagaagctgcaggaaggcaggcaatttgctagcgacttcctcagcccagaagctgccagtcccgcacccaatccagactggctctccgcggcagcactccatttcgctattcagcaagtacgtgaagaaaatatcagaaaacagcttaagaagttagactgcgagcgtgaggaattgctggtctttctgttcttctttagcctcatggggctgctctcatctcatcttacttcaaattcaactaccgacttgcccaaggcattccacgtctgcgctgctattcttgaatgcttggaaaagcgaaaaatcagttggctggccctgttccaattaacggaatcagacctgaggctgggcaggcttttgttgcgggtagcgccagatcaacataccaggctgctccctttcgcattttacagccttctcagttacttccatgaagacgccgcaataagggaggaggcgttcttgcacgttgccgttgatatgtacctgaagctggtgcagctgttcgtagccggtgatacctctaccgtaagccctccagctgggcgaagtcttgagttgaagggccagggaaacccagtcgagctcataactaaagccaggctgtttctgctgcagttgatcccaaggtgtccaaagaagtcgttttcccacgttgctgagctcctcgcagatcgcggagactgtgaccccgaggtctccgcagcccttcagagcagacagcaggccgcaccagacgctgatctgtcgcaggagccccacctattttag

SEQ ID NO: 2698 - protein, 16 aa, Artificial Sequence
  derived and/or modified sequence
IGVAIGDQILDLSIIK

SEQ ID NO: 2699 - protein, 12 aa, Artificial Sequence
  derived and/or modified sequence
WEYVPLGPFLGK

SEQ ID NO: 2700 - protein, 17 aa, Artificial Sequence
  derived and/or modified sequence
AHEHIFGMVLMNDWSAR

SEQ ID NO: 2701 - protein, 13 aa, Artificial Sequence
  derived and/or modified sequence
GTKPIDLGNGQTR

SEQ ID NO: 2702 - protein, 22 aa, Artificial Sequence
  derived and/or modified sequence
HQDVFNQPTLNSFMGLGQAAWK

SEQ ID NO: 2703 - protein, 419 aa, Artificial Sequence
  derived and/or modified sequence
MSFIPVAEDSDFPIHNLPYGVFSTRGDPRPRIGVAIGDQILDLSIIKHLFTGPVLSKHQDVFNQPTLNSFMGLGQAAWKEARVFLQNLLSVSQARLRDDTELRKCAFISQASATMHLPATIGDYTDFYSSRQHATNVGIMFRDKENALMPNWLHLPVGYHGRASSVVVSGTPIRRPMGQMKPDDSKPPVYGACKLLDMELEMAFFVGPGNRLGEPIPISKAHEHIFGMVLMNDWSARDIQKWEYVPLGPFLGKSFGTTVSPWVVPMDALMPFAVPNPKQDPRPLPYLCHDEPYTFDINLSVNLKGEGMSQAATICKSNFKYMYWTMLQQLTHHSVNGCNLRPGDLLASGTISGPEPENFGSMLELSWKGTKPIDLGNGQTRKFLLDGDEVIITGYCQGDGYRIGFGQCAGKVLPALLPS

SEQ ID NO: 2704 - protein, 20 aa, Artificial Sequence
  derived and/or modified sequence
FLLDGDEVIITGYCQGDGYR

SEQ ID NO: 2705 - DNA, 1257 bp, Artificial Sequence
  derived and/or modified sequence
atgtcctttattccagtggccgaggacagcgatttccccattcacaatcttccgtacggtgttttctctaccaggggcgatccacggcctagaattggggttgccattggcgatcagatcctggatttgagcatcatcaagcacctattcactggccctgtgctctcaaagcaccaagacgtttttaatcagcctaccctgaacagttttatggggctgggccaggccgcttggaaagaggccagggttttcctgcagaatctgcttagtgttagtcaggctaggttaagggacgatactgagctgcggaagtgcgcgttcatctcacaggccagcgccacgatgcacttgccagctaccatcggcgattacacagatttctattcgtctcgccagcatgctactaatgtggggattatgttccgtgacaaagaaaatgcgctgatgccaaactggcttcacctgccagtggggtatcacgggagagcgtcaagtgtggtagtttccggcactcctattagacgaccaatgggacaaatgaagcctgatgactccaaaccgcccgtgtacggcgcatgcaagctcctagacatggaactcgaaatggcattctttgtggggcctgggaacagactgggtgagccaatacctatttcaaaagcccacgaacacatctttggcatggtgttgatgaacgattggtctgctagagatatccagaaatgggagtacgtgccattggggccctttctgggtaagtcgttcggcaccaccgtgtcaccttgggtggtccctatggatgcactgatgcctttcgctgtacctaaccccaagcaagacccaagacccctaccatatctctgtcacgatgagccatacacattcgatattaacctgtccgtgaaccttaagggtgaagggatgtctcaagcagccaccatatgcaaaagtaactttaagtatatgtattggaccatgcttcagcagctgactcatcacagcgtgaatggttgtaatctgcgtcctggagacctccttgcaagtggtactatcagcggccctgagccagagaatttcggctccatgcttgagctctcctggaaagggacgaaacccatcgatctgggaaacggtcagaccaggaaatttttactggacggagacgaggttatcataaccggatactgtcagggcgatggctaccgaataggctttgggcagtgtgcaggtaaagtgttgcctgcgttacttccctca

SEQ ID NO: 2706 - DNA, 1257 bp, Artificial Sequence
  derived and/or modified sequence
atgtcatttatccccgtcgcagaggactccgactttcctatacataaccttccctatggtgtcttttcaaccagaggggatcctagaccacgaatcggggtggctataggcgatcaaattcttgatctgagcattatcaagcatctgttcactgggccagtcctgtcgaaacatcaagatgtgttcaatcagcctactctgaactcatttatgggtctgggtcaggctgcctggaaggaagcccgggtctttctgcagaatctgctgtcggtgagccaggctcgacttcgcgacgacaccgaattgagaaaatgtgcgttcataagccaggcgagcgcaaccatgcatcttcctgcaactattggagattacaccgacttttacagctccagacaacatgcaaccaacgtcggaatcatgttccgggacaaggagaacgctcttatgcctaactggctgcatttgcccgtcgggtaccacggtcgggcgtcgtccgtcgtggtgtcgggcacccccattagacgccctatgggacagatgaaacccgacgactccaagcccccagtctacggagcctgcaagctgttggatatggaacttgagatggcatttttcgtggggccagggaatagactcggggagccaattcccatttcgaaagcacatgaacacatatttggaatggtgcttatgaacgactggtccgctcgggacattcaaaagtgggagtacgtgccactgggaccttttttgggaaagtcgttcggtaccaccgtgtcgccttgggtggtgcccatggatgcactgatgccattcgccgtgcctaaccctaaacaagatccaagaccacttccttacttgtgccatgacgagccctatactttcgacataaacctgagcgtaaatctcaagggagaaggcatgtcccaggccgcaacgatatgtaagtccaacttcaagtacatgtattggactatgctgcagcagcttacccaccatagcgttaacggctgtaaccttcgtccaggagatcttttggcatctggtaccatttcgggaccagaaccggagaatttcggatccatgcttgagctttcttggaaaggcactaaaccaattgacctgggaaatggtcaaacgcgcaagtttctgcttgacggcgatgaagtgatcattactggatactgccaaggagatggttacagaatcggttttggacaatgtgcaggaaaggtgctgccagcacttctgcctagc

SEQ ID NO: 2707 - DNA, 1257 bp, Artificial Sequence
  derived and/or modified sequence
atgtcctttatacctgtagccgaggactccgatttccctatccacaatctgccctacggggtgttctccacgaggggagatccccgccccagaataggggtcgccattggggatcagatactagatctgagcatcatcaagcatctctttacagggcccgtcctcagtaaacatcaggacgtgtttaaccagcccacacttaacagctttatgggtctaggccaagccgcgtggaaagaagcacgcgttttccttcaaaacctcctgagcgtttcccaggccaggctacgagacgacactgaactgagaaagtgcgctttcatcagccaggcatctgccacaatgcatttgcccgccactattggagactataccgacttttacagtagtcgtcagcatgccactaatgtggggatcatgtttagagacaaggaaaatgctctgatgcccaactggctccatttgccggtgggttatcatggtcgcgcaagcagcgtagtggtatcaggcactcccatcaggcgacctatgggccagatgaaacctgatgactccaagcctccggtatatggggcctgtaagttgctggacatggaactggagatggccttcttcgtggggccaggtaatcggctgggagagccaattcccatttctaaggcgcacgagcacatctttggaatggtcctgatgaatgattggtccgcgcgcgatatacagaaatgggaatatgtccctctgggtccctttctcggcaaaagtttcggtacaactgtgtccccttgggtcgtgccgatggacgctcttatgcccttcgccgtccccaacccaaaacaggatccaaggccactgccttacctctgtcatgatgagccttatacattcgatataaatttgtctgtgaatttaaaaggagaaggcatgtcacaggccgcgacaatctgcaagtccaactttaagtacatgtattggacaatgttgcagcagctgacccatcacagcgtcaacggctgtaacttgcggccaggggatttactagctagtggcactatctccggccccgaacccgaaaactttggctcaatgctcgagctgtcatggaagggaactaagccaattgatctgggtaatggtcagacacggaagttccttttggacggggacgaggtgattatcaccgggtactgtcagggggatggctatagaattggttttgggcagtgcgccggcaaagtgctgccagcccttttgccatca

SEQ ID NO: 2708 - DNA, 1257 bp, Artificial Sequence
  derived and/or modified sequence
atgtcattcatccctgtggctgaagatagtgactttcccatccacaatctgccttacggagtcttcagcacccgcggtgatccgcggcccagaataggagtggcaatcggcgatcagattctcgacctgagcattatcaagcatctatttactgggcccgttctcagcaagcatcaggatgtttttaaccagccaacactgaattcttttatgggcctgggccaagctgcatggaaggaggctagggtgttcctgcaaaacctgctcagcgtttcccaggcccgactgcgcgatgatacagagctgcgcaagtgtgcttttatcagccaggccagcgcaacaatgcacttacccgccacaatcggcgactacaccgatttctattctagcagacagcacgccactaatgtcgggatcatgttccgggataaggagaacgcactgatgcccaattggctgcatctgccagtagggtaccacgggagggctagttccgtggttgtgtctggaacccctatccgcagacctatgggacagatgaagccagatgacagcaaacctccagtgtacggagcctgcaagctcctggatatggagctcgagatggccttttttgttggcccgggcaacagactgggagaacctataccaatcagtaaggcacacgagcacatctttggcatggtgctgatgaacgattggagtgcccgtgacatccagaaatgggagtacgtgcctttgggacctttcctgggaaagagctttggcacaacagttagcccgtgggtggtccccatggatgcgctaatgcccttcgcggttcctaatccaaagcaggacccccggcccttgccttatctctgccatgatgagccctatacctttgacatcaacttaagcgtgaacctcaagggcgaaggaatgtctcaagctgcaaccatctgtaaatcaaatttcaaatacatgtattggaccatgctgcagcaacttactcatcattctgttaacggctgcaacctgaggccaggcgatttgttggcgtcaggaactatcagcgggccggagcccgaaaactttgggtccatgttggagcttagttggaagggaactaaaccaattgaccttgggaatggacagacacgaaagtttttgttggacggagacgaagtcataatcaccggctactgtcaaggagacggttataggatcggtttcggtcagtgcgcaggcaaggtactgcccgcacttttgccaagt

SEQ ID NO: 2709 - DNA, 1257 bp, Artificial Sequence
  derived and/or modified sequence
atgtcatttattccagttgcagaagattctgattttcccattcacaatctcccctacggcgtcttttccacacgcggtgacccacggccgcggattggggtggctattggcgaccagatcctggatctgtccattatcaaacatttatttacaggccccgtactgtcaaagcaccaggacgtgtttaaccagccaacacttaacagttttatggggttgggtcaagctgcgtggaaggaagcgagggtgtttttgcaaaacctgctgtctgtgagtcaggcccgccttagagacgatactgagctccgtaaatgtgcctttattagtcaggcgagtgccacaatgcatctccctgccaccatcggtgattacacagacttttactctagtcggcagcacgcaacaaatgtgggcataatgttccgcgataaagagaatgccctcatgcccaactggctgcatctgccagtgggctatcacggtcgcgctagtagtgtggttgtctctggtaccccaattcggagaccaatggggcagatgaagcctgacgactcaaaaccacctgtctatggagcctgcaaattgctggatatggaactggaaatggcctttttcgtgggccccggcaatcggctgggagaacccatacctatctccaaagctcatgaacacatctttggtatggtcctcatgaacgattggagcgctcgagatattcagaagtgggaatatgttccactaggaccttttctcggaaagtctttcgggactaccgtgtccccgtgggtggtgcctatggacgcactgatgccttttgccgttcctaatcccaagcaggatcctcggcccttgccctatttatgtcatgatgaaccttacacgttcgatattaacctctccgtaaacttgaagggcgagggaatgtcccaggcggcaactatatgcaagtctaattttaagtatatgtattggacaatgttgcagcagcttacgcaccactcagtgaacgggtgtaatctacgccccggagatcttttagcttctggaactatttctggaccggagcccgaaaattttggctcgatgttggagctctcctggaagggcactaagcctatcgatctcggaaacggacagacaagaaaattcctcctggatggtgacgaagtaattattaccgggtattgtcagggggacggctatcggatcggatttggccagtgcgcgggcaaggtcctccccgccctgcttcccagc

SEQ ID NO: 2710 - DNA, 1257 bp, Artificial Sequence
  derived and/or modified sequence
atgtccttcatcccagtcgcagaggacagcgacttccccatccacaacctgccgtacggtgtgttctcaacgcgaggcgacccacggccacggatcggagtggccatcggcgaccaaatcctggacctcagcatcattaaacacctgttcacgggcccagtgctctcgaaacatcaggatgtgttcaaccagccgaccctcaactcgttcatgggactcggtcaggccgcgtggaaggaagcgagagtgttcctccaaaatctgctttcggtgtcgcaagcgcgcctgcgggacgacactgaactgcggaaatgtgcgttcatcagccaggccagcgctacgatgcatctgcccgcgaccatcggggactacaccgatttctactcttccagacaacatgctaccaacgtgggaatcatgttccgggataaagaaaacgcactgatgccaaactggcttcacctgcctgtggggtaccacggacgggcttcatccgtcgtcgtctcgggaacgccgattcgacggccgatgggtcaaatgaagcccgatgactccaagccgcccgtgtacggtgcatgcaagctgctggatatggaacttgagatggccttcttcgtgggcccggggaatcggctgggcgagccgatcccgatttccaaagctcatgagcatatcttcggaatggtgctgatgaatgattggtccgcacgggacatccaaaagtgggaatacgtccctctgggaccattccttggaaaatcgttcggaactactgtgagcccgtgggtggtcccgatggatgccctgatgcctttcgccgtgcctaaccctaaacaggaccccagaccgctgccgtacctctgccatgatgaaccatacactttcgacatcaatctctctgtgaacctgaagggagaaggcatgtcccaggcggcaaccatctgcaagagcaacttcaagtatatgtattggaccatgctccagcaattgactcaccactccgtgaatggatgcaacttgcgccctggagatctccttgcaagcggcactatctcgggacctgagccggagaatttcggctctatgctggaactctcgtggaagggaactaagccgatcgacctgggaaacggacagacccgcaaattcctgctggacggagacgaagtcatcatcactggatactgtcaaggcgatggataccgcatcggatttggccagtgcgcgggcaaggttctgcccgccctgcttccatcg

SEQ ID NO: 2711 - DNA, 1257 bp, Artificial Sequence
  derived and/or modified sequence
atgtcgttcatccctgtggcagaagatagcgattttccaatccataatctgccctacggggtgttttccacccgcggagatccccgcccccggattggggtggcaatcggtgaccaaattctggatctttcgattatcaagcacttgtttactggacctgtgctctcgaagcatcaagatgtctttaaccaacccaccttgaattcgttcatgggacttggacaggcagcatggaaggaagcacgtgtgtttctccagaatctgctcagcgtgtcacaagcaagattgagagacgataccgaactgaggaaatgtgcatttatctcacaagcaagcgcaactatgcatcttcctgcgactattggtgactacactgacttttactcgtcgagacaacatgccactaacgtgggaatcatgtttagagataaagagaacgcccttatgcctaactggttgcatctgccagtgggataccatggaagagcctcgagcgtcgtcgtatccggaacccccattaggcgaccaatggggcagatgaagccagacgattccaagccacccgtgtacggagcatgtaaactccttgacatggaactggaaatggcatttttcgtgggtccaggcaaccgactcggggaaccaatccctatttctaaggcacacgaacacatatttggcatggtgttgatgaatgactggtcagcccgcgatatccaaaaatgggagtacgtgcctctgggaccgttcctgggaaagtccttcggcaccaccgtgtcaccatgggttgttccgatggatgcacttatgccttttgcggtgccaaacccgaagcaagaccctagacctctcccctacctttgtcacgacgagccatacactttcgacattaacctgtccgtgaaccttaagggagaaggaatgagccaagccgcaactatttgtaagagcaacttcaagtacatgtattggaccatgcttcagcagctgactcatcactccgtcaatggctgcaacctcaggcctggtgatttgctggcttccggaactatttcgggaccagaaccagaaaacttcgggtcgatgctggaacttagctggaagggaaccaagcccattgatctgggtaacggacaaactaggaagttcctgttggatggcgatgaggtgatcatcaccggatactgtcagggggatggataccgcatcggatttggacagtgtgcggggaaagtcctgcctgcactccttccgtcg

SEQ ID NO: 2712 - DNA, 1257 bp, Artificial Sequence
  derived and/or modified sequence
atgagctttattccagtggcggaggatagtgactttcctattcataacctgccctacggtgtgttttccacgagaggcgacccaagacccagaattggggtagcaattggggatcaaattctggatctgtcgataatcaagcatctctttaccggaccagtgttgtcgaagcaccaagatgtattcaaccagcctaccctcaactcgtttatgggtctgggacaagcagcatggaaggaagcacgtgtgtttctccagaaccttctgtcagtctctcaagcgcgcctcagggacgataccgaactgcgcaaatgtgcattcatatcccaagcaagcgcaactatgcatttgcctgccaccattggggactacactgacttttacagctcacgccagcatgcgactaatgtgggcataatgtttcgggataaagagaatgcgctgatgcctaattggcttcatttgccagtgggctaccatggcagagcgtcctccgtcgtggtgtcggggactccaataaggcgtcccatgggccagatgaagccagatgattcgaaaccaccagtctacggagcctgcaaactgttggacatggaacttgaaatggcatttttcgttggccccggaaaccggctgggagagcccattcctatttctaaggcgcacgaacatatcttcggaatggtccttatgaatgactggtccgccagagatatccagaagtgggaatacgtgccacttggtccttttcttgggaagagcttcggtaccaccgtgtcgccttgggtggttcccatggacgcacttatgcctttcgcagtccctaatcctaaacaggaccctagaccactcccatacctttgccacgatgagccatacacctttgacattaacctttcagtgaacctgaaaggtgagggtatgtcccaagcggcaactatctgtaagtccaatttcaagtatatgtactggactatgcttcaacagctgactcaccattctgtcaacggttgtaacctgaggccgggagatcttctcgccagcggaactattagcggacccgagccagaaaacttcggatcgatgcttgaactgtcatggaagggtaccaagcccattgatctcggtaatggacaaacccgcaagtttcttcttgacggcgatgaggtgattatcaccggatactgccagggtgatggataccgtatcggttttggccaatgtgctgggaaggtcctgcctgccttgctgcctagc

SEQ ID NO: 2713 - DNA, 1257 bp, Artificial Sequence
  derived and/or modified sequence
atgagctttattcctgtcgctgaggatagtgacttccccatccataacttaccatatggcgtattcagcactcgcggggatccccgaccccggatcggcgtggccataggggatcagattctggacttgagcattattaagcacttatttacaggccctgtcctgtcaaagcatcaagacgtgttcaatcaacctacccttaacagctttatgggcctcggtcaggcagcttggaaagaagctcgggttttcctgcagaacctcctctccgtgtcgcaagccagactgagggacgacaccgaactaagaaagtgcgccttcatctcccaggcgtccgccactatgcacctgcctgcgactatcggagactatacagatttctattcctctcggcagcacgcaacaaacgttggcatcatgtttcgagacaaagaaaacgccctcatgccaaattggctccatttgcctgtcggataccatggtcgcgcgtctagtgtcgtggttagcggaactcccatacgccggcctatgggccagatgaagcctgacgactccaagcctcccgtctacggtgcttgcaagctgctcgatatggagctggagatggcttttttcgtggggcccgggaacagactgggagagcccatccctatctctaaagcacacgagcacatcttcggcatggtgctgatgaatgactggagtgccagagatattcagaaatgggaatacgtacccttaggcccattcctgggcaagtcgttcgggacaacagtgtcgccttgggtggtgcctatggacgctctgatgcctttcgccgtgccgaaccccaagcaagaccccaggcccttgccatacttatgccatgatgagccctacactttcgatatcaacctaagcgtaaacctgaagggcgaggggatgtcccaggcagcgacaatctgtaaatcaaactttaagtacatgtattggaccatgctgcagcaactgacacaccacagcgtcaatggctgcaatctgagacccggagatctcctggcatccggaactatttctggtccagaaccagagaacttcggcagcatgctggagctctcctggaaaggcaccaaaccaattgaccttggcaacggtcagaccaggaaatttctcctggacggcgatgaggtgatcatcacgggatactgtcagggagacggatacagaattgggtttgggcagtgtgctggcaaggtgctgcccgccttgttgccatcc

SEQ ID NO: 2714 - DNA, 1257 bp, Artificial Sequence
  derived and/or modified sequence
atgtcttttatccccgtagctgaagatagcgattttcccatccataatctgccatatggtgtcttttccacacgaggcgatcctagacctcgaatcggagtggctatcggtgaccagatactggatcttagcatcatcaagcaccttttcacaggacccgtgctgtccaaacatcaggacgtatttaatcagcctacactgaatagtttcatgggactcggccaggcagcctggaaggaggcgagggtattcttacagaacttgctgagcgtcagtcaggctcggctgcgcgacgacactgagctgcgaaaatgtgcatttattagtcaggccagtgccactatgcacctgccggcaaccataggtgattatacagatttttacagcagccgtcaacacgctactaacgtcgggattatgtttagagataaagaaaacgccctcatgcccaattggctacaccttcccgtgggctaccacggacgggccagctcagttgtggtgagtggaacacctataaggcgaccgatgggacagatgaaacctgacgactcaaagcctccggtctatggggcttgtaaactcctggatatggaattagagatggccttttttgttggaccaggcaaccggctgggtgagcccatcccgatatccaaagcccacgaacacatatttggcatggtgctgatgaatgactggagtgctcgggatattcagaagtgggaatacgtgcccttgggtccctttctaggaaaatccttcgggactactgtttccccgtgggttgtgcccatggacgcactcatgccttttgccgtccctaatcctaagcaagaccccagacctctcccgtatctctgccacgacgagccttatacttttgacatcaatctgtccgtgaatttgaagggcgagggcatgtcccaggctgctaccatatgtaaatccaactttaagtatatgtactggactatgctgcagcagctcacacatcacagcgtcaatggttgtaaccttcgacctggcgatctcctggccagtgggactatatccggtccggagcctgagaactttgggtccatgttggaactgagctggaaggggacaaagccaatcgacctgggtaatggacagacacgaaaattcctgctggacggggatgaagttattatcaccggctattgccagggggacggctaccgtatcggctttgggcagtgtgcggggaaggtattgcccgctctgctcccatct

SEQ ID NO: 2715 - DNA, 1257 bp, Artificial Sequence
  derived and/or modified sequence
atgtcgtttatccctgtggccgaagattcggactttcctatccacaatctcccttacggagtgttttcaacccgcggcgacccgcgccccagaatcggtgtggccatcggggatcaaatcttggatctgtccatcatcaagcacctgtttactgggccggtgctctcgaagcaccaagacgtctttaaccagccgactctgaattccttcatgggactgggacaagccgcctggaaggaggcccgggtctttctgcagaacctcctcagcgtgagccaggcgaggctgcgcgacgacaccgaacttcggaagtgcgccttcattagccaagcaagcgcaaccatgcacctgcctgccaccattggagactacactgacttctacagctcacgccaacatgcgactaatgtgggaatcatgttccgggataaggaaaacgcattgatgccgaactggctgcacctgccggtgggataccatggacgggcctcgtctgtggtggtgtccggaactccaattagacggccaatgggacaaatgaaaccagatgattcgaagccgcctgtctacggtgcctgcaagttgctcgacatggaactggagatggcattctttgtcggcccgggaaatcgcctgggtgaaccaatccccatctcaaaagctcatgaacatatcttcgggatggtcctcatgaatgactggagcgccagggacattcagaagtgggagtacgtgccgctcgggccgttcctcggaaagtctttcgggaccaccgtctcaccatgggtggtcccgatggacgccctgatgcctttcgccgtccctaacccaaagcaggacccgcggccactcccatacctgtgccatgatgaaccgtacaccttcgacatcaatctgtcagtgaacctcaaaggcgaaggcatgtcgcaagccgctacgatctgcaagagcaactttaagtatatgtattggacgatgcttcagcagctcacccatcactctgtgaacggatgcaatctgcgcccaggagacttgttggcctccggaaccatctcaggaccggagcctgaaaacttcggatcgatgctcgagctgtcctggaaggggaccaagccgattgacctcggaaacggccagactcggaaatttcttctggacggtgacgaggtgataatcaccggttactgccagggagacggatacagaatcggcttcggacaatgtgcgggaaaggtcctgccggcactgctccctagc

SEQ ID NO: 2716 - DNA, 1257 bp, Artificial Sequence
  derived and/or modified sequence
atgtcctttattcctgtggcagaggattcagattttccaatccacaatttgccttatggagtcttctccacccgcggagatccgagaccccgtatcggggttgctatcggcgaccagattctggaccttagtattattaagcacttgttcactggccctgtgctgtcgaaacatcaggatgtttttaatcagcctaccttgaatagttttatggggcttgggcaggcggcctggaaggaggctagagtctttctgcagaacttgctgtcggtgtctcaggcacgcctgcgggatgatacggaattgcgaaaatgcgctttcatcagccaggcttctgccaccatgcatcttcccgctacaataggggattataccgatttttatagttctcggcaacacgccaccaacgtcgggattatgtttcgcgacaaggagaatgcactgatgcccaactggttgcatctgccggtgggttatcatggtcgcgcctcctcggtggtggtgtcaggaacacctattcggaggcctatggggcagatgaaacccgatgactcgaaacccccagtgtacggcgcatgcaagttactggacatggagttggaaatggccttcttcgttgggcccggcaatcgcctgggagaaccaatccccatatccaaagctcacgagcatatattcgggatggtactcatgaatgattggagcgcacgggacatccagaaatgggaatatgtgcccttgggtccttttctcgggaagagctttgggactactgtgagcccctgggtggtcccaatggatgcactaatgcctttcgctgtgcccaacccaaagcaggatccaagacccctgccatacttatgtcacgatgaaccatacacatttgatataaacctctccgtgaacctgaaaggagagggcatgtcccaagctgccaccatatgcaagtctaatttcaagtacatgtattggacaatgttacagcagctgactcaccactccgtgaatggatgcaacctgagaccaggggacctgttagcgagtggaaccatctcagggcctgaaccggagaattttgggtcgatgctagagctgagctggaaggggaccaaaccaatcgatctgggaaacggacagacaagaaagttccttctggacggggacgaggtgataattactggatactgccaaggtgacggctatcgcatcggcttcggccagtgcgcaggaaaagtgctgcccgctcttctgcctagc

SEQ ID NO: 2717 - DNA, 1257 bp, Artificial Sequence
  derived and/or modified sequence
atgtccttcattcccgtggcggaggattcggattttccaatccacaatctcccctacggagtgttctcgacccgcggagatccacggccacgaattggtgtggcaatcggagatcaaattcttgatctgtcgatcattaagcatttgtttaccggacccgtcctcagcaaacatcaggacgtgtttaatcagccgaccctgaactcgttcatgggtctgggccaagctgcatggaaggaggcgagagtgtttctgcaaaatctgctttcagtttcgcaagcaagactgcgcgatgatactgaactcagaaaatgtgcattcatttcacaagcaagcgcaactatgcaccttcctgcaactattggtgactacacggacttttacagctccaggcagcacgcgaccaatgtgggtattatgtttagagacaaagagaatgctcttatgcctaactggcttcaccttccggtgggttatcatggtcgtgcatctagcgtggtggtgtcggggacgcctatacgccgacccatgggccagatgaaaccagatgactccaagccaccagtgtacggtgcatgcaaattgctggacatggagctggagatggcctttttcgtgggaccaggaaatagactgggtgaaccaatacctatttcaaaggcacatgaacacatttttggaatggtgcttatgaacgactggtcggcccgcgatatacagaagtgggaatacgtgccattgggtccttttctcgggaagtcgtttggcactactgtctcaccatgggtcgtccccatggacgcactgatgccgtttgccgtgcctaacccaaagcaagacccacgtcctttgccctacctttgtcatgatgagccctacacctttgacattaatcttagcgtgaatctcaagggtgaaggaatgtcgcaagcagccaccatttgcaagtcgaatttcaagtatatgtattggaccatgcttcagcagctgacccaccattccgtgaacggctgcaacctgcgaccaggtgatctccttgcttctggaaccatcagcggacccgaacctgagaacttcggatccatgctggaactgtcctggaaaggtaccaagcccattgatctgggaaatggacagactcggaagtttcttcttgacggcgatgaagtgatcattaccgggtactgtcagggagatggatacagaattggattcgggcaatgtgcgggaaaggtgctccctgcccttttgccctcg

SEQ ID NO: 2718 - DNA, 1257 bp, Artificial Sequence
  derived and/or modified sequence
atgtcattcattcccgtggctgaggacagcgatttccctatccataacctgccgtacggtgtgttttcaactcgaggggatcccaggcccaggataggggtcgctatcggggaccaaatccttgacctttccatcattaagcatctcttcacgggcccagtgctgtcaaagcaccaagatgtgtttaatcagcccaccctgaacagctttatgggactggggcaagcagcctggaaggaggcacgcgtctttcttcagaacctgctgtcggtgagccaggcccgcttgcgggatgatactgagctccgcaaatgtgcatttatctcacaggcaagcgcaaccatgcatcttccagcaactattggtgattacacggatttctactcgagcaggcaacatgccaccaacgttggaattatgtttagggataaagagaatgctctgatgccgaactggctgcatctccctgttggctaccacggtagagcatcctccgtcgtggtgtccggaactcctattcggcgtcctatgggccaaatgaaaccagatgatagcaagcctccagtgtacggcgcgtgcaaactccttgatatggaactggaaatggcattcttcgttggtcccgggaatcggttgggtgaaccaatcccaatttcgaaggcacacgagcacatatttggaatggtgcttatgaacgattggtcagcaagagatattcaaaaatgggaatacgtgcctttgggaccatttctgggaaagagctttggcaccactgtgtcgccctgggtagtgcctatggatgctcttatgccgttcgctgtcccaaaccctaagcaggaccccaggcccctgccctacctgtgtcatgacgaaccgtacacttttgacattaacctttccgtgaacctgaaaggtgaagggatgtcccaggccgcgaccatttgcaagagtaatttcaagtatatgtattggacgatgttgcagcaactgacccatcattcggtgaatggatgtaacctcaggccaggcgacttgcttgcctctgggactatcagtggacccgagcctgagaattttggctcgatgctggaactgtcgtggaagggaacgaagcctatcgacctggggaatggacaaaccagaaagttcctgctggacggtgacgaagtgattatcaccggttactgtcagggagacggttaccgcatcggattcggccaatgtgccggaaaggtgctgccagcactcctgcctagc

SEQ ID NO: 2719 - DNA, 1257 bp, Artificial Sequence
  derived and/or modified sequence
atgagcttcatcccagttgccgaagatagcgacttcccaatccacaacctgccctacggggtgttttccaccaggggggacccaagaccaaggatcggtgtcgctatcggcgatcagattctggatctgagcatcatcaagcacctgtttactggccctgtgctcagcaaacaccaggacgtctttaaccagcctaccctgaattcatttatgggcctgggacaagctgcctggaaggaggcccgcgttttcctgcagaacttgctgtcagtatctcaagctaggctgagagatgataccgagttgaggaagtgtgccttcatctctcaggccagcgccacaatgcaccttcctgcaacaatcggagactacaccgatttctatagttcacgtcagcatgctaccaacgtcggaatcatgtttcgcgataaggagaacgccctgatgcccaactggctgcatctgccagtgggctaccacggacgcgcatcttctgtcgtcgtctccggcacacccatcaggcggcctatggggcagatgaagcctgatgatagcaaaccccctgtttacggcgcctgcaagctccttgatatggagcttgagatggcatttttcgtggggccaggcaacaggctgggtgagccaatccccatatctaaggctcatgagcacatctttgggatggtcctgatgaacgactggtctgctagagacatccagaaatgggaatacgtacctctgggacctttcttgggaaaaagcttcggcacaaccgtcagcccttgggtggttcctatggacgcactgatgcccttcgccgtccctaacccaaagcaagatccacgccccctgccatatctctgtcacgacgagccatacacattcgatattaacctgagtgtcaacctgaagggggagggaatgtcccaggcggccactatttgcaaatccaacttcaaatacatgtactggacaatgctgcaacagctgacccaccactctgtgaatggctgtaacctacggcctggagatcttctggcctcgggcactatctctgggccagaaccggaaaatttcggcagtatgctcgaactctcatggaagggtaccaaaccaatcgacctcgggaacggacagaccaggaagttcctgctggacggcgacgaggtgatcatcactgggtactgtcaaggagacggctatcgcatcggttttggtcagtgtgctggaaaagtgcttcctgctctgctgcccagt

SEQ ID NO: 2720 - DNA, 1257 bp, Artificial Sequence
  derived and/or modified sequence
atgtccttcataccagtcgcagaggactctgacttcccaattcacaaccttccttatggcgtgttttccacgaggggcgatccccgcccccgcatcggagtcgctatcggggatcagatcttggatttaagcattataaagcacctgtttacaggcccagtactatccaagcatcaagacgtctttaaccaaccaacgttgaacagttttatgggtttgggacaggcagcttggaaggaagctagagttttcctgcagaaccttctctcggtgtctcaggcacgattgcgtgacgacactgaactgcggaaatgtgcattcatctcccaagcctctgcaactatgcacctgcccgcgacaattggtgattacacagatttttattccagcagacagcatgccactaacgtggggatcatgtttcgagacaaagagaatgccctgatgcccaattggctgcacctgcccgtgggatatcatggcagggcgtcaagtgtggttgtgtccggaacaccaattcggcgtcccatgggacagatgaagccggacgatagtaagcctccagtgtatggcgcttgtaagctacttgacatggagttggagatggcattttttgttggtccaggaaacagactgggcgagccaatccccataagcaaggcccacgaacacattttcgggatggtgctgatgaatgactggtccgcccgtgatatccagaagtgggagtacgtgcccttgggcccttttctgggcaaaagctttgggaccaccgtaagcccttgggtagtgccaatggacgcactcatgccttttgcggtgcccaatcccaagcaggaccctcgacctctgccttatctgtgccatgacgagccctacacatttgacatcaatcttagcgtgaatttgaagggtgagggaatgtctcaggccgccacgatttgcaaatctaattttaagtacatgtactggactatgctccaacagcttactcatcacagtgtgaacgggtgcaatctccgtcccggcgacctgctcgcgtcagggacgatatctggccccgagccagagaacttcggctcgatgctcgagctgtcatggaagggaactaaacccatcgacctcgggaacggccaaacacggaaattcctgttggacggcgacgaagtcatcattaccggatattgccagggggacgggtatcggatagggttcgggcaatgtgcagggaaggtgctgcctgccctgctgccaagc

SEQ ID NO: 2721 - DNA, 1257 bp, Artificial Sequence
  derived and/or modified sequence
atgtccttcatccctgtcgcggaggattcagacttcccgattcacaacctcccatacggagtgttttccactcggggcgacccacgtccaagaatcggcgtggcaatcggcgatcagatcctcgacctgtctatcatcaagcatctcttcaccggacctgtgctgagcaagcatcaggacgtgttcaaccagcccaccctgaactccttcatgggactgggccaggccgcttggaaggaggcacgggtttttctccagaacctcctttcggtgtctcaggcccgcctgcgggatgacaccgaactgcggaagtgcgccttcatctcacaagccagcgcgaccatgcaccttcccgccaccatcggagattacaccgacttctactcctcccgccaacacgccaccaatgtggggatcatgttccgggataaggaaaatgcactgatgccgaattggctccacctcccagtggggtaccatggtcgcgccagcagcgttgtcgtgtccggaacgccgatcaggcggccgatgggccagatgaaaccggacgactcgaaaccgcctgtctacggagcctgcaagctgctggacatggaattggagatggcattcttcgtcggaccaggaaatagactcggtgaacccattccgatctcgaaagcccacgaacacatcttcggtatggtgctcatgaacgactggtcagccagagacatccagaaatgggagtacgtgccactcggaccgtttcttggaaaatcgttcggaactactgtctccccatgggttgtgcctatggacgctctgatgcctttcgcggtgccaaacccaaagcaggatcctagaccgcttccctacctgtgtcacgatgaaccttacacttttgacataaatctgtcagtgaacctgaaaggagagggtatgtcacaggcagccactatctgtaagagcaacttcaagtatatgtattggaccatgcttcaacagctcactcaccatagcgtcaacggatgtaacctccggcctggagacttgctggcgtccgggactatctcgggcccggagccggagaacttcgggtcaatgctggaactgtcatggaagggaaccaaaccgattgacctcggcaatgggcagacgagaaaattcctgctggacggcgatgaggtgatcatcaccgggtactgccagggggacgggtaccggatcgggttcggacaatgcgccggtaaggtgctgcctgcacttctgccatcc

SEQ ID NO: 2722 - DNA, 1257 bp, Artificial Sequence
  derived and/or modified sequence
atgtcgtttatacctgtagccgaagatagcgacttcccgattcataaccttccttacggcgtgttttctacgagaggagatcccaggcctcgaatcggggttgctatcggtgatcagatccttgacctgtccataataaaacatctctttaccgggcctgtactctccaagcaccaagatgttttcaaccagcccaccctgaatagtttcatgggactggggcaagctgcttggaaagaagcaagggtgttcctccagaatttattgtctgtgagccaggcaaggcttcgagatgatacagagctgcgcaagtgcgcttttatctcccaagcatccgctacaatgcatctccctgccacaattggcgattacaccgatttttattcttccaggcaacacgcaacaaacgttggcatcatgtttagggacaaggagaacgcactgatgccgaactggctgcacctgccggtgggatatcatggtagagccagtagcgtcgtcgtgagtggaacgccaatcagaaggcccatgggtcagatgaagcccgatgatagtaaaccacccgtgtacggagcctgtaagctgctggacatggagcttgaaatggccttcttcgttgggccaggaaatcgcctgggcgagccaataccaatcagcaaagcccatgaacatatcttcggaatggtgttgatgaacgattggtctgcgagagatatacagaaatgggagtatgtcccgctgggtcccttccttggcaaatcatttggcactaccgtgtcgccatgggtggtgcctatggacgcacttatgccgttcgccgtcccaaaccctaaacaagaccctcggcccctgccttatctctgccatgatgagccttataccttcgatatcaatctgagcgtcaatttgaaaggtgagggcatgtctcaagctgcaaccatttgcaagagcaacttcaagtacatgtattggacaatgctgcagcagttgacacaccatagcgtcaacggatgcaacttgcggccaggcgatctgttagcgtctgggacaatctcgggacctgagccagagaattttggctctatgctcgaactatcttggaaagggaccaagcctattgacctcggcaacggtcaaacaagaaagttcctactggatggcgatgaagtgattatcaccgggtactgtcagggggacggctatagaattggatttgggcaatgcgcaggtaaagtgctgcccgccctgcttcctagt

SEQ ID NO: 2723 - DNA, 1257 bp, Artificial Sequence
  derived and/or modified sequence
atgagctttattccagtcgcagaagattcagattttcccattcacaacttaccgtatggagttttttcgacacgaggtgatccgcgacctcgaataggggtcgctataggcgatcagatcttggatcttagtataatcaagcatctatttactggtccagtcctctctaaacaccaggatgtcttcaatcaacctactctgaattcatttatgggattgggtcaagcagcctggaaagaggcgcgtgtctttttgcagaacctgctctcggttagtcaagcgcgattgagagacgatactgaattgcgcaaatgtgcctttattagtcaagcttctgctaccatgcatttgccggccaccattggggattacacagacttttattcatcgagacagcatgcaactaatgttggaataatgttccgtgataaggagaatgcactcatgcctaattggcttcacttgccggttggttatcatggccgtgcttcatcagtggtggtatcagggacaccgattcgcaggccaatgggacaaatgaagcccgacgattcgaaaccaccagtgtatggagcatgcaaactgctggacatggagctggagatggccttcttcgtaggaccaggcaaccgcttgggagagcctattcctatttctaaagctcacgagcacattttcggaatggtgcttatgaatgattggagcgctcgtgatatacaaaaatgggaatatgtaccgcttggcccctttcttggaaagtcatttggaacaacagtctcgccatgggttgtgccaatggatgctctaatgccgtttgccgtcccaaatccaaaacaagatccacgaccattgccatatttgtgtcatgatgaaccgtataccttcgatatcaatctttccgtaaatttaaaaggagaaggaatgtctcaagcagcgactatttgcaaatcaaatttcaagtatatgtattggactatgctccagcaattgactcaccactcggttaatggttgtaaccttcgaccaggagatctcttggcgtcaggaacgatttctggaccagagcccgaaaacttcggatccatgctcgagctttcttggaaaggtactaagcctatcgatctcggtaatggacaaactagaaaatttctactcgatggggatgaagtaattatcaccggctattgccagggagatggctatagaattggatttggacaatgcgccggaaaagtccttccggctcttctcccgtct

SEQ ID NO: 2724 - DNA, 1257 bp, Artificial Sequence
  derived and/or modified sequence
atgtcattcattcctgtggccgaagactctgacttcccaatccataacctcccttatggagtcttctcaacgaggggtgatccacgtcctcgcataggggtcgccatcggcgaccagatactggatctgtccatcattaagcacctgtttaccggaccggtcctgagtaagcatcaggatgtgttcaaccaaccaacgctgaatagcttcatgggtttggggcaagccgcttggaaagaagcccgtgtttttctccaaaacttgctgtccgtgtcccaagctcgtctacgtgacgatacggagctccggaagtgcgcatttatctcacaggctagtgctacaatgcatttgcccgccaccatcggggattataccgatttctactcttcccgtcaacatgcaactaatgttggtatcatgttcagagataaggagaacgctttgatgcccaactggcttcatttgcccgttggttaccatggtcgagcgtcctctgtggtggtttccggtactccaatccgccgaccgatgggtcaaatgaagccagacgattctaagcctcccgtctacggtgcttgcaagcttttggacatggaactagagatggctttttttgttggaccgggcaacaggctcggagagcctatcccaatctccaaagcacacgaacacattttcggtatggtgctcatgaacgattggagcgcgcgggacattcaaaaatgggagtatgtccctctcggacccttcttgggcaagtcctttggtacgaccgttagcccatgggttgttccgatggatgctttgatgcctttcgctgtgccaaaccccaagcaggatcctcggccactgccctacctttgtcacgatgagccttacacctttgacattaacttgtcggtgaatctgaagggggagggcatgtctcaggctgctacaatatgtaaatcgaactttaagtacatgtactggactatgcttcaacaacttacgcatcattcagttaacggctgcaacctacgtcccggcgatctgctcgcttctggaacaatatcgggtcccgaaccggagaacttcgggtccatgttggaactgagttggaaaggaacgaaaccaatcgatttggggaacggccagacgcgaaagttcctgctggatggcgatgaggtcatcatcactgggtattgtcaaggtgatgggtatagaatcggtttcggtcagtgcgccggaaaagttcttccggcactgttgccctct

SEQ ID NO: 2725 - DNA, 1257 bp, Artificial Sequence
  derived and/or modified sequence
atgtcttttattccagttgctgaagattctgattttccaatacataatcttccatatggtgttttttcaacaagaggagatcctcgtccacgaataggagtagctattggagatcaaattttagatttatctattattaaacatcttttcacaggaccagtattgtcaaagcatcaagacgttttcaatcaacctactttaaattcatttatggggcttggacaagctgcatggaaagaagctagagtttttttacaaaatttattgtcagtatctcaagctcgtcttagagatgatacagaattaagaaaatgtgcattcatttcacaagctagtgctactatgcacttaccagctacgataggagattatactgatttttattcatcaagacaacatgctactaatgtgggtattatgtttagagataaggagaatgctttaatgcctaattggttacatttaccagtaggatatcatggaagagcttcatctgttgtcgtatcaggaactccaattagaagaccaatgggacaaatgaaacctgatgactctaaacctccagtatatggagcttgtaaattacttgatatggaacttgaaatggcttttttcgttggaccaggtaaccgtttaggtgagccaatacctatttctaaagcccacgaacatatatttggtatggtgttaatgaatgattggtcagcaagagatatacaaaaatgggaatatgttccattaggaccatttttagggaaaagttttggtactacagttagtccatgggtagttccaatggatgctcttatgccatttgcagttcctaatccaaaacaagatccaagaccacttccatatctttgtcatgacgaaccatatacttttgatattaatttaagtgttaatctcaagggagagggtatgtcacaagcagcaactatttgtaaaagtaacttcaagtatatgtattggactatgttacaacaattaacacatcattcagtaaatggttgtaatcttcgacctggagatttattagcatctggaacaatttctggaccagaaccagaaaactttggatcaatgttagaattatcatggaaagggactaaacctattgatcttggaaatggacaaactcgaaagttccttttagacggagatgaggttattattacaggatattgtcaaggagacggatataggatcggatttggacaatgtgctggaaaggtattaccagcattattaccaagt

SEQ ID NO: 2726 - DNA, 1257 bp, Artificial Sequence
  derived and/or modified sequence
atgagcttcatcccggtggctgaggattctgatttccccatccataacctcccctacggagtgttctcaactagaggagatccgcggccacgcatcggagtggcgatcggcgaccagatcctggacctctcgatcatcaagcatctcttcaccggacctgtgctgtccaaacaccaagatgtgtttaaccagccgactcttaattccttcatgggcctgggccaggcggcgtggaaggaagcacgggtcttcctgcaaaatcttctcagtgtgtcccaggcgcggctgcgtgacgatactgagctccgcaaatgcgcttttatctcgcaagcctcagccacgatgcacctccccgccaccatcggtgactacactgatttctactcgtccagacagcacgccaccaacgtgggcatcatgttcagagacaaagagaatgcgcttatgcctaactggttgcaccttccggtcggataccacgggcgggcctcgtccgtggtggtgtccggaacccctatcagaaggccgatgggccagatgaagccagacgacagcaagccgccagtttacggggcctgcaagctgctggatatggagctggagatggcctttttcgtgggaccggggaatcgcctgggagaaccaatcccaatcagcaaagcacatgaacacatcttcggcatggtgttgatgaacgattggtcagcccgggacatccagaagtgggagtacgtgccactggggcctttcctgggcaaatcattcggtactactgtctcgccctgggtggtcccgatggacgctctcatgccgttcgcggtgccaaatcctaagcaggatccacgcccattgccgtacctgtgtcacgacgaaccgtataccttcgatattaacctgagcgtcaacttgaagggagaagggatgagccaggcggccactatctgcaagtccaatttcaagtatatgtattggactatgctgcaacaactgacccaccactccgtcaatggatgcaatctgcggccgggagatctccttgcctcgggaactatttcaggaccagaacccgaaaactttggatcgatgctggaacttagctggaagggaactaagcctatcgacctgggaaacggccagacccggaagttcctgctggacggcgacgaagtcatcatcaccggctactgtcaaggcgacggctacaggatcggatttgggcaatgcgccggaaaggtgttgccggcccttctgccgtcc

SEQ ID NO: 2727 - DNA, 1257 bp, Artificial Sequence
  derived and/or modified sequence
atgtccttcatccccgtcgcagaggactcggacttccctattcataatcttccctacggcgttttcagtacgcgcggtgacccccgacctcgcatcggagttgcaatcggggatcagatcctggatctaagcatcatcaagcatttgttcaccggacccgtcctcagtaagcaccaggatgtgttcaaccagcccacgcttaacagttttatgggactcggccaggccgcgtggaaggaggcgcgcgtcttcctgcagaatctacttagcgttagccaagcacggcttcgggacgacacagagttgcgtaaatgtgcgttcatttcacaggcttccgctacgatgcacctgcctgctaccattggcgactataccgatttctatagttcccgacaacacgccaccaacgttggcataatgttccgtgataaggaaaacgctctaatgccgaactggctacacttaccggtcggttatcacggccgcgcctcctcagttgtcgtatcgggcacacctatccgccgacctatgggtcagatgaagccggatgactctaagcctccagtctacggcgcttgcaagcttctggacatggagcttgagatggccttcttcgtcggtccgggtaaccgtctcggcgagccgatccccatctctaaggcacacgagcacatttttggcatggtcctgatgaacgactggtctgcgcgcgatattcagaagtgggaatacgttcccctcggtccctttcttggcaagtcttttggaaccacagtctccccttgggtcgtccctatggatgcactcatgccctttgctgtccccaaccccaagcaggacccccgcccccttccctacctgtgtcatgatgagccttacacgttcgacatcaacttgtccgtgaacctgaagggtgagggaatgtcgcaagccgcaactatctgtaagtctaatttcaagtacatgtactggacaatgctccaacagctcacacaccattccgttaacggttgcaacctacgccccggtgaccttctggcttcgggaacaatttccggcccggaacctgagaactttgggtctatgttggaactttcttggaagggcactaagcccatcgacctgggcaatggacagaccaggaaattcctgcttgacggcgatgaggtcattatcactggatactgccagggtgatgggtaccggattggttttggccagtgcgctggtaaggtgctccctgctctactcccgagc

SEQ ID NO: 2728 - DNA, 1257 bp, Artificial Sequence
  derived and/or modified sequence
atgtcattcatcccagtcgccgaagatagcgactttcctatccacaaccttccgtacggagtgttctcgacccggggcgacccgcggccgaggatcggagtggcgatcggggatcaaattctcgacctgagcatcatcaagcatctgtttactgggccggtgctgtccaaacatcaagacgttttcaaccaaccaactctgaacagctttatgggactggggcaggccgcttggaaagaagctcgggttttcttgcagaatctgttgtccgtcagccaagcccgccttcgggacgacactgagctccggaagtgcgccttcatcagccaagcatcggccaccatgcacctgcctgccaccatcggagattacaccgacttttactcgtcgagacaacacgctaccaacgtggggatcatgttccgggacaaggagaacgccctcatgcccaattggctccacctccctgtcggataccacggacgagcaagttccgtggtagtcagcggaacccctatacgaaggcccatggggcagatgaagccagatgactccaaaccgccggtgtatggcgcctgcaagctgctcgacatggagctcgaaatggcgttcttcgtgggaccaggaaatcggttgggtgagccgattccaatctccaaggctcacgaacacatctttggaatggtccttatgaacgattggagcgcgcgcgacattcagaagtgggaatacgtcccactgggaccattcttggggaagtcattcggcacgaccgtgtcgccgtgggtggtcccgatggatgctctgatgccgttcgccgtgccgaacccgaagcaagatccgcgacctctcccgtacctgtgccatgacgaaccatacactttcgatatcaacctgtcagtgaacctgaagggagaagggatgtcacaggccgcgactatctgcaaaagcaacttcaaatacatgtactggaccatgctccagcagctcactcaccattcagttaatggttgtaatctgcggccgggagatctgctcgcatcgggaaccatctccggaccggaacctgagaattttggatccatgctggaactgtcatggaaaggaactaagccgatcgatctgggcaatggacaaacccgcaagttcctgctggacggtgacgaggtcatcatcactggttactgccagggagatgggtaccgcatcggatttggacagtgcgccggaaaagttctgccagcactcctcccaagc

SEQ ID NO: 2729 - DNA, 1257 bp, Artificial Sequence
  derived and/or modified sequence
atgtcctttattcctgtggccgaggacagtgacttcccaattcacaatctgccatatggtgttttctctactagaggagatccacgcccgcgcataggcgtcgccatcggagatcagattctcgacctttcaataattaagcatctcttcacgggacccgtgctgtccaaacatcaggatgtattcaaccaacctacactgaattcatttatgggcctcggacaagcagcctggaaggaggcacgcgtcttcctccagaacctgctcagcgtgagccaggctagactcagagatgacacagaactgagaaaatgcgctttcatttcccaggcttctgcgaccatgcatctccctgccacaattggtgattataccgatttctactccagtagacagcacgccacgaacgtgggcattatgttcagagataaggaaaacgcccttatgccgaattggctgcaccttcctgttggctaccacggacgcgccagcagcgtggtcgtgtcaggcacgccgatcaggagacctatgggtcaaatgaagccagacgactcaaagccaccggtatacggcgcctgcaagctcttggacatggagttggaaatggcattttttgtcggccccggtaataggcttggtgaacctattccgatctcaaaggcccatgagcatatttttggcatggtgctgatgaacgattggagcgcgagggacattcagaaatgggaatacgttccactgggccctttcctgggaaaatccttcggtaccaccgtgtccccctgggttgttcccatggatgctctgatgccattcgctgtgcctaatccaaagcaagatccccgcccactgccttatttgtgccacgacgagccttacactttcgacataaatctgtctgtgaatctgaaaggagaaggaatgtctcaggcagcgaccatctgtaagagcaacttcaaatatatgtactggaccatgcttcagcaactgacacaccactccgtgaacggatgcaacttgagacccggagatctgctcgcctctggaaccatcagcggccccgagcccgagaactttggaagtatgctggaactgtcttggaagggcaccaagccaatagacctcggaaacggccagacccgcaagttcctgctggacggagatgaagtgatcatcaccggctattgtcagggcgacggatatcgcattggtttcggccagtgcgccggcaaagtgcttcctgctctgttgccatcc

SEQ ID NO: 2730 - DNA, 1257 bp, Artificial Sequence
  derived and/or modified sequence
atgtcattcatccctgtcgcggaagattccgacttccccatacataacctgccttacggcgtgtttagtacacggggcgatccccgcccccgaatcggagtggccattggagatcagatcctggacctgtcaatcataaagcacctctttaccggacccgttctgtcaaagcaccaggatgtgttcaatcagcccaccttgaacagctttatgggcctgggtcaagcagcatggaaagaagcccgtgtatttctgcagaatctgctgtctgtgtcacaagcaagacttcgtgacgatacagaactgaggaagtgtgcctttatttcgcaggcttcagctactatgcatcttcccgctacaatcggagactatacagacttttactcatccaggcaacacgccacaaacgtaggtataatgtttcgcgacaaagagaacgcacttatgcccaactggttgcaccttcctgtcgggtaccacgggagggcttcgagtgtggtagtttctggaacacctattcggaggccaatgggtcaaatgaagcccgacgactccaagccacctgtatacggagcctgtaaattacttgacatggagctcgagatggctttttttgtagggcctgggaaccggcttggtgaaccaatccctatctccaaggcccacgagcatatattcggaatggtactaatgaatgactggagtgctcgtgacatacagaaatgggagtacgtgcccttaggacctttcttggggaaatcctttggaacaacagtatccccatgggtggtccctatggatgcgctgatgccttttgcagtccctaatccaaagcaggatcccagacccctgccgtatttgtgtcatgatgagccatacaccttcgacataaatctgtctgtaaatttgaagggggagggcatgtcccaggccgccacaatatgtaagtccaattttaagtatatgtattggactatgttgcagcagcttacccatcacagcgtgaatgggtgtaatttacggcctggcgacctgctggccagcggaactattagcggaccggagcctgagaactttggatctatgttggaactcagctggaagggtaccaagccgattgacctaggcaacgggcagactaggaaattcctgctggatggcgatgaagtgatcattactggctactgccagggagacgggtatcgtataggctttgggcagtgtgctggtaaggtgctccctgccctactgccttcc

SEQ ID NO: 2731 - DNA, 1257 bp, Artificial Sequence
  derived and/or modified sequence
atgtcgtttatccctgtggccgaggactccgactttccgattcataacctgccgtacggagtgttctcgaccagaggcgaccctagaccgcggattggcgtcgccataggggaccagatcttggatctgtcgatcattaagcatctgtttacgggcccagtgttgagcaagcaccaggacgtgttcaaccaaccaaccctgaacagcttcatggggctcggccaggctgcttggaaagaggcgcgcgtgtttctccaaaatctcctgtcggtgtcccaggcccgccttcgagacgacaccgagctgaggaagtgcgcctttatctcccaagcctcagctaccatgcacctgcccgccactattggagattacaccgatttctactcctcccggcagcacgcaaccaacgtgggaatcatgttcagggacaaagaaaacgcgctgatgccaaattggctccatctgcccgtgggataccacgggcgggcatcgagcgtcgtggtcagcggaactccgatcaggcgcccaatggggcagatgaagccggacgattctaagccacctgtctacggtgcttgtaagctgttggacatggagcttgagatggccttttttgtcggaccgggaaacagactgggagaaccgatcccaatttccaaggcacatgaacacattttcggaatggtgctgatgaacgactggtcggcccgggacatccaaaagtgggaatacgtcccactggggccgttcctcggcaagtcgttcgggaccactgtgtcaccgtgggtggtgccaatggacgcccttatgcccttcgcagtgcctaatcctaagcaagacccccggccgctgccatacctctgccacgatgaaccgtacacctttgatatcaacttgtccgttaacttgaagggagaaggaatgtcgcaagcagccacgatctgcaaatcgaactttaagtacatgtattggactatgctccagcagctgactcatcactccgtcaatggatgtaatcttcggccgggagacttgttggcgagcggcaccatctcgggcccagaacccgagaatttcggttcaatgcttgaactgtcgtggaaagggactaaaccgatcgatctcggcaacgggcagacgagaaagttcctgctcgacggagacgaggtgatcattacgggctactgccaaggcgatggataccgcatcgggtttggccagtgcgcaggcaaagtgttgcctgccctcctgccgtcc

SEQ ID NO: 2732 - DNA, 1257 bp, Artificial Sequence
  derived and/or modified sequence
atgtcgtttatccccgtggccgaggactccgactttcccatccataatctcccttacggagttttctccactcggggagatcctcgcccacgcattggtgtggcaattggtgaccaaatcttggacctctcgatcatcaagcacctgttcaccggccctgtcctgtcgaaacaccaggacgtgttcaaccagccgactctgaacagcttcatggggctgggacaggccgcgtggaaggaagcaagggtgttcctgcagaatctcctgagcgtgtcccaggctagactgcgcgacgacactgaattgcgaaagtgtgcctttatctcgcaagcgagcgccaccatgcatctgccggctactatcggtgactacacggatttctactcgagcaggcagcacgccaccaacgtgggaatcatgtttcgcgacaaggaaaatgccctgatgcctaactggctccacctgcctgtgggataccacggaagagcctccagcgtggtcgtctcagggaccccaattcgcagaccaatgggtcagatgaagccggacgactcaaagcctccggtgtacggcgcctgcaagttgctcgacatggaactcgaaatggcattcttcgtcggaccgggtaaccggcttggagaaccgatcccgatcagcaaagcgcatgagcatatcttcggcatggttctgatgaacgattggtccgccagggacatccaaaaatgggagtacgtgcctctgggacccttcctcggcaagagcttcggcaccaccgtgtcaccatgggtggtgcctatggatgctctgatgccatttgccgtgccaaacccaaagcaggatccgcgtcctcttccgtacctttgtcacgacgagccatacacttttgatatcaacctgagcgtgaacctgaaaggagaagggatgtcacaagcggcgactatctgcaagagcaatttcaagtatatgtactggaccatgctgcagcaactgacccaccatagcgtgaacgggtgtaatcttcgaccaggcgacctgctggcctcgggcacgatctcgggaccggagcccgaaaacttcggatcgatgctcgagctgtcgtggaagggaaccaagcctatcgacctgggaaatggccagacccgcaagttcttgctcgacggagacgaagtcattatcaccggatactgccaaggcgatggctacaggatcggattcggacagtgtgctggcaaggtgctcccggctctgctcccttca

SEQ ID NO: 2733 - DNA, 1257 bp, Artificial Sequence
  derived and/or modified sequence
atgtccttcatcccagtcgctgaggactcggacttccctatacacaacctgccgtacggcgtgttctctacccgcggagatccacgcccacgaatcggagtggcgataggagatcagatcctggatcttagcatcatcaaacatttgttcacgggcccggtcctttcaaaacatcaggatgtgttcaaccaaccgaccctgaactcattcatgggactgggtcaggcagcctggaaggaagccagagtgttcctgcaaaacctgttgtcagtgtcgcaggcacggctgcgcgatgacaccgaacttaggaagtgcgctttcatctcgcaagcctcagcgaccatgcacctccctgcaactattggcgattacaccgacttttactcctcccgtcagcacgccacgaatgtcggaatcatgtttagagataaagagaacgccctgatgccgaactggctgcatctgccggtcgggtaccatggaagggcttcctccgtggtcgtgtcgggaactcccatccgccgccctatggggcaaatgaagccggacgactcaaaaccgccagtctacggagcgtgcaagctcctcgacatggagctggagatggcgttcttcgtgggaccgggtaatcgcctcggagaaccaatccctatctcaaaggctcatgagcacattttcggcatggtactgatgaatgactggtccgcacgcgatatccagaagtgggaatacgtgccgttgggcccgttcctgggaaagtccttcggtaccaccgtgtcaccgtgggtggtccctatggacgctctgatgccctttgcggtcccgaaccccaagcaagatcctaggccgttgccgtacctgtgccacgacgagccgtacaccttcgacatcaatttgagcgtgaacttgaagggtgagggtatgtcccaggctgccactatctgcaaaagcaatttcaaatacatgtactggaccatgctgcagcagctgactcaccactccgtgaacggctgtaacctgcgcccaggcgacttgctcgcatcgggcactatatcgggacccgagccagaaaactttggttcaatgctcgaactcagctggaagggaacgaagccaatcgatctgggtaatggacaaactcggaaatttctccttgacggtgacgaagtgattatcactgggtactgccagggcgacggatatcgcatcggattcgggcagtgtgccggaaaggtgcttccggccctcttgcctagc

SEQ ID NO: 2734 - DNA, 1257 bp, Artificial Sequence
  derived and/or modified sequence
atgagctttattccagtcgcagaagattccgatttcccaattcacaatctcccatacggtgttttttcaacccgtggcgacccaagaccacggatcggtgtggcgatcggcgaccagattctggatctttcgattatcaagcacctgtttaccggaccggtgctttccaagcatcaagatgttttcaaccaaccaactcttaactccttcatgggactgggtcaagcagcgtggaaggaagcgagagtgttccttcaaaatcttctgtccgtctcccaggcacgtctgagagatgatactgagctgcgcaagtgtgccttcattagccaagcctcagccacgatgcacctcccggcaaccatcggagattacaccgatttctacagctccagacaacatgcaactaacgtgggaattatgtttcgcgataaagaaaacgcacttatgccaaattggctgcacctccctgtgggatatcatggacgcgcatcgtccgtcgtcgtgtcgggcactcctatccgccgacccatgggacagatgaagcctgatgactcgaaaccccctgtgtacggtgcctgtaagttgctggacatggaactggagatggcatttttcgtgggcccggggaatcgtctgggggaacctattcctatttccaaagcacatgaacacatctttggaatggtgcttatgaacgattggtcggccagagatatccagaaatgggagtacgtccccctcgggccttttctcggtaaatcctttggaactacggtcagcccttgggtggtccctatggatgcactcatgccttttgcagtgcctaatccgaagcaggatccaaggcctctcccatatctctgccatgatgaaccatataccttcgacattaatctctcggtcaacctgaagggtgaaggtatgtcgcaggcagccactatttgtaagagcaatttcaaatacatgtactggaccatgcttcaacagcttacccatcacagcgtgaatggttgtaacctgcggcctggcgatcttcttgcgtcgggtaccatttctggcccagagcccgaaaacttcgggagcatgctggaactgtcatggaagggcactaaaccaatagatctgggcaatggacaaaccagaaagtttttgctcgatggagatgaagtcataatcaccggatactgtcagggtgatgggtacagaatcggttttgggcaatgcgcaggaaaagtcttgccagcactgctcccaagc

SEQ ID NO: 2735 - DNA, 1257 bp, Artificial Sequence
  derived and/or modified sequence
atgtccttcattcccgtcgccgaagattcggattttcctatacacaaccttccatacggtgtttttagcacgagaggtgatcctaggcccagaataggcgtcgccatcggcgatcagattcttgaccttagcattatcaaacaccttttcaccggtcctgtgctgtcgaaacatcaggatgtgttcaaccaacctactttgaactcgtttatgggtctgggacaggctgcctggaaggaggccagagttttcttgcagaacctgctttccgtctctcaagcaagactgcgtgacgataccgaactgcgcaaatgtgcctttatctcgcaggcatcggcaactatgcacctcccagcaactataggcgactacaccgacttttactcctccagacagcatgcaactaacgtgggaatcatgtttagagacaaggagaacgcacttatgccaaattggcttcatctgccggtgggataccatggtcgcgcgtcgtccgtggtcgtctcgggaactccaattagacgtcccatgggtcaaatgaagccagacgattccaaacctccagtgtacggtgcatgcaaacttctggatatggaactggagatggcattcttcgtcggaccggggaatcggttgggcgaacctatacccatttcaaaggcacatgagcatatcttcgggatggtgctgatgaacgactggtcagcacgtgacatccagaagtgggagtacgtgcctctgggaccttttttgggtaagtcgttcggaaccactgtgtccccatgggtggtcccaatggacgcactgatgcccttcgcggtcccaaatcctaagcaagaccctaggcccctgccatatttgtgtcatgatgaaccatacacgttcgacatcaatctttcggtgaacctcaagggggaaggaatgagccaagcggcaactatttgtaagagcaacttcaaatacatgtactggactatgctgcaacaacttacccatcattcagtgaatggttgcaacctgcggccaggtgatttgctcgctagcggaactattagcggtccagaaccagagaattttggttcgatgctggaactttcgtggaagggtaccaaacctatcgatcttggtaacgggcagactagaaagttcctgcttgacggcgacgaggtgatcattactggttactgtcagggtgatggttaccggattggatttggacagtgtgctggaaaggtccttccggcccttctgccttcc

SEQ ID NO: 2736 - DNA, 1257 bp, Artificial Sequence
  derived and/or modified sequence
atgagcttcattccagtcgctgaggactccgatttcccgatccacaacctcccatacggagtcttttcgactcgaggagatccgcgaccccgtatcggagtggcgatcggagatcagatactggatttgagcataatcaagcacctctttaccggcccggttctttccaagcatcaagacgtgttcaatcaacccaccctgaattctttcatgggtcttggccaagcggcatggaaagaggctagagtctttctgcaaaacctcttgtcagtgtcccaggcgcgcctccgcgacgataccgaattgcggaagtgcgcatttatctcgcaggcatcagcaaccatgcatcttcctgccaccatcggagactacactgacttctactcgtcgcggcagcacgccactaacgtcggaattatgttccgggacaaagagaacgctttgatgccaaactggcttcacttgccagtgggataccacggacgcgcgagctcagtcgtggtgtcaggcaccccaatcaggcgcccgatgggacaaatgaagcctgacgactcgaaaccccctgtctacggtgcctgtaaactgctggatatggagctggaaatggcctttttcgtcgggccgggaaaccggctgggcgaaccaatccccatcagtaaggcacatgagcacatctttggaatggtactgatgaatgactggtcagcccgggatattcagaaatgggagtacgtcccgctcggacctttcctcggaaagtccttcggcactacggtgtcgccctgggtggtgcccatggacgccctcatgccgttcgcggttcctaacccaaaacaggacccacggccgctgccatatctgtgtcatgacgaaccttacacgttcgacatcaatctctcagtgaatctgaagggtgaaggcatgtcacaagccgccactatctgcaagtcgaactttaagtatatgtactggaccatgctgcaacagctcacccaccattccgtgaacgggtgcaacctgcgcccgggagatcttctggcgagtggaacgatctcgggcccggaaccagagaattttggatccatgctcgaactgagctggaaggggactaagccgatcgatctcgggaacggacagactcgcaagttcctgctggacggtgatgaagtgattatcactggctactgccagggggacggataccgtattggattcgggcagtgcgctggaaaggtcctgcctgcgttgctgccgtcg

SEQ ID NO: 2737 - DNA, 1257 bp, Artificial Sequence
  derived and/or modified sequence
atgtcattcatccccgtggcagaggatagcgactttcctatccataatttgccttacggtgtattctccacccggggggatcctagacccaggatcggagttgccatcggggatcagattctggacctgagcatcatcaagcaccttttcaccggcccagtcctcagcaaacaccaagacgtctttaatcagccaacgctcaattctttcatgggcctcggccaagcggcctggaaggaggcacgagtctttttgcagaacctgctgtcagtgagccaggcacggctgagagacgataccgaactgaggaagtgcgctttcatcagccaggcctctgccaccatgcacctccctgcaacaatcggtgactacaccgacttttattcaagccgccagcatgccacgaatgtcggaatcatgttccgcgataaggagaacgcactcatgcccaattggctccatcttccagttggctatcacgggagagctagctcggtagtagtgtccggcacccctattagacgacccatggggcagatgaaacctgacgactctaagcctccagtctacggtgcgtgtaagttgttggatatggagctggagatggcattctttgtcggccccggtaataggttaggagaacctatacctatctccaaggcccacgaacacattttcgggatggtgctaatgaacgactggtctgccagggacattcagaaatgggaatacgttccactgggcccgttcctgggaaagtcattcggaactactgtttcgccctgggtcgtgcccatggatgcacttatgccattcgctgtccccaacccaaagcaagatcctagaccattgccatatctgtgtcacgatgagccctacacgtttgacatcaacctttccgtgaatctgaaaggcgaaggtatgtcccaggctgcaaccatatgcaagtcaaactttaagtatatgtactggaccatgctccagcagctgacccaccatagtgttaacggttgcaacctccgccccggtgatctgttagccagtggaaccatatccgggcctgagcccgaaaacttcggcagcatgttggagctgtcttggaagggaacaaagccaatagacctgggtaatggtcagactagaaaatttttattggatggagacgaggtgatcatcactggatattgccagggagacggataccgaattggttttgggcagtgtgcagggaaggtgctgcctgcactgcttcccagt

SEQ ID NO: 2738 - DNA, 1257 bp, Artificial Sequence
  derived and/or modified sequence
atgtcctttatcccggtcgctgaggactcggactttccaattcataatctgccttacggtgtgttctcaaccaggggcgatcctcgccctcggattggagtggctatcggggaccagattctggatctgtcgatcattaagcacctttttaccggcccagtgctctcgaaacatcaggatgtctttaatcagccaactctcaactcgtttatgggactcggacaggctgcatggaaggaagcccgcgtgtttctgcagaacctgctctcagtatcccaagctagactgcgggacgatactgaactgcgcaagtgtgccttcatttcccaggcatcggcaaccatgcacctgcctgccaccatcggggattacactgacttttactcatcgaggcaacatgctactaacgtgggaatcatgttcagagataaggaaaacgctcttatgcccaactggctgcatcttcccgttggatatcatggtagagcaagcagcgtggtggtcagtggaactccaatccgccgtccaatgggacagatgaaaccagacgattcgaagccccccgtctacggagcatgcaagctgctggatatggaactggagatggcattctttgtgggtccaggaaacagattgggagaaccgattcccatctccaaggcccatgaacacatattcggcatggtgctgatgaacgattggtccgcaagagatatccagaagtgggaatacgtcccgcttgggccgtttctcgggaaatcctttggtacgaccgtgagcccctgggtggtgccaatggacgcgctcatgccttttgcggtgcctaaccctaaacaagatcctcggcctcttccctacctgtgtcatgacgagccctacaccttcgacataaacctgtccgtgaatcttaagggtgagggaatgtcccaagcggcaaccatctgtaagtcgaactttaagtatatgtactggactatgctgcaacaactcactcaccatagcgtcaacggatgtaacctccgtccaggtgatctccttgcatccggcaccatcagcggacctgagcctgagaacttcgggtcgatgcttgagctgtcctggaagggaaccaagccaatcgatcttgggaatggacagacccgcaaattcctcctggatggcgatgaagtgataatcacgggatactgccaaggtgacggataccgaataggatttggacaatgtgcaggaaaggtccttcccgcactgttgccatcg

SEQ ID NO: 2739 - DNA, 1257 bp, Artificial Sequence
  derived and/or modified sequence
atgtcttttataccggtggccgaggatagtgatttcccgattcataatcttccgtatggagtattctcaacgcgtggggatcctcgaccacgcattggtgtcgctatcggagatcaaatcctggacctttctattattaagcatctgtttactgggccggtcctttctaaacatcaggatgtttttaaccaaccgacacttaactcatttatgggccttggtcaagcggcctggaaggaagcgagagtttttttacaaaatcttttatcagtgtcccaagctcgtttgcgagacgatacagaattaagaaaatgcgcttttattagccaagcttcagcgacgatgcacttacctgcgacaattggggattataccgatttttatagttcgagacagcatgcgacaaacgtgggtattatgttccgtgacaaagaaaatgcgctgatgccgaattggttacatttgccagttggttaccacgggcgtgcgtcatctgtggttgtgagtggcacacccatccgccgtcctatgggccaaatgaagcccgacgatagtaaaccgcctgtgtatggggcgtgcaagcttttggatatggagttagaaatggccttctttgttggacctggaaaccggttaggcgaacctatccctatttctaaagcacatgaacatattttcggcatggtgttaatgaatgattggtctgctagagacattcagaaatgggaatacgtccctctagggccttttttaggtaaaagcttcggcacaactgtctcaccttgggtcgtaccaatggatgcgctgatgccttttgcggtcccgaatccgaagcaggatcctcgacccctgccgtacttatgtcatgatgagccgtatacatttgatattaatttatccgttaatcttaaaggcgaaggaatgtcacaggcagctacgatttgcaaaagtaactttaagtatatgtattggacgatgctgcagcaattgactcatcattcagtgaatggctgcaacttgagaccgggcgatctgctggcgtcaggcacgataagcggccccgagcctgaaaattttggatcaatgctggagttaagctggaaaggcacgaaaccaattgatcttggtaatgggcagacccgaaaatttttgcttgacggcgatgaagtgataatcacgggatattgtcaaggagatggatacagaattggatttggccagtgtgcgggcaaagttcttcctgcattacttccgtcc

SEQ ID NO: 2740 - DNA, 1257 bp, Artificial Sequence
  derived and/or modified sequence
atgtcatttatcccggtggccgaagatagtgattttcctatacacaacttgccctacggggtgttctctaccaggggcgacccgaggccacggattggcgtggctataggggaccaaattctggatctctctattattaagcatctctttacgggacctgtgctctccaagcaccaagacgttttcaaccagcccacattgaacagtttcatgggattgggccaggcagcatggaaagaggcccgcgtatttttgcagaaccttctgagtgtctcacaggcacgactgcgggacgatacagagcttcggaagtgcgccttcatctctcaggcctccgccacgatgcacctgccggccacaataggagattacacagatttctacagcagccgacagcacgctacaaatgtgggaattatgttccgcgataaggagaatgcgctgatgcccaattggctccacctgcccgtgggataccatgggagggcaagttccgtggtggtgagcgggacacctattcggaggccaatggggcaaatgaagcccgacgattcaaaacctccagtgtacggggcctgtaagctgctagatatggaacttgaaatggccttctttgtgggacctggcaaccgactgggcgagccaattcctatcagcaaagcccatgagcacatcttcggaatggtattgatgaatgattggtcagccagggacattcagaaatgggaatatgtacctctcggtcccttcctcggcaaatcattcgggacgaccgtgtctccttgggtagtgcccatggatgccctgatgccgtttgccgttcctaaccccaagcaggacccacgtccactcccttacctgtgtcacgacgagccttatacttttgacatcaacttgagcgtcaacctcaagggcgagggaatgtcccaagcagccactatttgcaagtcaaacttcaaatacatgtattggacgatgctgcaacaactcacgcaccatagcgtcaatggctgtaatcttcggccaggcgacctgttggcttccgggaccatctctggccctgagccagaaaatttcggctctatgctcgaactcagctggaagggcacgaagcctattgatcttgggaacggccagaccagaaagttcctcctggatggtgacgaagtgattatcacgggttactgccagggtgacgggtatcgtattggattcggtcagtgtgctgggaaagtgttacccgccctcctgccatcc

SEQ ID NO: 2741 - DNA, 1257 bp, Artificial Sequence
  derived and/or modified sequence
atgtctttcattcccgttgccgaggattctgactttcctatacacaatctgccctacggagtgttttctacccgcggcgacccaaggcctagaatcggagtcgccattggtgaccagattcttgatctgtccataatcaagcacctgttcacaggaccagtgctgtctaaacatcaagatgttttcaaccagcctacgctgaacagtttcatgggcttggggcaggccgcctggaaagaagccagggtgtttttgcagaacctcctcagcgtgtctcaggccagactgagagatgacaccgagctgcggaaatgcgccttcatctcacaggcgagcgccactatgcacctgcccgcaacgataggggattatacggacttctattccagtcggcaacacgctaccaacgtagggattatgttcagagataaagagaacgcactcatgcccaactggctgcatctccccgtcggctaccacggccgggcttcttccgtggtggtttcaggtacacctatcaggcgcccgatgggacagatgaaacccgatgactccaagccccccgtgtatggagcctgcaagctgcttgacatggaacttgaaatggcattcttcgtggggccaggcaaccgactgggtgagccgatacccatcagcaaggcccacgaacatatcttcggcatggtgctcatgaacgattggtctgccagagacatacagaaatgggagtacgtaccactgggcccctttctggggaagtcattcggaacgactgtgagcccttgggtcgtgcccatggacgctctcatgccttttgccgtccctaacccaaagcaggaccctcggcctctgccctacctgtgtcatgacgagccctataccttcgatatcaacctctccgtgaatctgaaaggtgaggggatgtcccaggctgctactatttgcaagtccaactttaaatacatgtactggacaatgctccagcagctgacacaccacagcgtgaatggctgcaatctgaggcctggggacctcctcgcctccggaactatttctggccctgagcccgagaactttgggtctatgctcgagctgtcctggaagggtacaaaaccaattgacctgggaaacggacagaccagaaaatttctgctcgacggcgacgaggttattatcaccggttactgccagggcgatgggtaccgaattggctttggccagtgcgccggcaaggtgctccctgcactgctgcccagc

SEQ ID NO: 2742 - DNA, 1257 bp, Artificial Sequence
  derived and/or modified sequence
atgtctttcatccctgtggcggaagactcagattttcctatccacaacctcccctacggggttttcagtacacggggagatccacgcccccgaattggcgtcgcgatcggcgatcaaattttggatctgtcgataattaagcacctgtttactggtccggtgctgagcaaacaccaggatgtgttcaatcagcccacactgaactcgttcatgggtctcggacaggcggcgtggaaggaggcaagagtcttcctccagaatctgctcagcgtgtcccaggccagactgcgtgacgacactgagcttcgcaagtgcgctttcattagccaggcgtcagccactatgcacctgcccgcaaccatcggggactacactgacttttatagtagcagacagcatgctacaaacgtgggaataatgtttagagataaggagaacgctttaatgcctaactggctacatcttcccgtgggatatcacggacgtgccagttccgtcgttgtgtctggcactcccatcagacgacctatgggacagatgaaacccgacgatagcaaaccgcctgtgtacggcgcctgtaaactgctggacatggaattggaaatggccttcttcgtgggcccgggaaaccgccttggcgagcccatccccatttcaaaggcacacgaacatatctttggaatggtgctgatgaacgattggtctgcacgcgatattcaaaagtgggagtatgtgccactggggcctttccttggtaagtccttcggtaccaccgtctcgccgtgggtggtgccaatggacgcactgatgcctttcgccgtcccgaaccccaagcaggacccgcgacctcttccgtatctgtgtcacgatgaaccttacacttttgatataaatctctcagttaatcttaagggcgagggtatgagtcaggctgcaaccatctgcaaatcgaacttcaagtatatgtactggaccatgctacaacagcttacacaccacagcgtgaacgggtgcaacttacgtccaggcgatcttctggccagcggcactatttcgggtcctgagccagagaacttcggaagtatgctggagttgagctggaagggaaccaaacctatcgacttggggaatgggcagacacgaaaattcttactagacggggatgaagtcatcatcacggggtactgtcagggtgatgggtaccgcattgggttcggccagtgcgcgggaaaggtgctgcccgcactgctcccgagc

SEQ ID NO: 2743 - DNA, 1257 bp, Artificial Sequence
  derived and/or modified sequence
atgagttttatccctgtggctgaagattcggacttccctattcataatctaccatacggagtcttttccacacgaggagacccacgccctcgtatcggagtggccataggcgatcagatactagacctgtcaattattaagcatctattcacaggtcccgtcttatctaaacatcaggatgtctttaatcagccaacacttaattccttcatggggctcggacaagccgcctggaaggaggcccgggtcttcctgcagaacttgctttctgtaagtcaggctcgtttgcgagacgacacggaacttagaaagtgtgccttcatttcacaggcaagcgccactatgcatctcccagccactattggcgactacactgacttctattcaagccgccaacacgccaccaatgtcggtattatgtttagagacaaagagaatgcccttatgcccaactggctccatctgccagttggatatcacgggagagcctcctctgtggtggtcagtggcactcccataaggaggcccatggggcagatgaaaccggatgacagtaaacctcccgtatacggcgcctgtaagctgctggatatggagctcgagatggctttcttcgtcggcccaggaaatcgactcggcgagcctatccccatcagcaaagctcacgaacacatatttggtatggtcctcatgaacgattggtccgcgcgagacattcagaagtgggaatacgtcccattgggtcccttcctcggcaagtcctttggcaccaccgtgagcccttgggtggttccaatggacgcgttgatgccattcgccgtgcctaacccaaaacaggatcctaggcccttgccctacctctgtcatgacgagccatacacatttgacatcaacttatcagtcaacctgaagggcgaaggtatgagccaagccgcaactatctgtaagtcaaacttcaagtatatgtactggacaatgctgcagcagctgacccaccattctgtgaatgggtgcaatctgaggcctggagacctattagcatcgggtacaatatccgggcctgaacccgagaacttcggtagcatgctcgaactcagctggaagggcacaaagcctattgatctgggaaatggacagacgcggaagttcctgctcgatggagatgaggttattattacgggttactgtcagggggacggataccgaattggcttcggtcagtgcgccggcaaagtgctgccggctctcctcccatcc

SEQ ID NO: 2744 - DNA, 1257 bp, Artificial Sequence
  derived and/or modified sequence
atgtcatttatccccgtcgcggaggattcagatttcccgattcacaatctgccgtacggagtattctcgactcgcggcgatccccgtcctcgcattggcgtcgcgatcggtgatcagatcctggacctgtccatcatcaagcacctcttcacgggacccgttctgtcaaaacatcaggatgtgttcaaccaaccgactctcaactcgttcatgggtctgggacaggcggcttggaaggaggctagagtgttcctccagaacctcctgtccgtgtcacaggcaagactcagggatgacaccgaactgcggaaatgtgcgttcatctcgcaggcatcggccactatgcacctgccagccaccattggagactacacggacttttacagcagccgccagcatgccaccaacgtggggatcatgttcagggacaaggagaacgccctgatgcctaattggttgcacctccctgtggggtaccacggacgggctagcagcgtggtggtgtccgggactccaatacgccgccctatgggccagatgaaaccagacgattctaaacctccggtctacggcgcctgcaagctcctggacatggaattggaaatggcgttcttcgtgggaccgggtaacagacttggcgaaccgatcccgatctcgaaggcccacgagcatatcttcggaatggtgctcatgaacgactggtcggcgcgggatatccagaagtgggagtacgtgccactcggtccctttctgggaaaatcattcggaactaccgtctccccgtgggtcgtcccaatggacgctctcatgccattcgccgtgcctaacccgaagcaggacccgcgcccgctgccgtacctctgccacgacgagccgtataccttcgatatcaacctgagtgtgaacttgaagggtgagggaatgtcccaagcagccactatctgtaagtctaattttaaatacatgtactggaccatgctgcaacaactgacccatcattcggtgaatggatgcaatcttcgacctggggaccttctggccagcggcaccatctcgggcccagaaccagaaaattttgggtccatgctggaactgagctggaagggaaccaagccaattgacctgggcaacggacaaactcggaagtttctgttggacggcgacgaagtcatcatcactggatactgccaaggcgatggataccggatcggattcggacagtgcgcaggaaaggtgcttcccgcactcctgccgtcc

SEQ ID NO: 2745 - DNA, 1257 bp, Artificial Sequence
  derived and/or modified sequence
atgtcgttcatccctgtggctgaggactccgacttccctatccacaacctgccctacggagtgttttcaactcgcggagatccaagacctagaatcggcgtggccatcggtgatcaaatcctcgacttgagcatcatcaagcatctgtttactggccctgtgctgtcgaaacaccaggacgtctttaaccagcctactctgaactccttcatgggcctcgggcaggcggcctggaaggaagcgcgcgtctttctgcagaatctcctctcggtgagccaagcgagactccgcgacgacaccgagttgcggaagtgcgcctttatctcgcaagcctccgccactatgcatctccccgcaactatcggcgactacactgacttctactcatccaggcagcacgcgaccaacgtgggtatcatgttccgggacaaagaaaacgcactgatgccgaactggctccatctgccggtcggataccacgggcgagcgtcgtcagtggtggtgtccggcaccccgatccgccgcccgatgggacagatgaagcccgacgactccaagccgccggtctacggagcgtgcaagctcctggatatggagctggaaatggcgtttttcgtgggaccaggcaaccggctgggagaaccgatcccaatctcaaaggcacacgaacacatttttggaatggtgctcatgaatgactggagcgcccgtgacatccaaaagtgggaatacgtgccactgggccctttcctgggaaagagctttggaaccactgtgtcgccatgggtcgtgcctatggatgcgcttatgccatttgccgtgccgaacccgaagcaggatccgcgccccttgccttacctgtgccatgatgagccgtacacgttcgacattaatcttagcgttaatctgaaaggagagggaatgagccaagccgcgaccatctgcaaatccaatttcaagtatatgtattggaccatgctgcagcaactgactcaccactcggtcaatggatgtaacttgcgtccgggggatctcctcgcctcaggaaccatctctggcccggagccagaaaacttcggatcgatgttggaactgagctggaagggcacgaaacccatcgacctggggaacgggcaaaccagaaagttcctgctggacggagatgaggtgattatcacgggttactgccaaggagacggctacaggatcggattcggccaatgtgccggaaaggtgctgccggctcttctgccatcg

SEQ ID NO: 2746 - DNA, 1257 bp, Artificial Sequence
  derived and/or modified sequence
atgagcttcatcccagtcgcggaagattcggacttcccaattcacaacctgccatacggtgtgttttcaactcgcggcgatcctaggcctcggatcggcgtggccattggggaccaaatcctggatttgtccattatcaagcatctctttactggcccggtgttgtccaagcaccaggatgtgttcaaccaaccaaccctgaacagctttatgggcctgggacaggcagcgtggaaagaagcccgggtctttctccagaacctcctctccgtctcgcaagcgagactgagagacgacacggaacttagaaaatgcgctttcatctcccaggcttccgcgactatgcacctgcctgccaccatcggagactacaccgatttctacagcagccggcaacacgccaccaacgtggggatcatgttccgggataaggaaaatgcactgatgccgaactggctgcacctgccggtcggataccatggaagagcctctagcgtggtggtttcgggtactccaatcaggcgccctatgggccagatgaagccggatgactcaaagccgccggtgtacggagcctgcaagctgcttgatatggagctcgaaatggccttcttcgtgggaccgggaaacagactgggtgagccaatccccatcagcaaagcgcatgaacacatattcggaatggtgctcatgaacgactggtcggcccgcgacatccaaaagtgggaatacgtgccactgggaccattccttggaaagagctttggaaccaccgtctcgccgtgggttgtccccatggacgcactgatgccattcgccgtgccgaatcctaagcaagacccccgcccgctgccgtacctgtgccatgatgagccatacaccttcgacatcaatctgtcggtgaatctcaagggggaaggaatgagccaggctgctaccatctgtaaatcgaatttcaagtatatgtattggactatgttgcagcagcttactcatcactcggtgaacggatgtaatctccgcccaggggacctgctggcctctgggaccatttcaggaccggaaccggaaaacttcggctccatgctggaactctcgtggaaggggaccaagccgattgatctcggaaatgggcagacgagaaaattcctgctggacggtgacgaagtgatcatcaccggctactgccaaggtgacggatacaggatcggattcgggcaatgcgccggaaaggtcctgccagccctgctgccgtcc

SEQ ID NO: 2747 - DNA, 1257 bp, Artificial Sequence
  derived and/or modified sequence
atgtcgtttataccagtggcagaagattctgacttccctatccataatcttccttacggtgttttctcaacccgcggggatcctcgccctcggattggtgtggcgatcggtgaccaaatcctggatctgtcgattatcaagcatcttttcactggaccagtgctctccaaacaccaggacgtctttaaccagcccactctgaatagcttcatgggtttgggtcaagcagcatggaaggaggcaagagtctttctccaaaacctgctttcagtctcgcaagccagattgcgcgacgatactgaacttagaaaatgtgccttcatatcccaggcaagcgccactatgcatcttccggcaactattggtgactacacggatttctactcctcccggcaacatgccaccaacgtggggattatgttccgagataaggagaatgcgctgatgcccaattggcttcatcttcctgtcggataccacggaagagcttcgtccgtggttgtctccggaacccctattagaaggccaatgggacagatgaaaccagacgacagcaagcctcccgtgtacggagcatgtaagctcctcgatatggagcttgagatggcgttttttgtgggaccgggaaatagactgggagaacccatccctatttcgaaggcacacgaacacatcttcggcatggtgctgatgaacgactggtctgcgagagatatccagaaatgggagtatgtgcctcttgggccgtttctcggaaaatcgtttggtaccactgtctcaccttgggtcgtgcctatggacgcactcatgccattcgcagtgccaaaccctaagcaagacccgcggcccctgccctacctttgccacgacgaaccatacacctttgacatcaatctgtcagtgaatctgaaaggggaaggcatgtcccaagctgcaaccatttgtaaatcaaactttaagtatatgtactggaccatgctccagcagctgactcatcattcagtcaacggttgtaacctgcgtccaggggatctgctggcatccgggacgatcagcggcccagaaccggagaactttggctcaatgcttgagctttcttggaaaggaaccaaaccaatcgacctgggtaacggccaaactagaaagtttctgctggacggagatgaagtcatcattactgggtactgtcagggcgacggttaccgaatcgggtttggacaatgcgcaggtaaggtgttgcctgcactgctcccttcg

SEQ ID NO: 2748 - DNA, 1257 bp, Artificial Sequence
  derived and/or modified sequence
atgtccttcattcctgtagcagaggacagtgacttccctatacataacttgccatatggagttttctccacgagaggagatcctcggccccggatcggggtcgctattggcgatcagatcctggatctctctatcatcaaacacctgttcacggggcctgtactgtcaaaacaccaagacgtgttcaaccagccgacattgaatagctttatgggccttgggcaggctgcttggaaagaagctcgcgtgttcctgcaaaacctcctatcagtttcccaggcccgtctaagggatgacacagaacttaggaagtgtgcattcattagccaagcgtccgcaaccatgcatcttcccgccactataggagactacacagacttctatagtagcaggcagcacgccaccaacgtgggcattatgttccgagacaaagagaacgctctaatgccgaattggcttcaccttccagttggctatcacggacgagcttcaagcgtggtcgtttctggaactcctattcgccgaccaatgggacaaatgaagcccgatgactcaaagccacccgtgtacggtgcgtgtaagctgctagatatggaactcgagatggccttcttcgtggggcctggtaatcggctgggcgaacccatacccatttcgaaggctcacgaacacatctttggcatggtgctgatgaacgactggtcagcacgggatattcagaagtgggagtatgtgccactaggtccatttctgggcaaatctttcgggactacagtgagcccatgggtcgtcccgatggacgctctcatgccatttgctgtgcctaatcctaaacaggaccctcgtcccttgccctacctttgccatgatgagccatataccttcgatatcaatttgagcgtgaatctcaagggggaaggaatgtcccaagccgctacgatttgcaagtccaatttcaaatatatgtactggacgatgcttcagcaactcacccaccactcagtgaatgggtgtaacttgcgacccggcgatctcctggccagcggcactatttccggacctgagcctgagaatttcgggtcaatgctcgagttatcttggaagggcaccaagccaattgatcttgggaatggtcagactagaaagtttcttttggatggggacgaagtgatcattactggctactgtcaaggcgatggttaccgaattgggttcggccagtgtgcagggaaggtcctccctgctctgctcccatcc

SEQ ID NO: 2749 - DNA, 1257 bp, Artificial Sequence
  derived and/or modified sequence
atgagcttcattccagtggcagaggactctgattttcctatccataatcttccctacggggtgttctccactcggggtgatcctaggcctaggataggggtcgccattggggatcagattctggatctgagtatcattaagcaccttttcactggacctgtgctctcgaagcaccaggacgttttcaaccaacctaccctgaactccttcatggggctgggacaggccgcttggaaggaggccagagtttttttacaaaatctgttgtccgtctcacaggcaagactgagagatgataccgaactgcgcaagtgtgcgttcatttcccaagcatctgccaccatgcatcttccagctactatcggcgactacacagacttttactcaagtcgacagcacgcaactaacgtaggtatcatgtttcgagataaggaaaatgcgctgatgcccaactggctgcacctccccgtggggtaccatggcagagcctcatcagttgtggtctccggaacgcccatcaggcggcctatgggtcagatgaagcctgatgattccaagcctcctgtatacggtgcctgtaagttgttagacatggagcttgagatggccttctttgtgggtcccggaaatcgcctcggcgaaccaattcccatctccaaggcccatgagcacatttttggcatggtcctcatgaacgactggtccgcccgcgatattcagaagtgggagtatgtcccacttggaccgttcctgggcaagtcatttggcacgacagtgtctccttgggtggtgcccatggacgccctcatgccctttgccgtgcccaatcccaagcaagacccccggccactgccatacctgtgtcacgacgagccctatacgtttgacattaatctctccgtcaatctgaagggggagggaatgagccaggccgcaaccatttgtaagtccaactttaagtacatgtattggacaatgctgcagcagctgactcaccattcggtgaatggatgcaacctcagacctggcgacctcctagcatcaggaacgatttctggtccagagcctgaaaatttcggctcgatgctcgagcttagctggaaagggacgaagccaatcgatctgggcaatgggcagacgcgaaagtttttgcttgatggggacgaggtgatcatcaccggatactgtcagggggacggctatcgcattggtttcggtcagtgtgcggggaaagtccttcctgccctgctgccttct

SEQ ID NO: 2750 - DNA, 1257 bp, Artificial Sequence
  derived and/or modified sequence
atgtcatttatcccggttgctgaggactcggatttcccgattcacaacttgccgtacggcgtgttcagcaccagaggtgaccctcgcccacgtatcggtgtggcgattggcgatcaaattctggatttgagcatcattaagcacctgtttacggggccagtgctcagcaagcaccaggacgtttttaaccagccgaccttgaactcttttatgggcctgggccaagcggcgtggaaggaagctcgcgttttcctacagaacttgctgtcagtgagccaggctcgtctgcgcgatgacaccgaactgaggaaatgtgcattcatttcccaggctagcgcgacgatgcatctccctgcaactatcggtgactacaccgatttctattcaagccgccagcacgccacgaatgtgggcatcatgtttcgcgataaggaaaatgcactgatgccgaactggctgcacctacctgtcggctatcatggcagggcgagcagcgtggttgtcagcggtacgccgatcagacgccctatgggtcagatgaagcctgatgactcaaagccgcctgtttacggcgcatgcaaattactagatatggagttggagatggcgttttttgtcggaccgggtaatcgcttgggggaaccaatccccatcagcaaagctcacgaacacatcttcggtatggtactgatgaacgactggagcgccagagacattcaaaaatgggagtacgtccctctgggtccattcctgggcaaatccttcggtaccactgttagcccatgggtcgtccccatggatgctctgatgcctttcgccgtcccgaaccctaagcaagatccgcgcccgctgccatacctgtgtcatgacgagccgtatacgtttgacataaacctgtccgttaatctgaaaggagaaggtatgtctcaggcagcgaccatttgcaaatccaactttaagtacatgtattggaccatgctccagcagctgacccaccactccgtgaatggatgtaacctcaggcctggggacttgctcgcatctggcaccattagcggtccggagccggaaaactttgggtctatgctggagttgagctggaaggggaccaagccgatcgatctgggaaacgggcagaccaggaagttcctgctggacggagatgaagtgatcataaccgggtactgccaaggcgacggctatagaatcggtttcggtcagtgcgcgggcaaagtgttgccggccctgttgccgagc

SEQ ID NO: 2751 - DNA, 1257 bp, Artificial Sequence
  derived and/or modified sequence
atgagttttatcccagttgcagaggattcggattttcccatccataatctgccatacggcgtgtttagtaccagaggcgaccccagaccccggatcggcgtcgctattggagaccaaatactggatctttctatcatcaagcatctcttcactggcccggtactctctaagcaccaggacgtgtttaaccagcccacgttaaattcattcatgggtctgggtcaggccgcttggaaggaagcccgggtgtttctccagaatctgctgtccgtctctcaggccaggctgagggatgataccgaactgcggaagtgcgcctttataagccaggccagcgccactatgcatctgccagcgacaattggcgactataccgatttctactccagcagacagcacgccacaaatgtcggtataatgtttagggataaggaaaacgccttaatgcccaattggctacacttgccagtcgggtaccatggcagagcctcatctgtggtggttagcggtacacccatccggagacctatgggtcagatgaaacctgacgattcaaaacctcctgtgtacggcgcttgcaagctattggacatggagctggagatggcattcttcgttgggccgggtaacagactgggagagccaatccccatctccaaggcacatgagcatattttcggaatggtcctgatgaacgattggagcgcaagggacattcagaagtgggaatacgtgccacttggaccctttttggggaagagctttggaaccacagttagcccgtgggtggtgcctatggacgccctcatgccctttgcagtccctaaccctaagcaagatccccggcctctgccgtacctgtgtcacgatgagccatatacttttgatattaacctgtcggtgaacttaaaaggcgagggaatgtcccaagcggccaccatctgtaaatctaacttcaagtacatgtactggacaatgctccagcagcttacacatcactccgtgaatggatgcaacctacgacccggagacctgttggccagtggcaccattagcggccccgagccggagaattttggttcaatgctggaactgtcttggaaaggcacaaagccgatcgacctcggcaacgggcagacacggaagttcttgcttgacggggacgaggtcatcataaccgggtattgccagggggacggctaccggatcgggtttggccagtgcgctgggaaggtcctcccagctctcctccccagc

SEQ ID NO: 2752 - DNA, 1257 bp, Artificial Sequence
  derived and/or modified sequence
atgagcttcatcccagtggccgaggactccgatttccccattcacaacctgccatacggagtgttcagcactagaggagatccacgcccaaggatcggagtcgcaatcggggaccagatcctggacctgtcaattatcaaacacctgtttaccggacctgtgttgtcgaagcatcaggacgtgttcaatcaaccaactcttaattccttcatgggactcggtcaggctgcctggaaagaggctcgggtgtttctgcagaacctgctgtcggtttcccaggctcgcctgcgggacgacaccgagctgcgcaaatgcgccttcatctcacaggcctccgccaccatgcacctccctgcaaccatcggcgattacacggacttttactcaagccggcaacatgccactaatgtgggcattatgttcagggacaaagagaacgctctgatgccgaattggcttcacctcccggtggggtaccacggcagggcatcctcggtcgtggtgagtgggaccccaatcaggaggcccatggggcaaatgaaaccggatgactcgaagcctccggtgtatggagcgtgcaaactgctcgatatggaactggagatggcattcttcgtggggccgggaaaccgcctcggtgagccaatcccaatctcgaaagctcatgaacacatcttcggaatggtcctcatgaacgactggtcggcgagagacattcaaaagtgggaatacgtgccactgggcccttttctgggcaagagcttcggcactactgtgtccccatgggtggtccccatggatgccctgatgccattcgccgttcctaatccgaagcaggatcctcgcccgctgccgtacctctgccacgacgagccttacaccttcgatatcaatctctcggtgaacctgaaaggggagggaatgtcacaggccgcgactatctgcaaatcgaacttcaaatacatgtactggaccatgctccagcagctgactcaccactcagtgaacggatgcaacctgcgacccggagatcttctggcgtccgggaccatttcgggtccggagccggaaaactttggatcgatgctcgagctgagctggaagggaaccaaacctatcgacctgggaaacggacagactagaaaattcttgctcgacggggatgaagttatcattactggatactgccaaggagacggataccggatcggattcggccagtgcgccggcaaggtcctccccgccttgctcccgtcg

SEQ ID NO: 2753 - DNA, 1257 bp, Artificial Sequence
  derived and/or modified sequence
atgtcgtttatacctgtcgccgaggactctgattttcctattcacaatctgccgtatggcgtctttagcactcgtggagatccccggccacggatcggggtggctattggggatcagatcttggatttgtcgatcattaaacacctgtttaccggtcccgtgctttccaaacaccaggacgtgttcaaccaacctactctgaactcatttatggggctcggacaggcagcatggaaggaagcaagggtgtttctccagaacctcctgtccgtgtcccaagcacgtctgagagacgatactgaactgcgaaaatgcgcattcatctcacaagcatcggcaactatgcatctccctgcaaccattggggattacaccgacttctactcgtcccggcaacatgcgacgaatgtgggcattatgtttagagataaggagaatgctttgatgccaaattggttgcatctgcctgttggctaccacggtcgggcctccagcgtggtcgtgtcaggtacccctattagacgtccaatgggacagatgaagcctgacgattccaagccgcctgtctacggggcgtgcaaacttctcgacatggaattggaaatggcctttttcgtcgggccaggcaaccggttgggtgaacctataccaatcagcaaggcacatgagcacatatttggtatggtccttatgaacgattggtccgcaagagacattcaaaagtgggagtacgtgcctcttggaccttttcttggaaagagcttcgggaccaccgtgtcgccttgggtggtgcctatggatgccctcatgccgttcgccgtgccgaacccgaagcaagacccaagaccactgccctacctgtgtcatgatgaaccttatacgtttgacattaatctttctgtcaatcttaaaggagaaggaatgtctcaggctgcgaccatctgtaagagcaactttaagtatatgtactggacgatgctgcaacaactgacccatcattccgtgaatggatgcaaccttcgacccggtgatctgcttgcgtcgggaaccatttcaggaccagaacccgagaacttcggctccatgctggagttgtcgtggaagggaactaaacctattgatctcggaaacggtcaaacgaggaagtttctccttgacggggatgaagttatcattactggatactgtcaaggtgatgggtacaggataggattcggtcagtgtgctggtaaggtcctgcccgcacttctccctagc

SEQ ID NO: 2754 - DNA, 1257 bp, Artificial Sequence
  derived and/or modified sequence
atgagcttcattcctgttgcggaggatagcgatttcccaattcataatttgccttacggagtttttagcaccagaggagatccaagacctcgtattggtgtcgctataggtgatcaaatcctggatctctctatcataaaacacctgtttacaggccctgtactttctaagcaccaagatgtattcaatcaacccaccttgaattcattcatgggccttggccaagctgcatggaaggaagctcgggtgtttttgcagaatctcttgtccgtgtctcaggctagactcagggatgacaccgaactcaggaagtgtgcctttattagccaggcttcagcgactatgcatctgccagctaccatcggtgactacacagatttttactcatcccgacagcatgcaactaacgtggggattatgtttcgagataaggagaacgctctaatgcctaactggctgcaccttccagtgggttatcacggtagagcctcctctgttgtggtcagtggaacacctattaggagacccatgggtcagatgaagcctgatgacagcaagcctccggtgtatggagcgtgtaagttgctagacatggaacttgagatggcttttttcgtaggtcctgggaatcgtctaggtgagccgattccaatatctaaggctcatgaacatattttcggtatggtcttgatgaatgattggtcagcacgcgacattcagaaatgggagtatgtacctttgggaccttttctagggaaatccttcggaactactgtctcaccgtgggttgtcccgatggacgctctcatgcctttcgcagtgccaaaccctaaacaagatcctcgtcccctcccatacctgtgccacgatgagccctatacgtttgacattaacctgtcagttaaccttaaaggtgagggaatgtctcaagccgccacaatctgcaagtccaatttcaaatacatgtattggacaatgctacaacaattgactcaccatagtgttaacggttgtaacctgagaccaggagatctcttagcttctggcactatctcaggacctgagccagagaatttcgggagcatgcttgagctctcatggaagggcacaaaacctatcgaccttggtaatggacagacgcgtaaatttttgcttgatggggacgaggttattatcaccggatactgtcaaggtgatggttataggattggatttggacagtgcgccgggaaggtcttgcctgctcttctccctagt

SEQ ID NO: 2755 - DNA, 1257 bp, Artificial Sequence
  derived and/or modified sequence
atgtcctttattcctgtagcggaagattcagactttcctatacacaatctgccttacggtgtgttcagcactcggggagaccctcgcccccgcattggggttgcaatcggggatcagatccttgacctgtctatcatcaagcacctgttcacaggcccagtgttgagcaagcaccaagatgtgttcaaccagccaaccttgaattcatttatgggactcggccaagctgcttggaaagaagcccgggtgttcctacagaatcttctgagcgtgtcgcaggccaggctgcgggacgacaccgaattacgcaaatgtgctttcatttcgcaagcctctgctacgatgcatttgcccgccactatcggcgactacacggacttctatagttcccggcagcacgccactaatgtgggaattatgttccgcgataaagaaaatgccctgatgccgaactggctgcatctgccagtaggctatcatggtcgggctagctccgtagtcgtttctgggacaccaatacggagaccgatgggccaaatgaagcctgatgactccaaacccccagtctacggagcttgcaaactgctggacatggagctggagatggctttcttcgtggggccaggaaaccgtctgggggagccaatacctatctctaaggctcatgagcacatcttcgggatggtgcttatgaacgactggtccgcccgcgatatccagaaatgggagtatgtacctctcggcccgtttcttggtaagagctttgggaccactgtttctccttgggtggtgcctatggacgctctgatgccatttgcggtgcctaatcccaaacaagatccccgcccgctgccttatctctgccatgatgaaccatacacctttgacataaacctcagcgtgaacctgaaaggggagggcatgtcccaagccgccactatttgcaaatccaatttcaagtacatgtattggactatgctgcaacaactgacacaccattcggtcaacggctgtaacctgaggccaggcgatcttctggcttcggggacaatttccggcccagagcccgaaaacttcgggtccatgctcgagctatcttggaaggggacaaagcctatcgatctggggaatggtcagacccggaagttcctgcttgatggggacgaggtgatcataacaggttattgccagggggatggatataggatcggtttcggccagtgtgctggaaaggtgttaccagcactgctgccaagt

SEQ ID NO: 2756 - DNA, 1257 bp, Artificial Sequence
  derived and/or modified sequence
atgtcctttatccctgtcgcagaagatagtgatttcccaatacataacctgccttatggggtattttccaccaggggcgatcctaggccacgcattggtgtggcaattggcgaccagatcctcgatctttctattataaagcacctcttcaccggccccgtgctttccaagcaccaggacgtattcaatcaacccactctgaattcttttatgggtttgggccaggccgcttggaaggaggcgagggtgtttcttcaaaatcttctctctgtctctcaagccaggcttagagacgacacggagctgcggaaatgcgcatttatctctcaggccagcgccaccatgcacctccctgccactattggtgactatacggacttttatagttcacggcagcatgcaaccaacgtgggtataatgtttcgggacaaagaaaacgctctgatgccaaattggctgcatctgcccgttgggtaccacggcagagcctcctccgtggttgttagcggcacccctatccggagacccatgggacagatgaaaccggatgacagcaagcccccggtgtacggagcgtgcaaactgctcgatatggagctggagatggccttcttcgtgggtcccgggaatcggttgggggagcctatcccaatttcaaaggctcacgagcacatcttcgggatggttctcatgaatgactggagtgctagggatattcagaagtgggaatatgtgcccctgggcccttttctcggtaaaagctttgggaccactgtgagcccgtgggtggtacccatggacgctcttatgccgtttgctgttccaaacccgaaacaggatccccgccccttgccgtatctctgccatgacgaaccttatacgtttgacatcaatctgtcagtgaatttgaaaggagaaggaatgtctcaggccgcaactatttgtaaaagtaattttaagtatatgtactggactatgctccagcaactgacccaccactccgtgaacggttgtaatctgcgcccaggcgatctcctggcgagcgggacgatctcaggtcccgagcctgagaacttcggttctatgctggagctcagctggaaagggactaaaccaatagatttggggaacggacagacgagaaaatttctgctggatggtgacgaagtgatcatcaccggatactgtcagggtgacggatatcggatagggttcggccagtgcgccggaaaggtcctgcctgcgcttttgccgagt

SEQ ID NO: 2757 - DNA, 1257 bp, Artificial Sequence
  derived and/or modified sequence
atgagctttatcccggtggccgaggacagcgattttccaatccacaacctcccgtacggagtgttctcgacccgcggcgaccctagacccagaatcggggtcgcaatcggtgaccagatcctggacctgtccatcatcaaacatctcttcactggcccggtgctctcaaagcaccaggacgtgttcaaccagccgaccctgaactccttcatgggactgggacaggcagcatggaaagaagcgagggtgttcctgcagaacctgctgtccgtgtcgcaggcgcgcttgagagatgacaccgaactgaggaaatgcgccttcatctcccaggcaagcgcaaccatgcatctgccggccaccatcggtgattacaccgatttctactcgtcccgacaacacgcgactaatgtgggaatcatgttcagggataaggaaaacgccttgatgccaaattggctgcacctgccggtcggttaccacggaagggcttcttcggtcgtcgtgtccgggacgccgatccggcgccccatgggacagatgaagccagacgactcgaagcctccggtgtacggcgcctgcaagctgctggacatggagctggagatggcattctttgtgggaccgggaaatagactcggcgagcctatccctatcagcaaagcccatgaacacattttcgggatggtgctgatgaatgactggtcggctcgcgatatccagaagtgggaatacgtgcctctgggaccattcctgggaaagagcttcggcactactgtgtccccgtgggtggtgccaatggacgcactgatgccgtttgcagtgccgaaccctaagcaggacccccgcccgcttccatacctctgccacgatgagccttacactttcgatatcaatctgtcggtgaatctgaagggagagggaatgagccaggccgctactatttgcaagagcaatttcaaatacatgtactggactatgcttcagcagctgactcaccactcagtcaatgggtgcaaccttcgccccggcgatctcctggcctccggtactatctccggccctgaacctgaaaacttcggcagcatgctggagctgtcctggaagggcaccaagccaatcgatcttggaaatggacaaacccggaagtttctccttgatggggatgaagtgatcatcaccggctactgccagggcgacggataccggatcggatttgggcagtgcgcgggcaaggtcctgccggccctgctgcccagc

SEQ ID NO: 2758 - DNA, 1257 bp, Artificial Sequence
  derived and/or modified sequence
atgtcatttattccagtagctgaggatagcgattttcccatccataacctgccgtacggtgttttcagcacccgtggggaccctcgcccccgcataggggttgccattggcgaccagatcctggacttgagcatcataaagcatctgtttaccgggcccgtcctcagcaagcatcaggatgtgttcaatcaacccacgctcaactcgtttatggggctaggtcaggccgcttggaaggaggcccgtgtattcttgcagaacctactctctgtgtcacaggctcgactccgggacgataccgaacttcgtaagtgtgcgtttatatctcaggcttcagcaacaatgcacctgccagccacaatcggcgattataccgacttttatagcagtaggcagcatgccacaaatgttggcattatgtttagagacaaggagaatgccctgatgcccaactggctccaccttcccgtcgggtaccacggacgcgcgagctctgtggtcgtttctggcacccctattagacgtcccatgggtcagatgaagcctgatgatagcaaaccccccgtttatggagcctgtaaactgctagatatggaactggagatggcatttttcgtcggacctggaaaccgtcttggtgaacccattcccatatcaaaggcacatgagcatatcttcggcatggtgcttatgaacgattggtccgcgcgggacatacaaaagtgggagtatgtaccgctgggcccgtttctagggaaatcgtttggaactacagtgtctccctgggtggtgccaatggacgccctaatgccattcgcagtgcccaatccaaaacaagaccctaggcccttgccttatttgtgccatgatgaaccgtatacatttgatataaatttgtcagtgaatctgaaaggagaagggatgtcgcaagccgctacgatttgtaagtctaactttaagtacatgtattggaccatgctgcaacaactgacgcatcattccgtcaacggctgcaacctgaggccaggcgacctgctggcaagcgggactataagtggccctgaaccggaaaatttcggctccatgctcgagctcagctggaagggaactaagcccattgacttgggtaatgggcagaccagaaagtttcttctcgatggagacgaggtcatcattactggatattgccagggcgatgggtatcgcataggatttggacagtgtgcaggtaaagtcctgcctgccctcctcccttct

SEQ ID NO: 2759 - DNA, 1257 bp, Artificial Sequence
  derived and/or modified sequence
atgagcttcatcccagtcgcagaggattccgatttccctatccacaatctcccttacggcgtgtttagcacccgcggcgatccccgaccccggatcggcgtggctatcggtgaccagatcctggacctgtcaattataaagcacctatttacgggccctgtcctgtctaaacaccaggatgtatttaaccagcctactcttaactctttcatgggcctgggacaggccgcctggaaggaagcccgggtttttctccaaaatctgttgagcgtctcccaggcacgcttgcgtgatgacaccgaactgagaaagtgcgccttcatctcacaagcgtctgctacaatgcacctccccgctacaataggagactacactgacttctacagttctcgtcagcacgccactaatgtaggcattatgtttcgggacaaagagaatgccttgatgcccaactggcttcacctacccgtggggtatcacggcagggcgagttcagtggtcgtttccgggaccccaataaggagaccaatgggtcagatgaaacctgatgatagcaagccgccggtgtatggagcatgtaaactgttggatatggagctggagatggctttcttcgtgggtcccggaaaccgcttgggggagcccatacctatctctaaagcacacgagcacatcttcggcatggtcctcatgaacgattggagtgcccgagatattcagaagtgggaatatgtccccctggggcccttcctgggcaagtccttcggaacaactgtaagtccatgggtggttcctatggatgctctcatgccattcgccgttcctaatcccaaacaggacccccgacccctgccttacctctgccatgacgagccctacacattcgacatcaacctatcggtgaacctgaaaggcgagggaatgtcccaggcagctaccatatgtaaatccaatttcaagtacatgtactggactatgctgcagcaactcacccaccattctgtgaatggttgtaatttgagaccaggagatttactggcatccggaacaattagcggtcctgaacccgagaattttgggtcaatgctggaattaagctggaagggaaccaagcccatcgatctcggtaatggccaaacccggaaattcctgctggacggtgacgaagtcatcatcaccggttattgccagggcgacggatacaggatcggcttcggtcagtgtgctggcaaggtgcttcctgccctcttgcccagt

SEQ ID NO: 2760 - DNA, 1257 bp, Artificial Sequence
  derived and/or modified sequence
atgtcgtttataccggtagcggaagattcggattttccgatacataatttaccgtatggtgtattttcgacgcgaggtgatccgcgtccgcgaataggtgttgcgataggtgatcaaatactagatctatcgataataaaacatctatttacgggtccggttctatcgaaacatcaagatgtttttaatcaaccgacgctaaattcgtttatgggtttaggtcaagcggcgtggaaagaagcgcgagtatttctacaaaatttattatcggtttcgcaagcgcgtctacgagatgatacggaattacgtaaatgtgcgtttatatcgcaagcgtcggcgacgatgcatctaccggcgacgataggtgattatacggatttttattcgtcgcgacaacatgcgacgaatgttggtataatgtttcgtgataaagaaaatgcgttaatgccgaattggttacatctaccggttggttatcatggtcgagcgtcgtcggtagttgtatcgggtacgccgatacgtcgaccgatgggtcaaatgaaaccggatgattcgaaaccgccggtatatggtgcgtgtaaactactagatatggaactagaaatggcgttttttgttggtccgggtaatcgattaggtgaaccgataccgatatcgaaagcgcatgaacatatatttggtatggtattaatgaatgattggtcggcgcgtgatatacaaaaatgggaatatgttccgctaggtccgtttctaggtaaatcgtttggtacgacggtatcgccgtgggtagtaccgatggatgcgttaatgccgtttgcggttccgaatccgaaacaagatccgcgtccgctaccgtatttatgtcatgatgaaccgtatacgtttgatataaatctatcggttaatttaaaaggtgaaggtatgtcgcaagcggcgacgatatgtaaatcgaattttaaatatatgtattggacgatgttacaacaactaacgcatcattcggtaaatggttgtaatctacgaccgggtgatctactagcgtcgggtacgatatcgggtccggaaccggaaaattttggttcgatgctagaactatcgtggaaaggtacgaaaccgatagatctaggtaatggtcaaacgcgtaaatttttactagatggtgatgaagttataataacgggttattgtcaaggtgatggttatcgaataggttttggtcaatgtgcgggtaaagttttaccggcgttattaccgtcg

SEQ ID NO: 2761 - DNA, 1257 bp, Artificial Sequence
  derived and/or modified sequence
atgtcatttatcccagtggcggaagattccgactttcctatacacaacttgccttatggagtcttttccacgcggggggacccccgccctaggatcggtgtcgcgatcggcgaccagatcttggacctgtctattataaaacatctgtttacggggcctgttctcagtaaacaccaggatgtattcaaccagccaacccttaactcgttcatgggcctcggccaggccgcttggaaagaggcccgcgtttttctgcaaaacttgctgtctgtgagtcaagccaggctaagagatgacaccgaacttcgtaaatgcgcgtttataagccaagcgtcagctaccatgcatctgccagcaaccattggcgactatacagatttttacagctctcgccagcacgctactaatgttggcatcatgtttagggataaagagaatgcacttatgcctaattggctgcatctcccagtgggctaccacgggagagctagcagcgtggtggtgtcagggacgccaatccggcgccccatgggccagatgaaaccggatgactcaaagccccccgtgtacggagcctgcaaactgctggatatggagctggaaatggcgttcttcgtcgggcccggaaataggctaggggaacccattcctattagcaaagctcacgaacacatctttggcatggtgctgatgaacgactggagcgccagagacatacaaaaatgggagtatgtgccactcgggcctttcctgggtaagtctttcggaactactgtgtccccgtgggtggtcccaatggatgccctgatgcccttcgcagtcccgaatccaaaacaggatcccagacccttgccctacctgtgccatgatgagccatatacttttgacatcaaccttagcgtcaatctcaaaggcgagggtatgagccaagcggcgactatatgcaaaagtaacttcaagtacatgtattggacaatgttacagcagctgacacaccattcggtaaacgggtgcaatttgcggcccggcgatctgttagctagcggtacgatctcaggccccgaacctgagaatttcggttctatgctggaattaagttggaaagggaccaagccaatcgatctgggaaatgggcagacgagaaagttcctacttgatggggacgaagtcattattaccggctactgtcagggagatggctaccggattgggttcggacagtgcgctggcaaggtgcttcctgccctgctgccttca

SEQ ID NO: 2762 - DNA, 1257 bp, Artificial Sequence
  derived and/or modified sequence
atgtccttcattccagtggccgaggactctgatttccctattcataacctgccttatggggttttttcgaccaggggcgacccgagacctagaatcggggtggccattggtgatcagatcctcgacctaagcatcatcaaacacctgtttaccggaccagtgttgtctaaacaccaagatgtgtttaaccagccaactcttaattccttcatgggactcggccaggccgcctggaaagaggccagggtgtttcttcagaatctgctcagtgtcagccaagcccgactcagagatgataccgaactgagaaagtgcgcgttcatttctcaggcctccgctactatgcacttacccgcaacaattggcgactatactgatttctattcatctcgtcagcatgcaaccaacgtcggaattatgttcagagataaagaaaacgctctcatgccgaactggctgcacttgccagtgggctaccacggccgagcttcttctgtggtagttagcggaacaccgatccgaaggcctatgggacagatgaaacccgatgactccaaacccccagtgtatggtgcatgcaagctgctggatatggagctggagatggccttttttgtggggcctggaaacagattgggcgagccgatccctatctctaaggcacacgaacacatctttgggatggtgcttatgaatgactggtcggcccgggatatccagaagtgggaatatgtcccacttggaccctttctagggaagagctttggaacaacagtctctccttgggtagtcccaatggacgcgcttatgcctttcgctgtgccaaatcctaagcaggatcctaggccattgccatatctatgccatgatgaaccatatacatttgacattaacctgtccgtgaacctcaagggagaagggatgtcacaggctgcaacgatctgcaagtctaactttaagtacatgtattggactatgctacagcagctgacccaccactcagtaaatgggtgtaatctaagacccggggacctcctggcttccggcaccatttccggtcccgagccagaaaactttggctctatgctggagctcagttggaagggaacgaaacccatagatctggggaatggccaaactaggaaattcctgctggatggggatgaagtgatcattactggctattgccagggggatggctacagaataggcttcggccaatgtgcaggcaaagtacttcccgccctcttgccttcc

SEQ ID NO: 2763 - DNA, 1257 bp, Artificial Sequence
  derived and/or modified sequence
atgtccttcatcccagtggccgaggactctgactttccgatccataatctgccgtacggtgtcttttcaactcggggcgatccgcgcccaaggatcggagtcgctatcggcgatcagattttggacctctccatcatcaagcatctgttcaccggacccgtcttgtccaaacaccaggatgtgtttaaccagcctacgttgaactccttcatggggctcggacaagccgcttggaaagaagcaagagtgtttctgcagaacctcctgtcagtctcccaagcacggctgcgggatgacacggaactgaggaagtgcgccttcatctcgcaagcgtccgccaccatgcatctgccagcgactattggcgactatacggatttctactcatcgcggcagcacgctaccaacgtggggatcatgttccgggataaggaaaacgcgctgatgcccaactggctgcacctcccagtcgggtaccacggacgcgcctcgtcggtggtggtgtcgggaactccgatccgtcgaccgatgggacagatgaagcccgacgactcgaagccgccggtgtacggtgcttgcaaacttcttgacatggaactcgaaatggcattcttcgtgggacctggcaacaggctgggagaacctatcccaatcagcaaagcccatgagcacatattcggaatggttctgatgaatgattggtcagcccgagatatccagaagtgggaatacgtccctctgggaccattcttgggcaagtcattcgggaccactgtgtcgccgtgggtcgttccgatggacgctctgatgccttttgcggtcccgaatcctaagcaagacccgcgcccgctgccctacctctgccatgatgagccgtacaccttcgacattaacctctcagtgaaccttaagggcgaggggatgagccaggccgcgaccatctgcaagtctaatttcaagtatatgtactggaccatgctgcaacagctcacccaccacagcgtgaacgggtgtaatctccgccccggcgaccttctggcgtcgggaactatcagcggcccggagccagagaacttcggaagcatgctggaactctcttggaaaggaactaaaccaatagacctgggcaatggtcaaaccaggaagttcctgctcgacggagacgaggtgattatcactggctactgccagggggacgggtaccggattggctttgggcagtgtgccgggaaggtccttccagctctccttccctcg

SEQ ID NO: 2764 - DNA, 1257 bp, Artificial Sequence
  derived and/or modified sequence
atgagcttcataccggttgctgaggactccgattttcccatacataacctgccttacggtgtcttcagcactaggggagacccacgtccacggattggagtcgccatcggggatcagatcctggacctgagcatcatcaagcatctgtttactggacctgtgctcagtaagcaccaggatgtgttcaatcagccgaccctgaattcctttatgggcttggggcaggcagcatggaaagaggcaagggtgtttctacagaatctcctgagcgtttcacaggcacgtctccgcgatgacactgagctgcgaaagtgcgcatttattagccaagcctctgcgacaatgcacctgccagccacaataggtgactacacagatttttatagttctcgccagcacgccacaaacgtggggataatgttccgggacaaggagaatgccctcatgcccaactggttgcacctcccagtgggatatcacggacgagcatcaagtgttgtggtttcagggaccccaatccgcagaccaatgggccagatgaaaccggatgactctaagccccccgtctatggagcttgtaaactgctggatatggagttggagatggcctttttcgtgggtcccggaaaccgactcggggagccaatccccattagcaaggctcatgaacatatttttggcatggtacttatgaacgattggtctgctcgggatatccagaagtgggagtatgttccactggggcccttcctgggtaagtcttttggtactaccgtgtctccgtgggtggtgccaatggatgccctcatgcccttcgcagtccctaatccgaagcaggaccccaggcctctgccctatttgtgtcacgatgaaccatatacgtttgatattaatctgtccgtgaatttgaaaggcgaaggaatgtcacaggccgccacgatctgcaagagcaacttcaaatacatgtattggactatgctccagcagttgactcatcactcagtgaacgggtgcaacctccgaccgggcgacttactggcctccggaaccatcagtggccctgagcccgagaatttcgggtcaatgctcgagctttcatggaagggtaccaaaccaattgatctgggaaatgggcagacccgcaaattcctgctcgacggcgatgaggtcatcattacaggttactgtcagggggatggttacagaattggattcggccagtgcgccggaaaagtgctccccgctctgcttccatca

SEQ ID NO: 2765 - DNA, 1257 bp, Artificial Sequence
  derived and/or modified sequence
atgtcgtttattcctgtggcagaagattctgacttccctatccataatctcccatacggcgtgttcagcacccggggagatccccggccaaggattggagtcgcaattggtgatcagatccttgacctgtcgataatcaagcacctgtttaccggacccgtgctgtcaaagcaccaggacgtgttcaatcaaccgactcttaattccttcatgggtctgggacaggcagcatggaaagaagcacgggtgtttctgcaaaaccttctttcagtgtcacaggcccgattgcgagatgatactgaattgcggaaatgcgcattcatttcccaggccagcgcaaccatgcatctgcccgctaccattggagattacaccgacttctattcaagcaggcaacatgcgaccaacgtggggattatgtttagagataaggaaaacgccctgatgcccaattggctgcatcttcctgtgggctaccacggacgggcatcatcggtggtggtgtccggcactcccattcgcaggccaatggggcagatgaagcctgatgacagcaagccacctgtgtacggagcatgcaagctgctggatatggagctcgaaatggcatttttcgtggggccaggtaatcgccttggggagcctatcccaataagcaaggcacatgagcacatctttggtatggtgctgatgaatgattggtccgcgcgggatattcaaaagtgggagtacgtgccacttggcccttttcttggtaagagctttggtaccactgtgtcaccatgggtggtgccaatggatgcactgatgccattcgcagttccaaaccctaagcaggacccccgccccctgccttacctgtgccacgatgaaccctacacctttgacatcaacctttccgtcaatctcaagggagaagggatgtcccaagcagcgactatctgtaagtcgaacttcaaatacatgtactggacgatgcttcagcaactgactcatcattcagtgaatggttgcaatctcagacccggagacttgctcgcctccgggactatatcgggaccagagccagagaactttggaagcatgcttgaactttcttggaagggaacgaaacccattgatctcgggaatggacaaacccgcaaatttctcctggacggtgatgaggttatcataacgggttactgtcagggggatggatatcgaatcggatttggtcagtgtgcaggtaaggtgttgcctgcactcttgccctcg

SEQ ID NO: 2766 - DNA, 1257 bp, Artificial Sequence
  derived and/or modified sequence
atgtcttttatacctgttgccgaggattctgattttcctatacacaacttaccctatggggtattttccacacggggagacccccggcccagaataggggtagccatcggagatcagatcctggatctgtctatcatcaagcatctatttacaggacccgtcctatccaaacatcaagacgtgttcaatcagcccactcttaactcatttatggggttagggcaggcagcatggaaagaagcaagggtgtttcttcagaatctacttagtgtgtcccaggcacgattgcgagacgatacagaacttcgaaaatgtgccttcataagtcaggcctccgccactatgcatcttcctgccactatcggagactatacagatttttattcttccagacagcacgcaactaacgtggggataatgtttcgggacaaagaaaacgccctaatgcccaactggcttcacttacccgtggggtatcatggacgggcgagttctgtggtggtgtcagggacacctatcaggcgcccaatggggcagatgaaaccagatgatagtaagccaccagtttacggagcctgtaaactactagatatggaactcgaaatggccttttttgtgggacccggaaatcggttaggggagccaataccgatctccaaagcccatgaacacatatttggaatggttttaatgaacgattggtccgcaagggatatccagaaatgggagtatgtcccacttggaccatttttaggaaaaagtttcgggactactgtgtccccctgggtagtgcctatggatgcattaatgcccttcgctgtgccaaaccctaaacaggatcctagacctctcccttatctatgccacgatgaaccatatacttttgatattaatttatccgtaaatctcaaaggggaagggatgtcccaggccgccactatatgtaaatccaactttaaatacatgtattggactatgcttcagcagctcacacatcattctgtcaacgggtgcaatctaaggcctggagatctcctggcctcgggaacaatttccgggccagaacccgaaaattttggaagtatgctggaactctcctggaaagggacaaaacccatcgacctcggaaatgggcagacacggaaatttctattagatggagatgaagtgataataactggatattgtcagggggatggatatagaatcggattcggacagtgcgctggaaaagtgctgcccgcccttcttccatca

SEQ ID NO: 2767 - DNA, 1257 bp, Artificial Sequence
  derived and/or modified sequence
atgtccttcatcccggtggcggaggacagcgattttcccatccacaacttgccctacggcgtcttttcgacgcgcggagacccgcgaccgcgaattggagtcgccatcggtgaccagatcttggacttgtcaatcattaagcacttgtttacgggtcccgttcttagtaaacaccaggatgtttttaaccagccgaccttgaattctttcatgggactgggccaagccgcctggaaagaagcaagagttttcctccagaacttgctttccgtttcccaggcgcgtctcagggacgatacagagctgcgcaaatgcgcgtttatcagccaggcctccgccaccatgcacctgccggccaccattggagactacactgacttctactcctcgcgacagcatgccaccaatgtgggcatcatgttccgggataaggaaaacgccttgatgccgaattggttgcaccttcccgtgggataccacggacgcgcctcatctgtggtcgtatccggtacccccattcgccgacccatgggccagatgaaaccggacgattccaagcccccggtatacggcgcttgcaaactgttggacatggaactggagatggcgtttttcgttggacctggtaatcgcctgggcgagcccataccaattagcaaagcacacgagcacatattcggcatggtcctcatgaacgactggtcggcccgagatattcagaagtgggagtacgtacccctgggcccattcctgggcaagtcatttgggactactgtgtcaccctgggtcgtgccgatggatgccttgatgccctttgcagttccgaatcctaagcaggaccctagacccctaccatacctctgccacgatgagccatatacgtttgatattaacctgagcgtgaaccttaagggcgagggtatgtcacaggcggctacgatctgcaagagcaatttcaagtatatgtactggacgatgctgcagcagctgacccaccacagcgtgaatggctgcaacctccgcccgggagacctattagcctcgggcaccatttctgggcccgagccggaaaatttcgggtcaatgctggagctctcgtggaagggcacaaaaccgatagacctaggcaatggacagacacgaaagtttctcctggatggcgatgaggttatcattacgggctactgtcagggcgatggctaccgcattggcttcggccagtgcgccggaaaagtgctgccagctcttttgccatcg

SEQ ID NO: 2768 - DNA, 1257 bp, Artificial Sequence
  derived and/or modified sequence
atgagctttatccccgtggcagaggacagcgatttcccaatacataacctgccttacggcgtattttctacccgtggcgacccacggccacgcattggtgtcgctattggtgatcaaattttagacttgagtatcatcaaacatctcttcactggtcctgtgctctcaaaacatcaggatgtgttcaaccagcctacactcaactcattcatgggcctaggccaggctgcatggaaggaggccagggtcttcctacagaatcttctgagcgtgtcacaggccagactaagagacgacaccgagctgcggaagtgcgcctttatttcacaggcgtctgccaccatgcatttgcctgcgaccatcggcgattatacagacttctattctagcaggcagcacgcaacaaacgttggaatcatgtttcgcgataaggaaaacgcgctcatgcccaattggcttcacctccctgtgggctatcacgggagggcttctagtgtagtggtgtctggaacccctattcgcaggcccatggggcagatgaagcccgacgactctaagccacctgtttacggtgcctgcaaacttttagatatggaacttgagatggccttctttgttggccctggtaatagactgggggaaccgatcccaatctcaaaagcgcatgagcatatatttggcatggtactgatgaacgactggtcagcgagggacattcagaagtgggagtacgtgcccctgggaccttttctgggtaagtccttcggaaccaccgtgtcgccatgggttgtgcctatggatgccttaatgccttttgccgtcccgaatccgaaacaagatccaagaccattgccctacctttgccatgacgagccttataccttcgatatcaatctctcagtgaatctgaagggtgaagggatgagtcaggcggccacaatctgcaagtccaatttcaaatacatgtactggactatgttgcagcaactgacacatcactctgttaacggttgcaaccttaggcccggggacctcctcgctagcggcaccatctccgggcccgaacctgagaatttcggttccatgctggaactgagctggaagggcacaaagcctattgatctgggcaacggtcagactaggaagttcctcctagacggagacgaagtcattatcacggggtattgtcagggagatggctaccggataggctttgggcagtgtgccggaaaggttttgccagccctgttgcccagc

SEQ ID NO: 2769 - DNA, 1257 bp, Artificial Sequence
  derived and/or modified sequence
atgtcctttatccctgtggcggaagattcggattttccaatacacaatctcccatacggggtcttttcgacccggggggatccccgcccacggataggagtggcgattggcgatcaaattctggatctgagcatcattaagcacctgttcactgggcctgtcctgagcaaacatcaggacgtgtttaatcagccaacgcttaacagctttatgggactgggacaagcagcatggaaggaagccagagtgtttctgcagaacttgctgtccgtcagccaagcacggctgcgcgatgataccgaactgcggaagtgcgcttttatctcgcaggcatcagctactatgcatcttcccgccaccatcggagattacaccgacttttacagctcccgccagcacgcaactaatgtgggcattatgttcagggacaaagaaaatgcactgatgcccaactggctgcacctccctgtggggtaccacggtagagcgtcctcagtcgtggtcagcggtactcctattcgacgaccgatgggccaaatgaagccagacgactcgaagccccctgtctacggagcctgcaagttgctcgatatggagcttgagatggccttctttgtcggaccaggaaaccggctgggagaaccgatccctatctcgaaggcccatgaacacattttcggtatggtgctgatgaacgattggagcgcaagagacattcagaagtgggagtacgtccctctcggtccatttcttggaaaatcttttggtaccactgtgagcccttgggtggtgcctatggacgcgctcatgccttttgcagtgccgaatccgaaacaggacccaaggccgctgccttacctctgccacgacgagccatacacctttgacattaatctgtcggtgaatctcaaaggcgaaggcatgtcacaggctgcaactatttgtaaatccaacttcaagtatatgtattggacgatgcttcaacaactcacccaccattcggtgaacggatgcaatcttagacctggtgacctgttggcaagcggtactatttcgggacccgaaccagagaacttcgggtcgatgctcgaattgtcctggaaggggaccaaaccaatagatctcggaaacgggcagacccgcaaatttctgcttgacggggatgaggtgatcattaccggatactgccagggggatggataccggattggcttcggacaatgtgccggtaaggtgctgcccgcactgctcccatcc

SEQ ID NO: 2770 - DNA, 1257 bp, Artificial Sequence
  derived and/or modified sequence
atgagcttcattccggtcgctgaagattctgacttcccgatccataacctgccgtacggcgtgttttcgacccggggcgacccaaggccgcgcatcggagtggccatcggagatcagatcctggatctctcgatcatcaaacacctgttcactggaccagtcctgagcaagcaccaggatgtgttcaatcaaccgaccctgaattcgttcatgggactgggacaggccgcgtggaaggaggcccgggtattcctccaaaacctgttgagcgtgtcccaggcgagactgcgcgacgacaccgagctccggaaatgcgcgttcatttcgcaggcttcggcgaccatgcatctgcccgccacgatcggtgactatactgacttctattcgtcgcgccaacacgcaaccaacgtgggcatcatgttcagagacaaggagaatgccttgatgccgaattggcttcacttgcctgtgggctaccacggcagagcgtcatcggtcgttgtctccggcacgcctatacgtcgccctatggggcagatgaagccggatgactcgaagccgcccgtctatggcgcctgcaagctcctggacatggaacttgaaatggcctttttcgtggggccgggtaaccggctgggagaaccgatcccaatctcgaaggcacatgaacacatttttggaatggtgctgatgaacgactggtctgcaagagacattcagaagtgggagtacgtgccgctcggcccattcctgggcaaatcctttggaactactgtctcaccgtgggtcgtcccgatggatgcactgatgccgttcgcggtgccgaatccgaagcaggacccacgcccgctgccgtacctgtgtcacgatgagccgtacactttcgatatcaacctgtcagtgaaccttaagggggaaggaatgagccaagcggccactatctgcaaaagcaactttaagtatatgtactggaccatgctccagcagctgacccatcactctgtgaacggatgtaatctgcgaccgggagatctgctggcctccggaacgatctcgggtcccgagccggaaaacttcggtagcatgctcgaactgtcttggaaaggcactaagccgatcgacctcggcaatggccaaactcggaagttcctgctggacggtgatgaagtgattatcaccgggtactgccagggggatggataccgcatcggttttggacaatgcgcggggaaagtgctccccgcgctgttgccttca

SEQ ID NO: 2771 - DNA, 1257 bp, Artificial Sequence
  derived and/or modified sequence
atgagcttcatcccagtggctgaagactccgactttcccatccacaacctgccatatggagtgttctccactaggggagatcctagaccacgcataggcgtagctattggagaccaaattctcgacctttctatcatcaagcatttgttcaccggacctgtgctgtctaagcaccaagatgtgtttaatcagcccacactgaatagttttatgggcctgggtcaggccgcctggaaggaagcaagggtgttcctccagaacctccttagtgtctcccaggccagactcagagacgacactgagcttcgtaagtgcgcctttatctcccaagccagcgctactatgcacctccccgctactattggtgactacactgatttttactcctcaagacagcacgctactaacgtcggcatcatgttcagggacaaggagaacgctttgatgccaaactggctgcaccttcccgttggataccacggacgtgcaagctcagttgtcgtgagcggcacacccataaggagaccaatgggccagatgaaaccagacgactcaaagccacctgtgtacggcgcctgtaagctgctggatatggaactggagatggccttcttcgtaggacccggtaaccgtctgggagaacccatacctatctccaaagcacacgaacacattttcggtatggtccttatgaatgactggtctgctcgcgacatccagaaatgggaatatgtaccattgggccccttccttggaaaatcctttggcactacagtatcaccctgggtggtacccatggacgcccttatgccttttgccgtgcccaaccccaagcaagacccaaggccactcccctacctgtgtcacgatgaaccatacacatttgacatcaaccttagtgtcaacttgaagggcgagggtatgagccaggctgccaccatctgcaagagcaattttaagtatatgtactggacaatgctgcagcagctgacacaccacagtgtgaatggatgcaacctcagacccggtgatctgctcgcttcaggcaccatatcaggtcctgaacctgagaacttcggtagtatgttggaactctcatggaagggtacaaagcctatagacctgggcaatggccagactaggaagttcctgttggacggcgacgaggtaattatcaccggatactgccagggcgatggttacaggatcggcttcggccagtgtgctggaaaggtgttgccagctctcctgccaagc

SEQ ID NO: 2772 - DNA, 1257 bp, Artificial Sequence
  derived and/or modified sequence
atgagcttcatcccagtagcagaagactcagacttcccgatccataatctcccctacggggtatttagtacacgcggcgaccctcggccgcgcataggcgttgcaatcggggaccaaattcttgacctcagcatcattaaacatttattcaccgggccagtgctctccaagcaccaagatgtgtttaatcagcccaccctgaattcgtttatgggactaggccaggctgcttggaaggaagctagagtgttcctccagaatctgctttcagtgtcacaggctagattacgagacgacactgagctgcgaaaatgcgctttcattagtcaagcctccgccacgatgcatttacccgctaccatcggtgactacacagacttctactcgagtcggcagcacgccacaaatgtcggcattatgttcagagataaggaaaacgccctgatgcccaactggctgcacctccccgtgggatatcatgggcgggctagcagcgtggtcgtctctgggactcctattaggaggcctatgggccagatgaagcctgacgacagcaagccgcctgtttatggcgcctgcaagctgctggacatggagctggaaatggccttctttgtcggccctggaaaccgcctcggcgaaccaataccgatctctaaggctcatgaacacatttttgggatggtgctgatgaatgattggtccgcaagagatatacaaaaatgggaatacgtccctttaggccccttccttggcaagtcgttcggaacaacagtcagcccgtgggtggtgccaatggacgctctcatgccattcgccgtcccaaaccctaagcaggacccccgtccccttccttacctttgtcatgatgagccctacactttcgatattaacttgtcagttaaccttaagggcgaggggatgagtcaagcagccacaatctgcaaaagtaactttaagtatatgtactggaccatgctccagcagctgactcaccacagcgttaatggatgcaatcttcggccaggagatttactggcaagtggcactatttccggcccagagcctgaaaatttcgggagtatgcttgagctctcctggaagggcacaaaacccatagacctcggaaacggccagacaaggaagtttcttctggacggcgatgaagtaatcatcacaggctactgccagggagacgggtatagaatagggtttggccaatgtgccggcaaggtgttgccagctctgctgccatca

SEQ ID NO: 2773 - DNA, 1257 bp, Artificial Sequence
  derived and/or modified sequence
atgagcttcatccctgtggcggaggactcagattttcctatccacaacttgccctacggcgtgtttagtactcgaggtgatcccagacccaggatcggagtcgctataggagatcagatcctcgatctgtccattattaaacatctgtttaccggccctgtgctgtcaaaacatcaggacgtctttaatcagcctactctcaatagtttcatgggcctggggcaagcagcttggaaggaggccagggtattccttcagaacttgctgagtgtttctcaggcaaggctccgcgacgatacggaactcagaaaatgtgccttcatctcacaggcttccgcgaccatgcaccttcccgccaccatcggtgattacacggatttctattctagtcgccaacacgcaacaaacgtagggattatgtttagggacaaggaaaatgctttgatgcccaattggctgcaccttcctgtgggttaccatggacgggcgtcctccgttgttgtgtctgggacccctatcagaagaccaatgggtcaaatgaagccggatgattcaaaacctccggtgtacggagcctgtaaactcctggatatggagctggagatggccttctttgttgggcctgggaataggctcggtgagccaatccctatcagtaaggcacatgagcacattttcggaatggtcctgatgaatgattggtccgcacgcgatatccaaaagtgggaatacgtgccgctcgggccctttcttgggaagtcttttggtaccacagtgtcaccctgggtggtaccgatggatgctctgatgccttttgccgtacccaaccctaagcaagatccccggcctttgccttatctgtgccatgacgagccctatacctttgatatcaatctttctgtcaacctgaagggagagggcatgtcacaggccgctaccatctgcaagagtaattttaagtacatgtattggactatgctgcagcaattgacgcaccacagtgtgaacggctgcaaccttaggcccggggaccttctggctagtggcaccatcagcgggcccgagcctgaaaacttcggttcaatgctcgagctctcctggaaggggacaaagcctatcgatctcggcaatggacagaccaggaagtttctccttgatggtgacgaagtgatcatcactggatattgccagggcgatggttatagaatcgggttcggccagtgcgccggaaaggtcctgccagcccttctcccgtct

SEQ ID NO: 2774 - DNA, 1257 bp, Artificial Sequence
  derived and/or modified sequence
atgtcattcatacccgtggccgaggatagcgattttccaatccataacttgccttacggagtgttctcaactagaggtgatcctagaccgcggatcggagtggcaattggagatcagattctggatctgtcgattatcaaacatctttttaccggtccagtgctctccaagcatcaggatgtgtttaaccagccaactcttaactccttcatgggcttggggcaggcggcatggaaggaagctagagtctttctgcaaaaccttctctcagtgtcacaagccaggctgagggatgacactgaactccggaaatgtgcgttcattagccaggcatcggccacgatgcacctgccagcaactatcggtgactacaccgacttttactcgtcacgtcaacacgcgaccaacgtgggtataatgttccgagacaaagagaatgcgcttatgccaaactggctgcatcttcctgtgggataccacggccgggcatcaagcgttgtggtgagcggtacccctatcaggaggcctatgggccaaatgaagccggatgactccaagccccccgtctacggagcttgtaaacttctcgacatggaactggagatggcttttttcgtggggcctggaaaccgactgggcgagccaatacccatatcaaaggcacatgaacatatctttggcatggtgctcatgaacgactggtccgccagagatatccaaaagtgggagtacgtccctttgggaccatttctcggtaagtcgttcgggaccactgtctccccgtgggtggtgccgatggatgcactcatgccgtttgcggtgccaaaccctaagcaggatccgcgcccgctgccatacttgtgccatgacgaaccttacacctttgatatcaacctcagcgtgaacttgaagggagaggggatgtcccaagcagccacgatttgtaaaagcaatttcaagtatatgtattggaccatgctccagcaactcactcaccactcagtaaatggttgtaatcttcgacccggggatcttcttgcgtcgggcacgatttcgggacccgaaccggagaattttggctccatgcttgaattgagctggaagggcaccaagcctatcgatctgggtaatggtcaaacccggaagtttcttcttgacggcgatgaggtcatcattactggttactgccaaggagacggttatcgcattggttttggtcagtgcgcgggaaaggtcctccctgcactgttgccttca

SEQ ID NO: 2775 - DNA, 1257 bp, Artificial Sequence
  derived and/or modified sequence
atgtcattcatacctgtggcagaagattccgacttcccaatacacaatctcccatacggagtctttagcacccggggggatccacgcccaagaatcggcgtggcaataggtgatcaaattctcgacctttcaatcataaaacatctttttactggtccggttctttcaaagcatcaagatgtctttaatcagcctaccctgaattcgttcatgggacttggccaagcagcgtggaaggaagcacgggtgtttctccaaaatcttctctccgtatcccaggccaggctgcgagacgatacggaactgcggaaatgtgcattcataagtcaagcatccgcaaccatgcatctgccagcaactattggagattacaccgatttctactcctcgaggcaacacgccaccaacgtgggcattatgtttagagacaaggaaaacgctctgatgcctaattggcttcacctgcctgtggggtaccatggccgcgcctcgagcgtggtcgtgtcgggaactccaatccggcgcccaatggggcagatgaagccagatgatagcaagccaccggtgtatggtgcttgcaagctccttgatatggaactggagatggcattctttgtgggccctggaaatcggcttggagaacctattcctattagtaaggcacatgaacatatcttcggcatggtgctcatgaacgactggtcagccagggacattcagaagtgggagtacgtccctctgggtcctttcctggggaagagctttggtacgaccgtgtccccatgggtggtgccaatggacgctcttatgccatttgcggtgccaaacccaaaacaagatcctcgtccactgccttacctttgccacgacgagccctacacttttgacatcaacctttccgttaacctgaaaggggaaggtatgagccaagcagcaaccatctgcaagtcgaactttaagtatatgtactggactatgctgcagcagctgacccatcatagcgtcaacggatgcaacctgcgccccggtgatctgctggcgtccggaactatttcggggcctgaacctgaaaacttcggatccatgttggaactgtcctggaaagggaccaaacctatcgatctcggcaatggtcagacgcgaaagtttcttcttgatggagatgaagtcattatcaccggatactgtcagggggatgggtaccgcattggttttggacagtgtgcagggaaggtcttgcctgctttgctgcctagc

SEQ ID NO: 2776 - DNA, 1257 bp, Artificial Sequence
  derived and/or modified sequence
atgtccttcatccctgtcgcggaagatagcgattttccgattcacaaccttccgtacggggtgttcagcaccagaggggaccccaggccacgaatcggggtcgccattggcgaccaaatcctcgacctctcgatcattaaacatctctttaccggtccggttctgtccaaacaccaagacgtattcaaccagccaaccctgaactccttcatgggactcggacaggcggcctggaaggaagcgcgcgtctttctgcagaacctgctctcggtgtctcaggctcgcctgcgtgatgatactgaactccgcaagtgcgcctttatctcccaggcatcagctacgatgcatttgccggctacgatcggagattacaccgacttctactccagccggcagcacgccaccaatgtgggcatcatgtttcgcgacaaggaaaatgcgctgatgccaaattggctgcatctgccggttggataccacgggcgcgcaagctccgtggtggttagcggcacgcctattaggcggcccatgggacagatgaagcctgacgattccaaacctccggtgtacggggcttgcaagctcctggatatggaactggagatggctttctttgtcggacctggcaataggttgggcgagccgattccgatctcgaaagcccatgagcacatcttcggtatggtgttgatgaacgactggtcagcacgggacatccagaagtgggagtacgtgcctctcggcccattcctgggcaaatcattcggtaccaccgtctccccttgggtcgtgcctatggacgcattgatgccattcgccgtgcccaatccaaagcaggacccgcggccgttgccgtacctctgtcacgacgaaccatacaccttcgacatcaacctttctgtgaacctgaagggggagggaatgagccaggctgcaaccatctgcaagtctaacttcaagtacatgtattggaccatgcttcaacagctgacccaccacagcgtgaacggatgtaacctgcgccctggcgacctcctggcatcgggtactatttccggacctgagcctgaaaacttcggatcgatgcttgaactgtcctggaagggaaccaagccaatcgacctgggaaatggccagactcgcaaattcctcttggacggagacgaggtcatcataacggggtactgccaaggcgatggataccgcatcggctttggacaatgcgcgggaaaggtcctgccggcactgttgccctct

SEQ ID NO: 2777 - DNA, 1257 bp, Artificial Sequence
  derived and/or modified sequence
atgtcctttatcccagtggcagaggattccgattttccaatccacaacctcccttacggggtcttttccacgagaggtgatccaagaccgcgaatcggtgtggccattggagatcaaattctggacctctccatcattaagcacctctttactgggcctgtgctgtccaagcatcaagatgtctttaatcagccgaccctcaacagctttatgggtcttggacaggcagcctggaaagaagcgagagtgtttctccaaaacctgcttagcgtgtctcaagccaggcttcgtgatgacacggagctgcgcaagtgtgcctttatctcccaagcgtctgcgaccatgcatctgcctgctactattggtgattacaccgacttttactcgtcgagacaacacgcaaccaatgtgggtatcatgttcagggataaggaaaacgcacttatgcctaattggctgcatcttccagtcgggtaccatggaagggcatcatccgtcgtcgtgtcggggacccctattcggcgccccatgggccaaatgaagcctgatgactcaaagccccccgtctacggagcttgtaagttgcttgatatggagcttgaaatggcatttttcgtcggccctggtaacaggctgggcgaaccaattccaatttccaaggcccatgaacacattttcgggatggtgttgatgaatgattggtctgcaagagacatccaaaagtgggaatacgtcccccttggcccttttttggggaagagcttcggtaccaccgtgagcccttgggtggtgcctatggacgcactgatgcccttcgcagtgccaaacccaaagcaagatcctcgacccttgccatacctttgtcacgatgaaccgtacacgtttgacatcaaccttagcgtgaatctgaagggagagggaatgtcgcaagcagccaccatttgtaagtccaactttaagtatatgtattggaccatgctccaacagctgacccaccactcggtcaacgggtgtaaccttcgaccgggggacctgctcgcctcggggactatatcgggtccagagcccgaaaacttcggttcgatgcttgaactctcctggaaaggcactaagccaattgacctggggaacggacaaactcggaaatttctcctggatggcgacgaggttatcattaccggatattgccaaggtgatggataccgcatcggcttcggacaatgcgccggtaaagttctgccggccctgttgccatcg

SEQ ID NO: 2778 - DNA, 1257 bp, Artificial Sequence
  derived and/or modified sequence
atgtctttcataccggtggccgaagattcggacttccctatccataaccttccgtacggcgtcttctctacacgcggggacccgcggcccagaatcggtgtcgccatcggggaccagatactggatttgtccatcattaagcacctctttaccggcccagtactgtcaaagcatcaggatgtgttcaatcagcccacactaaatagctttatgggattaggccaggccgcttggaaagaggctcgagttttcctccaaaaccttctttccgtcagccaggcccgtctgcgcgatgataccgaacttagaaagtgcgcgtttatctctcaggcgagcgccactatgcacctccctgcaacaatcggagactataccgacttctactcctcccgccaacatgccactaacgtcgggatcatgttccgggataaggagaacgccctgatgcccaactggctgcatttgcccgtgggctatcatggccgcgccagcagtgtcgtcgtctccgggacccccattagacgaccaatgggccagatgaagcccgacgatagtaagccaccggtttatggagcatgcaaactactggacatggaactagaaatggccttctttgtgggcccagggaaccggctcggcgaacctatccctatcagcaaagcccatgagcatatattcggaatggttctgatgaatgactggagcgctcgggacattcagaaatgggagtacgttcccctaggcccttttttgggaaagtccttcggaaccactgtgagtccctgggttgtgccgatggacgcgctgatgccatttgccgttccgaatccaaaacaggatccgcgcccactgccgtacctgtgtcacgacgagccttacacattcgatataaatttgtccgtaaatcttaagggggaaggaatgagtcaagccgccaccatctgtaagtccaatttcaagtacatgtattggacgatgctccagcagctgacccaccactctgttaatggatgtaaccttcggccaggtgaccttctagcttccggcactatttcgggtccagagcctgaaaattttggtagtatgttagagctgagttggaagggcactaaacctattgaccttggaaatgggcagacacggaaattcttgttagacggcgacgaggtcatcataactggttactgtcagggggatggctatagaataggatttggacagtgtgctggaaaagtgctcccggcgttactgccttct

SEQ ID NO: 2779 - DNA, 1257 bp, Artificial Sequence
  derived and/or modified sequence
atgtccttcattcctgttgcagaggacagcgactttcctatccacaatctgccctacggagtttttagtacccgtggcgacccacgacccaggattggagttgctattggcgaccagattctggatctgagcataatcaagcatttgttcacagggccagttctgtcaaagcaccaagacgtgtttaaccagcccactctgaactcattcatgggactgggtcaggcggcctggaaggaggcccgagtgtttctccagaacctgctgtctgtctctcaagcaagacttagggatgataccgagctgcggaaatgtgctttcataagtcaggcaagtgcaacaatgcatctgccagcaaccattggagactacactgacttttattcctcccggcaacacgcaacaaacgttggaatcatgttccgggataaggaaaacgcgttaatgcccaactggctgcacctccccgtagggtatcacggcagagcctcctcagtggttgtgtccggtaccccaatacggagacccatgggacagatgaaaccggacgatagcaaaccccccgtgtacggtgcctgcaagctgctggatatggagctagaaatggcttttttcgtgggtcctggaaacaggctaggagaaccaattcccatatccaaggcccatgagcacatcttcggtatggtgctgatgaacgattggtctgcacgggatatccaaaaatgggagtatgtacctttagggcctttcctcgggaagtccttcggcacgactgtatcaccttgggtggttccaatggatgcactgatgccttttgccgtgccaaatcccaagcaagatccccgtcctttgccttatctgtgtcacgatgagccatacacttttgacatcaacctgagcgtaaacctgaaaggtgaaggaatgtcccaggcggccaccatctgcaagtccaacttcaaatacatgtactggacaatgttgcagcagttgacacaccattctgtgaacgggtgtaatctgagacccggggatcttctggcatccggcacaatatccgggcccgagccggagaacttcggctcaatgttggagctcagctggaaaggaactaagcccatcgacctgggtaacggacagacacgcaaatttctgctggacggggacgaagtgattatcacggggtattgccagggcgacggctatcggattgggtttgggcaatgtgccgggaaagtgctcccagctctcctgcctagc

SEQ ID NO: 2780 - DNA, 1257 bp, Artificial Sequence
  derived and/or modified sequence
atgagttttataccagtggccgaagattctgacttccccatccataaccttccctacggggtttttagcactcgcggggaccctcgccctcggattggcgttgcaatcggggaccagatcctggacctgtccattatcaagcacctgtttaccggacctgtgctaagcaagcaccaggatgtgttcaaccagcccactctgaatagcttcatggggcttggccaggctgcctggaaggaggcccgggtttttctgcaaaatcttttaagcgtgtcacaagcacggctgcgggatgataccgagttaagaaaatgtgccttcataagtcaggctagcgccactatgcatctcccagccacaattggcgactatactgacttctactcaagtaggcaacacgctacaaacgtggggattatgttccgtgacaaggaaaacgccctgatgcctaactggctgcatctgcctgtggggtaccatgggagggcctctagcgtggtggtgtccggaacacctataagaagacctatgggccagatgaagccagacgattccaagccaccagtttacggcgcctgcaagttgctcgatatggagctagagatggcctttttcgtagggcctggcaatagactgggcgagcctattcctatcagcaaagcccatgagcacatcttcggtatggtgctaatgaacgactggtctgctagagatattcagaaatgggagtatgtccccctggggccatttctaggcaagtcattcgggacaaccgtcagtccttgggtggtgcccatggacgccctgatgccttttgccgtgcctaacccaaagcaagatcccagacctctgccttacttatgtcatgacgaaccttacaccttcgatattaacctcagcgtgaacctgaagggggaaggcatgagccaggccgcaacaatctgcaaatctaatttcaagtatatgtactggacaatgctgcaacagttgacacaccactctgtcaacgggtgcaatctgaggcctggggatctactagccagtggcaccatctccggccccgaacctgaaaatttcggcagcatgctcgaactctcttggaaagggaccaagccaattgacttaggcaatggccagaccagaaagttcctgctggacggcgatgaggttatcatcaccggctactgccagggggatggctacagaattggtttcggacagtgcgcaggcaaggtgctccctgccctgctcccatca

SEQ ID NO: 2781 - DNA, 1257 bp, Artificial Sequence
  derived and/or modified sequence
atgtcgttcattcccgtcgcagaggatagcgattttcctatccacaatctgccatacggtgtgttcagcaccaggggggatccacgcccgagaattggagtcgctataggggaccagatcctggatctttccatcataaagcatctgttcaccggcccagtgctgtcaaagcatcaagacgtgtttaatcaaccaactctcaatagcttcatggggttgggacaagcggcatggaaggaagcacgagtctttttgcaaaatcttctctcggtgtcgcaggcaaggctccgtgacgataccgagctgcggaagtgtgccttcatttcgcaggcgtcagcaactatgcatctgccagcgaccatcggagattatactgacttttacagctcccgccagcacgcaaccaatgtcgggattatgttcagagacaaggaaaacgcacttatgccaaattggctgcacctgcctgtgggataccatggaagagcatcgagcgtcgtcgtctctggaactccaatccgtagacctatgggacaaatgaagcctgacgattccaagcctccagtttacggagcatgtaagctgttggacatggagcttgagatggcgtttttcgtgggccctggaaataggcttggagaacctattcccatatccaaagcgcacgagcatatctttggaatggtgttgatgaacgactggagcgcgagagatattcagaagtgggagtacgtgcctcttggtccgttcctgggcaagtcatttggcaccacggtgagcccatgggtcgtgccaatggatgcgctgatgccgtttgctgtgccaaaccctaagcaagacccaagacctttgccttacctctgccacgatgaaccttacaccttcgatatcaacctttccgtgaatcttaaaggcgaaggtatgagccaagcagcaacgatctgtaaatcaaactttaagtatatgtattggaccatgctgcagcaactcacccatcattcggtcaacggatgtaaccttcggcctggcgatcttcttgcaagcggtaccatttcgggcccagagccagaaaacttcggctcaatgcttgagctctcatggaaaggaaccaagcctatcgatctggggaatggacagactagaaagtttcttctggacggagatgaagtgatcattactggttactgccaaggcgacgggtacaggattggcttcggccagtgtgcaggtaaggtgcttcctgccctgcttccttcg

SEQ ID NO: 2782 - DNA, 1257 bp, Artificial Sequence
  derived and/or modified sequence
atgagctttatccctgtagccgaggattcggactttcccatacacaaccttccttacggtgttttctccacccgcggcgaccctcgccccaggatcggagtggctatcggagatcaaatactggacctcagtatcatcaagcacctgttcacaggtcccgtgctgtcgaagcaccaagacgtctttaatcagcccaccctgaattcttttatgggccttgggcaggccgcgtggaaggaggcccgagttttcttgcagaatctgctgtctgtaagccaggcacgcctgagggacgatacggaactgaggaaatgtgcattcattagtcaggcctccgccaccatgcacctacctgctaccatcggcgattacacggatttttacagctctcggcagcatgcaactaatgtcgggatcatgtttagggataaagagaatgccctgatgcctaactggctgcacctgccagtggggtatcacggccgcgcctcatccgttgtggtttctggcacgccgattcgccgtcccatgggccagatgaaaccagacgactcgaagccaccagtgtacggcgcatgtaaactattggatatggagctcgagatggccttctttgtcggccccggtaatcgcctcggcgaacccatccccatctcgaaggctcacgaacacatctttgggatggtgttgatgaatgactggagcgcaagagacatccagaagtgggagtatgtgccactggggccctttctagggaaaagttttggcaccactgtctcgccctgggtagtgccaatggatgctctgatgcctttcgccgtgcctaacccgaaacaggacccccgccccctgccctatctatgccatgatgagccatacacattcgacatcaaccttagcgtcaatctgaagggtgaaggcatgtcacaggctgctacgatttgcaagtccaattttaagtatatgtattggacaatgcttcagcaactaacacatcattccgtgaacggatgcaacctacggcccggggatctgctggcttccgggacaatctccggccccgaacctgagaactttgggagcatgctagaactgtcatggaaagggaccaaaccaattgatctgggcaatggccaaaccaggaagttccttctggacggggacgaagtgattattaccggctattgccaaggagacggttaccgcattggtttcggccaatgtgccggcaaggtgctcccagcgctgctcccatct

SEQ ID NO: 2783 - DNA, 1257 bp, Artificial Sequence
  derived and/or modified sequence
atgagctttatccctgtggctgaggactccgacttccccatccataacctcccatatggggttttcagcaccaggggagaccccagaccaaggattggggtggctattggcgatcaaatccttgacctctctattatcaagcacctgtttaccggcccggtgctgtctaagcatcaggatgtatttaaccagcctaccctgaactccttcatgggcctcggccaagcagcatggaaggaggcgagggtgtttttacagaacctcctctccgtctcgcaggcccggctgcgggacgacaccgagctccgtaagtgcgccttcatcagtcaggcgagcgctaccatgcacctgcccgctacgattggagattacacagatttttactcttcccgccagcacgcgacgaacgtcggaatcatgttccgggacaaggaaaacgcccttatgccaaactggctccatttgcctgtggggtatcacgggcgtgcctcgagcgtcgttgtatccggaaccccaattaggaggcccatggggcagatgaagcccgacgactctaaacctccggtgtacggcgcttgtaaattgctggacatggagcttgaaatggctttcttcgtgggcccgggcaaccgactgggcgagcctataccaatatcaaaggcacacgagcacatcttcggtatggtcctgatgaacgactggagcgccagggacatccagaagtgggagtatgttccgctgggtcccttcttgggcaagagttttgggacgaccgtgagcccctgggtggtgccaatggatgccctgatgccctttgccgtgcctaaccccaagcaggaccccaggcctctgccgtacctgtgtcacgatgaaccttacaccttcgacatcaacctgtctgttaacctcaagggcgaaggtatgtcccaggcggcaacaatttgtaaatctaactttaagtacatgtattggaccatgttgcagcagttgacccaccatagcgtcaatgggtgtaacctccgcccaggagacctactagcatcaggaaccatctcggggccagaaccagagaacttcggaagcatgctggagctttcttggaaaggtacaaagcccattgacctggggaatggccagaccaggaagtttttacttgacggggacgaggtgatcatcacagggtactgccaaggggatggctacagaatcggctttggccaatgcgcgggcaaggtgcttcctgccctgctcccttct

SEQ ID NO: 2784 - DNA, 1257 bp, Artificial Sequence
  derived and/or modified sequence
atgtcctttatacctgtggctgaggatagcgactttcctattcacaacctgccttacggagttttttcaacacgaggcgatcctaggcctaggatcggagtggccattggtgatcagatattagacttaagcattatcaaacacctgtttaccgggccagtcctgagtaaacaccaggatgttttcaatcagccaactctgaactcattcatggggctggggcaggcagcttggaaagaggcacgcgtttttctccagaatttgctgtctgtcagccaggccagattgcgcgatgataccgagctccggaagtgcgcgttcatctctcaggccagtgccaccatgcacctgcccgcaacgatcggcgactatactgatttttactccagccggcagcacgccacaaacgtcgggatcatgtttagggataaagagaacgcacttatgccaaactggctacacctccctgttgggtaccatgggagagcctccagtgtggtggtgtcaggtacacccatcagacggcctatggggcagatgaagcctgacgattcaaagccacctgtgtacggggcctgtaaactgctggacatggagctggagatggccttcttcgtggggcccggaaacagacttggagaaccaatcccaattagtaaagcgcacgagcatattttcggtatggtactgatgaacgattggagtgctcgcgatatccagaagtgggaatatgttcctttgggccccttcctcgggaagtcattcggcacaacagtttccccatgggtcgtgcctatggacgcccttatgccgtttgccgtgcccaaccccaagcaggacccgcgacccctcccgtatctttgtcatgacgagccatataccttcgacatcaacctgagtgtgaatctaaagggtgagggcatgtcccaggccgccaccatatgcaagtctaactttaaatatatgtattggaccatgctccaacagctgacgcaccactcagtcaacgggtgcaacctccggcccggggatttactcgcgtctgggactataagcggccccgaacccgagaactttgggagcatgttagagttgtcgtggaaaggcactaagcccattgacctgggcaacggacagacacgtaagtttttgctcgatggagacgaggtaatcattaccggctactgtcagggcgacggctataggatcgggttcggacagtgtgcagggaaggtccttcccgccctgctgccatcc

SEQ ID NO: 2785 - DNA, 1257 bp, Artificial Sequence
  derived and/or modified sequence
atgtcctttattcctgttgcagaagattcggactttcctattcataatctgccgtacggagtgtttagcaccagaggtgatcctcgtcctaggataggagtggctatcggggatcagatcctggatctctcgatcataaagcatctgtttactggacccgtgctctcaaaacaccaagatgtgttcaatcaacccaccctgaatagcttcatggggctcggtcaagccgcatggaaggaggcacgagtgtttctgcagaaccttctgtccgtgtctcaagcacgcttgcgagatgataccgaattgcggaagtgcgcgttcattagccaggcttcggcaactatgcacctccctgctaccattggtgattacaccgatttctactcatcacgccaacatgcaactaatgtcggaattatgtttagggataaggagaatgcactcatgccaaactggctgcatctccccgtggggtaccacgggagagcctcctcggtggtggtttccggtactccgattaggcggcctatggggcagatgaagcccgacgactcgaagccacctgtctacggcgcttgtaaactgcttgacatggaactggaaatggccttttttgtcgggcctggtaatcgcctgggagaaccgatacccattagcaaggcacatgaacatatcttcggcatggtccttatgaacgactggtcggcacgtgatattcagaaatgggagtacgtcccgttgggaccttttctcgggaaatcgtttggaacgacggtttcgccttgggtggtcccaatggacgcattgatgccatttgctgtaccaaatcccaaacaagacccaagacctctgccctacctgtgtcatgatgagccttacacgttcgacattaacctgtccgtgaatcttaagggtgagggaatgtcgcaagcagccactatttgcaagtcgaatttcaagtatatgtactggactatgcttcagcaactgactcatcactcggtcaatgggtgtaacttgaggcccggtgaccttctggcatcgggcaccatcagcggtccagaaccagagaattttggatccatgcttgaactctcatggaaaggaactaagcccatcgatttgggtaacgggcagaccaggaagttccttctcgatggagatgaggtgattatcactggatactgtcagggtgatggttacagaatcgggtttgggcaatgtgccggcaaagtgttgcctgcgctgcttccatcc

SEQ ID NO: 2786 - DNA, 1257 bp, Artificial Sequence
  derived and/or modified sequence
atgtcctttatacctgtcgcagaagacagcgactttccaatccataaccttccatacggcgtgttcagcacgcggggagacccccggccccgaataggcgttgccatcggtgatcagattcttgatctctccataatcaagcatctctttacagggcctgtcctcagcaagcaccaagatgtgtttaatcagcctaccctgaactcttttatgggtttagggcaggcagcctggaaggaggcgcgcgtgtttctccagaacctgctttccgtcagtcaagcccgcctacgcgacgataccgagctgaggaaatgtgcctttatctcccaggcaagcgccaccatgcatttgccagcaacaataggtgactacaccgatttttatagctctcggcaacatgcaacaaacgtgggcatcatgttcagggacaaggaaaacgctttaatgcccaactggctccatctgccagtggggtatcatggacgcgcctcttctgttgtggtgtcaggcacacccatccggcggccaatgggccagatgaagcccgacgattctaagccccccgtttatggcgcttgcaagctgctcgatatggaactggaaatggccttttttgtggggcctggaaataggttgggagaacctatacccatctccaaggcccacgagcacattttcggaatggtcttaatgaacgactggtccgccagggatattcagaagtgggagtatgtgcctttaggaccattcttagggaagagctttggaactaccgtgagcccatgggtggtgcctatggatgccttgatgccattcgcagtcccaaaccccaaacaggacccacggcccctcccctatctatgccacgatgagccctatacttttgatatcaatctgtcggtgaacctaaaaggggaaggcatgtcgcaggctgccaccatctgcaagtccaatttcaaatacatgtactggaccatgcttcagcagttgacgcaccactcggttaatggatgcaacctaaggcccggagacctgctggcctccggcactatctccggacctgagcctgagaatttcggctcgatgctggagctgagctggaagggtactaagcctatagacctgggtaatggtcagacccgcaagtttttgctcgatggagacgaggtgattatcaccggttattgtcagggtgacggctaccggatcggattcggtcaatgcgccgggaaggtgcttcctgccttgctgccttct

SEQ ID NO: 2787 - DNA, 1257 bp, Artificial Sequence
  derived and/or modified sequence
atgagcttcatcccggtcgcggaggactccgacttccctatccacaacctgccttacggagtgttctcaacccggggtgacccgcgcccacgcatcggggtggcgatcggcgatcagatcctcgatctgtcgattatcaaacatctgttcacgggaccggtgctgagcaaacaccaagacgtgtttaatcagcctaccctcaactcgtttatgggacttgggcaagcggcttggaaggaagctcgggtctttctgcagaacctgctcagcgtctcacaggcccggctgagagacgacaccgagctgcgcaaatgcgccttcatctcccaggcatcggccacgatgcacctccctgctactatcggcgactacactgatttctacagctcccgccagcacgccactaatgtggggatcatgttcagagacaaggagaatgccctgatgccgaactggctgcatctgccggttggataccatggcagagcatccagcgtggttgtgtcgggcaccccaatccgccgcccgatggggcagatgaaaccggacgactcgaagccaccggtgtacggtgcctgcaagctgttggatatggaactcgaaatggcctttttcgtcggacccggaaatcgcctgggagaaccgatcccaatttcgaaagctcatgaacatatctttggcatggtgctgatgaacgactggagcgcacgcgatatccagaaatgggagtacgtgccactgggaccgttcctggggaaatccttcgggactactgtgtcaccgtgggtcgtgcccatggacgcgctgatgccgtttgcagtgccaaatccgaagcaagatccccgaccactcccgtacctgtgccacgatgagccgtacactttcgacatcaacctgtcggtcaaccttaagggcgagggaatgagccaagctgctactatctgcaagtcgaacttcaagtatatgtattggacgatgctccagcaactgacccaccacagcgtgaatggctgtaacctgcgaccgggtgatctgctcgcatctggaactatctccgggccggaaccagaaaacttcggctcgatgctggagctcagctggaagggaacgaagccaatcgatctggggaacggacaaacgcggaaattcctgttggatggagacgaggtgatcatcactggatactgtcaaggggatggctaccgaattggattcggacagtgcgcgggcaaggtgctcccggccttgctgccgagc

SEQ ID NO: 2788 - DNA, 1257 bp, Artificial Sequence
  derived and/or modified sequence
atgtccttcataccagtcgctgaggactctgattttcccatccataacctaccttatggggtgttttcaactagaggggatccacggcctagaataggagtggccataggagatcagatcttggatctgtctatcatcaagcatctgtttacagggccagtgctttcaaaacatcaggatgtgttcaaccagcccacactcaattcattcatggggcttgggcaggcagcttggaaggaagcccgggtgtttctccagaatctcctctctgtgtcacaagcacgcctgcgggatgatacagaactccggaaatgcgccttcatctcccaggcctcagccactatgcatttaccagctactatcggagattacactgatttctattcttcccgtcagcatgctactaatgtggggatcatgtttagagataaagaaaacgcccttatgccaaactggctccacttgcctgtagggtaccacgggcgagcctccagtgtggtagtttcagggacacccatccgcagacctatgggacagatgaaaccagatgattctaagcctcccgtgtacggggcctgcaaactgctagatatggaactcgaaatggccttctttgtggggccagggaacagacttggagagcctatccccatctctaaagctcacgaacacatctttggaatggtactaatgaacgattggagtgccagagatatccagaaatgggaatatgtacctttagggcctttcctgggaaaaagtttcgggactacagtcagtccatgggtagtacctatggacgcacttatgcctttcgccgttcccaacccaaaacaggacccaaggcctttaccctacttatgccacgatgaaccatatacatttgatataaacctatcggtgaacctaaagggggaagggatgtctcaggccgctactatctgtaaatctaatttcaaatacatgtattggactatgctgcagcagcttactcatcatagtgtgaacgggtgtaatctgagaccaggagatctccttgcctctggaacaatttccgggcctgaaccagagaattttgggtcaatgcttgagctgagttggaaagggactaaaccaatcgatttgggaaacgggcagactaggaaattcctgctagacggagacgaagtcatcatcacagggtattgccagggggatgggtatagaatagggtttggacaatgcgccggaaaagtgctgccagctctcctcccctca

SEQ ID NO: 2789 - DNA, 1257 bp, Artificial Sequence
  derived and/or modified sequence
atgtctttcatccctgtggcagaagattcggatttcccgattcacaatctcccttatggtgtgttttcaaccagaggcgaccctcgccccagaattggcgtagctatcggagatcaaatcttagatctttccatcattaagcatctctttacaggaccagtcctaagcaaacatcaggacgtgtttaaccagcctacactgaattctttcatgggccttgggcaggccgcatggaaggaggcgcgcgtttttttgcagaatcttctgtccgtgtcgcaggcccgattgagggatgatactgagctgcggaagtgcgccttcatttcacaggctagtgccactatgcacctccccgctaccattggtgactatactgatttctacagctctaggcagcacgcaaccaatgttggcataatgttccgtgacaaagagaacgcgcttatgcctaactggttgcacctgccggtaggctaccatggccgagcctcatcagttgtggtctctggcactcccatacgccggccaatgggacaaatgaaacctgacgactccaagcctcccgtctacggtgcctgcaaactgctggatatggagctggagatggcctttttcgtaggccctggaaacaggctgggggagccaatcccgataagcaaagcacatgagcatatattcgggatggttctcatgaacgactggagcgcgcgagacatccagaagtgggaatacgtaccgctcggaccttttttaggcaagagtttcggaaccaccgtgtcgccctgggtggtgccaatggatgccctcatgcccttcgccgtcccgaatccaaaacaagacccccggcctcttccctatctgtgtcatgacgaaccttatacattcgacatcaatctaagtgtgaatttaaagggcgagggaatgagtcaagccgctaccatttgcaaatcaaacttcaagtacatgtactggacgatgctccaacagctgactcatcactctgtgaatggatgtaatctgcggcctggagacctcctagcatcagggactatttctgggcccgagccagaaaacttcggatcaatgcttgagttgagctggaagggaacaaaacccatcgacctgggcaacggccagactaggaagttcctgctggatggggatgaggttatcattacaggttattgtcaaggggatggctataggataggatttggccaatgtgcagggaaagtgttgcctgcgctattgccctct

SEQ ID NO: 2790 - DNA, 1257 bp, Artificial Sequence
  derived and/or modified sequence
atgagcttcatcccggtcgctgaggactcggacttccccatccataatctgccctacggagtattctcgactcgcggtgatccacggccccgcattggagtggcgatcggagatcaaatcctcgatttgtcgatcatcaagcacctgttcactggccctgtgctgtcgaagcatcaggatgtgttcaaccagccaactctgaattcgttcatgggcctgggacaggctgcgtggaaagaagcccgcgttttcctgcagaatctcctgtcggtgtcgcaagcacggctgcgggacgacaccgagctgcggaaatgtgcctttatctcgcaggcctcggcgaccatgcacctgccggccacgatcggagattacactgatttctactcttccagacagcacgcgaccaatgtgggaatcatgttccgcgataaggagaacgccctcatgcctaactggctccacctgccggtgggttaccatggaagggccagctcggtcgtggtcagcgggaccccgatcagacgtccgatgggccagatgaaaccggatgacagcaaaccaccggtgtacggagcttgcaaactcctcgacatggaacttgaaatggcgttcttcgtggggccaggaaaccggctgggcgaacccatccctatcagcaaggcacatgagcatatctttggtatggtgctcatgaatgattggagcgcccgcgacatccaaaagtgggaatacgtcccgcttgggcctttcctcggcaagtccttcggcacgactgtgtcaccatgggtggtcccgatggacgcccttatgccattcgccgtcccgaacccgaagcaggatccgcgcccgctcccatacctgtgtcacgacgaaccttacacttttgacatcaacctctcggtgaacctgaagggggagggaatgagccaggcagccactatctgtaagtcaaacttcaaatacatgtactggaccatgttgcaacagctgacccaccacagcgtcaacggatgcaaccttagaccgggagatctgctggcctccggaaccatctcagggccagagcccgaaaactttggatcgatgctggaactttcctggaagggaaccaaaccgatcgacctgggaaacggacagacccgcaaattcttgctggacggtgatgaggtcatcatcactggctactgccagggagatgggtacaggattgggttcggacagtgtgcaggtaaagtgctcccggctctgctgccctca

SEQ ID NO: 2791 - DNA, 1257 bp, Artificial Sequence
  derived and/or modified sequence
atgagctttatccccgtggccgaggatagcgacttccccatccacaatttgccctacggagtatttagcactcgaggtgaccctcggccacgcataggggtggctatcggggaccagattcttgatctttctatcattaaacacctgttcacaggcccggttctcagcaaacatcaggatgtctttaaccagccaacactgaacagtttcatgggacttggacaggccgcttggaaagaagcgagggtctttctccaaaacttgctgagcgtttctcaggccagacttcgggacgacactgaattacgcaagtgcgctttcattagccaggcttccgctaccatgcacctgcctgcaactatcggggattatactgatttctactcaagccgtcaacatgctaccaacgtcggtataatgttcagagacaaagaaaatgctctgatgccaaactggctgcatctgcccgtcggctatcacggcagggccagttcggtggttgtgagcggcactccaatccggagaccaatggggcagatgaaacctgatgacagtaaaccaccagtatatggtgcttgcaagttgctggacatggaattggagatggcatttttcgttggccccggcaatcggctgggtgagcccatccctatcagtaaagcccacgagcacattttcgggatggtccttatgaacgactggagtgctcgtgacatccagaagtgggagtatgtccctttgggccctttccttggcaaaagcttcggcaccaccgtgtctccatgggtggttcctatggatgccctgatgccattcgctgtccccaacccgaagcaagacccacgcccactgccatacttgtgtcacgacgaaccttatacctttgatatcaacctctctgtgaacctcaaaggggaaggcatgtcccaagcagcgactatatgcaagagcaactttaaatacatgtattggactatgctgcagcagttaacccaccatagcgtcaatgggtgtaacctgaggcctggagacttgcttgcatcaggcactatctccggccctgaacctgagaattttggatcaatgctggagctgtcatggaagggaactaaacctattgacctcggaaacggacaaacaaggaaattcctcctggacggagatgaggtgatcataactggctattgccagggagatggatatagaataggttttggacagtgcgctggaaaagtgctccccgcgcttctcccctca

SEQ ID NO: 2792 - DNA, 1257 bp, Artificial Sequence
  derived and/or modified sequence
atgtcgtttataccggttgcggaagattcggattttccgatacataatctaccgtatggtgtattttcgacgcgtggtgatccgcgaccgcgtataggtgtagcgataggtgatcaaatactagatctatcgataataaaacatttatttacgggtccggtattatcgaaacatcaagatgtatttaatcaaccgacgctaaattcgtttatgggtctaggtcaagcggcgtggaaagaagcgcgtgtatttttacaaaatctattatcggtttcgcaagcgcgattacgtgatgatacggaattacgaaaatgtgcgtttatatcgcaagcgtcggcgacgatgcatttaccggcgacgataggtgattatacggatttttattcgtcgcgtcaacatgcgacgaatgttggtataatgtttcgtgataaagaaaatgcgttaatgccgaattggctacatttaccggttggttatcatggtcgtgcgtcgtcggttgtagtttcgggtacgccgatacgtcgtccgatgggtcaaatgaaaccggatgattcgaaaccgccggtatatggtgcgtgtaaattattagatatggaattagaaatggcgttttttgtaggtccgggtaatcgtttaggtgaaccgataccgatatcgaaagcgcatgaacatatatttggtatggttctaatgaatgattggtcggcgcgtgatatacaaaaatgggaatatgtaccgctaggtccgtttttaggtaaatcgtttggtacgacggtttcgccgtgggttgtaccgatggatgcgttaatgccgtttgcggttccgaatccgaaacaagatccgcgaccgctaccgtatttatgtcatgatgaaccgtatacgtttgatataaatttatcggtaaatctaaaaggtgaaggtatgtcgcaagcggcgacgatatgtaaatcgaattttaaatatatgtattggacgatgctacaacaattaacgcatcattcggtaaatggttgtaatttacgaccgggtgatttactagcgtcgggtacgatatcgggtccggaaccggaaaattttggttcgatgttagaattatcgtggaaaggtacgaaaccgatagatctaggtaatggtcaaacgcgtaaatttttattagatggtgatgaagttataataacgggttattgtcaaggtgatggttatcgaataggttttggtcaatgtgcgggtaaagttttaccggcgttattaccgtcg

SEQ ID NO: 2793 - DNA, 1257 bp, Artificial Sequence
  derived and/or modified sequence
atgagcttcattccggtggccgaggattctgacttccctatccacaatttgccctacggagtcttttctacccgcggtgaccctcgcccccgaattggggtagccatcggtgaccagattctagacctcagcattatcaaacacctttttacagggcccgtgctaagcaagcatcaggacgtgtttaatcagcccaccctgaacagtttcatgggcctgggacaggcagcatggaaagaggcccgagtgttcctgcagaatctgctgagcgtcagccaggcaaggttgcgggacgacacagagctgcgcaagtgcgccttcatttcccaggcaagtgcaaccatgcacctgccagccactattggcgactacacagatttttacagtagccggcagcacgcaaccaacgtgggaattatgttccgggataaggaaaatgcgctcatgcccaattggctgcacctgcccgtcgggtatcacgggcgggcctcgtccgttgttgtctccggaactcccatccggcgccccatggggcagatgaagccagacgactcaaagcctcctgtgtacggtgcctgcaaactgctcgatatggagctcgagatggcctttttcgtgggtcctggaaacagactcggagagcctataccaataagcaaggcacacgaacatatttttggtatggtccttatgaatgactggagcgcacgagacatccagaagtgggagtacgtccctctgggtccattcctcgggaagtccttcggtactactgtgtccccttgggtggtacctatggacgccctgatgcccttcgcagtccctaatccaaagcaggacccaaggcccctaccctacctttgccacgacgaaccatacacatttgatattaacttgtcagtgaatctcaagggggagggtatgtcacaggctgcaaccatatgcaaatcaaactttaagtatatgtattggacaatgctgcagcagctgactcaccatagcgttaatgggtgtaatctcagacctggcgatctgttggcaagtgggactatctctggacctgaaccagagaattttggctcaatgctggaactatcttggaaggggactaagccgatagacttgggcaacgggcagactcggaaattcttactggacggagacgaagtgatcattacagggtactgtcagggtgatggctatcgcataggttttgggcagtgtgccggaaaggtgctacccgctctcttaccatca

SEQ ID NO: 2794 - DNA, 1257 bp, Artificial Sequence
  derived and/or modified sequence
atgtctttcatccctgtggccgaggattcggatttcccgattcacaatctgccatacggcgtcttcagcaccagaggagatccaaggcccagaataggcgtggcgattggcgatcagattctcgacctcagtataattaagcatctttttactggtccggttctatctaagcatcaagatgttttcaaccagccgacactgaactctttcatgggtctgggccaggcggcgtggaaagaggcaagagtgttccttcagaacctactcagtgtgtcgcaggccagactgcgagacgataccgagctgcgtaagtgcgccttcatcagtcaggcatcagcaacgatgcatctgcctgccacaattggggattacaccgatttttactcttccaggcagcacgccaccaatgtgggtataatgtttcgcgacaaagagaatgctctgatgccaaactggctccatctgcctgtagggtaccatggcagggcctcatctgtcgtcgtgtcgggaacccctattcgccgacctatgggccaaatgaagcccgacgacagcaagccacccgtgtacggagcatgcaagttgctggatatggaacttgaaatggcattcttcgtaggcccggggaatagactcggcgagcctatcccgatcagcaaagcacatgagcatatttttggtatggtccttatgaatgactggagtgccagagatattcagaagtgggagtatgtgccactgggtccttttttgggaaaatctttcggcacaaccgtgtccccatgggttgtcccaatggacgctcttatgccatttgccgtgcctaacccgaagcaggatccaaggcccctgccatacttatgtcacgatgaaccgtacactttcgatattaacctgtccgtcaatctaaagggcgaggggatgtctcaggccgccacgatttgcaaatccaacttcaagtatatgtactggaccatgttgcagcaactgacacatcactctgtcaatgggtgtaacctcaggcccggcgatcttctcgcgtcgggcacgatttccgggcccgagccagaaaactttggcagcatgctcgagctatcttggaaggggactaaaccaattgatctcgggaacgggcagacgcggaaattcctacttgatggggatgaggtaattataacaggctactgtcagggcgatgggtaccgtattggcttcggacaatgtgctgggaaagtcttgcccgcgctgttgccttct

SEQ ID NO: 2795 - DNA, 1257 bp, Artificial Sequence
  derived and/or modified sequence
atgtctttcatacctgtggctgaagactccgacttccccatacacaatcttccctatggggtgttttcaacaagaggggatcctagacctcgcatcggagtagctatcggggatcagattcttgatctgtcaattatcaaacatctcttcacagggccagtgctcagtaaacatcaagatgtcttcaatcagcctactctaaactctttcatgggattaggacaggcagcttggaaagaagctcgggtgttcctccagaatctactttccgtgtctcaggccagactccgggatgatacagaattacggaaatgtgccttcatcagtcaggcctccgcgacaatgcatctccccgccacaataggggattatacagatttctattcatctagacagcacgccacaaatgtagggataatgttccgcgacaaggaaaacgctctaatgcctaactggttacatctgccagtggggtatcacgggcgggctagttctgttgtggtatcagggacaccaattagaaggcccatgggacagatgaaacctgacgattctaaaccccccgtatatggagcatgcaaactactagacatggagctggaaatggcattttttgttgggcctgggaatcgccttggagaacccattcccatcagtaaggcacacgaacacattttcgggatggtcctgatgaacgattggagtgctagggacatacagaaatgggaatatgtccctcttggaccctttctagggaaatcctttggaactacagtgtccccctgggtggtgcccatggatgctctaatgcccttcgctgtgccaaacccaaaacaggatccacggcctctcccctatctgtgccatgatgaaccttatacattcgacatcaacttgtctgtgaacctcaaaggggaagggatgtctcaagccgctactatatgcaaatccaacttcaaatatatgtattggactatgctacagcagctcacacaccattccgtcaacggatgtaacttacgccctggggatctgttagctagtggaacaatttccgggcccgaacctgaaaactttggatccatgcttgagctttcatggaaagggacaaaacccatagatctcgggaacgggcagactagaaaattcttgctggacggagatgaagtaatcataactgggtattgtcagggagacggataccggatagggtttgggcagtgtgctgggaaagtgttacccgctttgctaccttct

SEQ ID NO: 2796 - DNA, 1257 bp, Artificial Sequence
  derived and/or modified sequence
atgtccttcattcccgtcgccgaagattccgactttccaattcataacctgccttatggagtttttagcactcgaggtgacccgcggccccgcattggtgttgcgatcggcgatcagattttggatctcagcatcatcaagcacctcttcaccgggccagtcctctctaagcaccaggacgtgttcaaccagcccactctgaactctttcatgggactgggacaggccgcttggaaggaggccagggtgttcttgcagaatctgctttcagttagccaggccaggctgcgggatgataccgaacttagaaagtgtgccttcatttcccaggctagcgctacaatgcacctccctgctactataggtgactatacagatttctactcaagccgccaacacgccacgaacgtcggaatcatgtttcgcgataaggagaatgccctgatgcccaattggttgcacctccctgtcgggtaccatggcagagccagttctgtggtagtgagcgggacacccattcggaggcccatgggccagatgaagcctgacgattcaaagcctcccgtatacggggcctgcaaactgctggatatggagttggaaatggccttcttcgtgggcccaggcaacagactcggagaaccaattcccatatccaaagcgcatgagcatatttttggtatggtgcttatgaatgactggtctgcccgggacatacagaaatgggaatacgttccccttggaccgtttcttggaaaaagcttcgggacaactgtgagcccgtgggtcgttccaatggacgcccttatgccattcgcagttcctaacccaaagcaggatccccggccactaccctacctgtgccacgacgagccctacaccttcgatattaatttgagtgtgaacttgaaaggcgagggtatgagtcaggcagccactatttgcaagtccaacttcaaatacatgtactggactatgcttcaacagctcactcaccactccgtgaatggatgtaacttgcgccccggggatctacttgccagtggcacgatatcgggccctgaacccgagaactttggcagcatgctcgaattaagctggaagggcaccaagccgatagaccttggcaatgggcaaacccgcaagtttttgttggatggtgacgaggttataattacagggtattgtcagggtgacggatacaggatcggattcggtcaatgcgcaggtaaggttctccccgcgctgctaccatct

SEQ ID NO: 2797 - DNA, 1257 bp, Artificial Sequence
  derived and/or modified sequence
atgtcttttatcccggtcgccgaggactccgactttccgatccacaacctgccatacggcgtcttttccactaggggcgatcctcgcccccgcattggtgtagccatcggcgatcagatcctggacctttccattatcaagcaccttttcaccggccccgttctttctaagcatcaggatgtgttcaatcaacctactctgaactccttcatgggtttgggtcaggccgcctggaaggaggctagggtgtttttgcagaacctcctgtccgtttcccaggctcgcctccgcgacgacaccgagctccgtaaatgtgcgtttatctcgcaggcatctgcgaccatgcacctgcccgctaccatcggggactacaccgatttctactcttctcgccaacacgctactaacgtcggcatcatgttcagagacaaagagaacgccctgatgcccaactggcttcacctccctgtgggttaccacggacgcgcgagttccgtggtcgtgtccgggacccccattaggcgacccatgggtcagatgaagcctgatgactccaagccccccgtttacggagcttgtaagctccttgatatggaactggaaatggctttcttcgtgggtcccgggaatcgtctcggagaaccgatccctatctcaaaggcgcacgagcacattttcggcatggtactgatgaacgactggtccgctagggacattcaaaagtgggagtacgtgccgctcgggcccttcctgggtaaatcgttcggcacgaccgtctctccttgggtcgtccctatggacgctctcatgccttttgcagtgcctaaccccaagcaggatccacgtccgcttccctacctgtgccacgacgagccatatacatttgacatcaatctctcggtcaatttgaagggtgagggaatgagccaggcagccaccatttgcaagtctaacttcaaatatatgtattggactatgttgcagcagttgacccaccatagcgttaacggctgtaatctccgacccggcgacctcctcgcttctggcacaatttccggaccagagcccgagaatttcggctccatgttggagctttcatggaaaggcacgaagcccatcgacctgggaaacggtcagacccgcaagttcctactcgatggtgacgaggtgatcatcacgggctactgccagggtgacggctaccgtatcggttttggtcagtgcgccggcaaggtgctgcccgccctgttaccttcc

SEQ ID NO: 2798 - DNA, 1257 bp, Artificial Sequence
  derived and/or modified sequence
atgagttttatccctgtggctgaggactcagactttccaattcataacctcccctacggcgtgtttagtacaaggggagaccctcgaccacggattggagtggccatcggtgatcagattctggacctgtccatcatcaaacacctgtttacaggccctgtgttaagcaaacatcaggatgtgtttaatcaacccaccttgaactctttcatggggctaggtcaggccgcttggaaggaagcacgggtgtttctccagaacctcctctctgtaagtcaggccaggcttcgcgacgatacagaacttaggaagtgcgcattcattagccaggcctctgctacaatgcaccttccagcaacaataggtgactatacagatttctactcctccaggcaacatgcaacaaacgtcggtatcatgtttagggacaaagagaacgctctcatgcccaattggctgcacttgcctgtcggatatcatggccgggccagctccgtggtcgtgagcggaacccccatccgcaggccgatgggtcaaatgaagcccgacgattctaaacctccggtttatggcgcgtgcaagctccttgacatggagctagaaatggcttttttcgtgggaccgggtaatagattgggcgagcccatcccgatcagtaaggcccacgaacacatattcggaatggtactgatgaacgattggagtgcgcgagacattcaaaagtgggagtatgtgcctcttggccccttcctgggcaagtcctttggcactacagtcagtccctgggtggttcccatggatgcactcatgcctttcgctgtccctaacccaaagcaagatccccggcccctgccttatctgtgccatgatgagccatatacattcgatattaaccttagtgtaaatctcaaaggcgaggggatgtcgcaagctgcaaccatttgcaagagtaacttcaagtatatgtactggactatgttgcagcagctcacacaccactcagtcaatgggtgtaacctgaggccgggcgatctgctggctagtggaacaatctcaggcccagagcctgaaaacttcgggagcatgctggaacttagctggaaaggcactaaacccattgacctggggaatggccaaacaaggaaatttcttctcgacggagatgaagtgatcattactgggtattgccagggagacggctacaggatcggatttggccaatgcgccggcaaagtcctgcccgccttgctaccatct

SEQ ID NO: 2799 - DNA, 1257 bp, Artificial Sequence
  derived and/or modified sequence
atgtcttttatccccgtcgctgaggactctgatttcccgattcataacctcccatacggagtattcagcacaagaggcgatcccaggccaaggataggtgtcgctattggcgatcaaatcttggatctgagtatcatcaagcacctatttacaggccctgttttgtccaagcaccaagacgtgtttaaccagccgaccctgaatagtttcatgggcctggggcaggccgcatggaaggaggccagggtgttcctgcagaaccttctctctgtttcgcaggcacgactgcgtgatgatacagagttgcgaaaatgcgcctttatctcgcaggcctcagccacgatgcatcttcccgccactattggtgattacacggatttctattcatccagacaacatgcgactaacgtgggtataatgtttagagataaggagaacgccttaatgcctaactggctgcacctgcctgtagggtaccacggtcgcgcgtcctctgtcgtggtatcagggacaccgatccgaagacccatgggacagatgaagcctgacgatagtaaaccacctgtctatggggcctgcaaactcttggacatggaactggagatggccttttttgtcggacccggcaatcggctcggggaacccattcccatttccaaagctcatgagcacattttcggaatggtccttatgaacgactggagcgccagggatatccagaaatgggagtacgtgccacttggtcccttcctgggaaagagctttgggacaactgtcagtccttgggtcgtacccatggatgcattgatgcctttcgctgtccctaaccccaaacaggatcctcgaccactgccctatctttgtcatgacgagccatacactttcgatatcaatctcagcgttaaccttaaaggcgaggggatgtcccaagctgccactatttgtaaatccaactttaaatatatgtactggactatgctgcagcagctgacgcatcattctgtgaatggatgcaatcttcgcccaggcgatctcctggctagcggcaccatctcagggcctgagccagagaacttcggcagtatgcttgaactgagttggaaaggtaccaaaccaattgacctaggcaacggtcagacacgtaagtttcttcttgatggcgacgaggtgatcatcacaggctattgccagggagatggttataggatcggattcggccagtgtgctggaaaagtgctccctgcccttctaccgtcc

SEQ ID NO: 2800 - DNA, 1257 bp, Artificial Sequence
  derived and/or modified sequence
atgtcattcatccctgtggcagaggatagcgacttccccatccataatttgccttacggcgtgttctctacgcgcggggaccccaggcccagaattggtgtggccatcggcgaccagattttggacttgtccatcatcaagcatctgttcactggaccagtcttatcaaaacatcaggatgtattcaatcagccaacactgaatagtttcatggggctaggacaggcggcatggaaggaagcccgcgtgttccttcagaaccttctctctgtcagccaggctcgtcttcgggacgataccgagctacgaaaatgcgcctttatctctcaggcaagtgccactatgcatttgcccgccaccattggcgactatacagacttctacagcagcaggcagcatgcgaccaatgttgggatcatgttcagagacaaggaaaatgccctgatgccaaattggctgcatctgcctgtggggtatcatggtagggcctccagcgtggtggtgtcaggcacccccatcagacgacccatgggacagatgaagcccgacgacagcaaacccccagtgtatggagcttgcaagctgctcgatatggaactggagatggccttcttcgttggaccaggcaatcgcctgggtgaacccataccaatttccaaagcccatgagcacattttcggtatggtcctaatgaacgattggtctgcacgcgatattcaaaaatgggagtacgtgcctctgggcccctttctgggtaagagctttggtacaacagtcagtccatgggtggtccctatggatgccttgatgccttttgccgtccccaacccaaagcaggacccacgccccctgccctacttatgccatgatgagccatacacgtttgacatcaacctgtcagtaaacttgaaaggtgaaggcatgagtcaggctgcaacgatctgtaagagcaattttaaatacatgtactggaccatgctccagcagctcacccatcattctgtcaacggctgcaacctccgtcctggcgatctcctggctagcggcacaatctcaggccccgaacccgagaacttcggctcaatgctggagctatcctggaagggcaccaaacccatcgatctgggcaatgggcaaactaggaaattccttctcgatggggacgaggtgatcatcacgggatactgccaaggcgacggataccgcattgggtttggccagtgtgctggaaaggtgcttcccgccctcctgccgtcc

SEQ ID NO: 2801 - DNA, 1257 bp, Artificial Sequence
  derived and/or modified sequence
atgtcttttatcccggtggccgaagacagtgacttccctattcataatctgccctacggggtgttttccactcgcggcgatccccgcccaagaatcggagtggctatcggggaccaaatcctggatctctcaatcattaagcacctgttcactgggcccgtcctgtccaagcatcaggacgtgttcaaccagcccaccctcaacagcttcatgggtttgggccaggcggcttggaaggaagcccgcgtgttcctgcagaatctactcagtgtctctcaggctaggctgagggacgatactgagctgaggaaatgcgccttcatctcccaggcctccgccactatgcacctgccagccacaatcggcgactacacagatttttattccagccggcaacacgcaacaaatgtggggataatgtttcgggataaggaaaacgcacttatgccgaattggctgcacctgcccgtagggtatcatggcagggcatccagcgtggtggtcagcgggaccccgatcaggagacccatgggccagatgaagcctgatgactcaaaacccccagtttatggggcctgcaagctgctagacatggaactcgagatggcattcttcgtcgggccgggaaaccgtcttggtgagccaatacctatctctaaggctcacgagcatatattcggtatggtcttgatgaatgattggagcgcaagagacattcagaagtgggagtacgtgccccttgggccatttctgggcaagtcatttggaactacagtgtctccttgggtcgtgcctatggacgcactgatgccattcgcggtgcctaaccccaaacaagacccacgcccccttccttacctgtgtcacgacgagccttatacctttgatatcaatttgagtgtgaatctgaaaggagagggcatgtcacaggctgcgacgatctgcaagtcaaacttcaagtacatgtattggaccatgctccaacagctcacccaccatagtgtcaacggttgcaaccttaggccaggggacctccttgcgtctgggactatttccggacctgagccggagaattttggatcaatgctggaactgtcctggaagggcacaaagcctattgatctcggaaacggtcaaacacggaaattcttattggatggtgacgaagtcatcatcacagggtattgccaaggagatggttacagaattgggtttgggcaatgtgctggaaaggtcctgcccgcattactgcccagc

SEQ ID NO: 2802 - DNA, 1257 bp, Artificial Sequence
  derived and/or modified sequence
atgtcctttattccggtggctgaagatagcgacttccctattcataacctcccctatggcgtattctcaactcggggagatccccgcccccgcataggtgtagctataggcgaccagatactcgacctgtccattatcaaacatctgtttactggccctgtcctgagtaagcaccaggatgtatttaaccaacccacactcaattccttcatggggttagggcaggccgcctggaaagaggcacgggtttttctacagaacctgctgtccgtctctcaggccaggcttcgtgacgacacggaactccgcaagtgtgcatttattagccaagccagtgccaccatgcaccttccagccaccattggcgattacaccgacttctattcatcaagacagcacgctaccaacgtgggaatcatgtttagagacaaggagaacgctctaatgcccaactggctccatctccctgtcggctatcacggcagagctagctccgtggtagtgagtggcactccaatacggagacctatgggacagatgaaacccgatgactcgaaaccaccagtctacggagcctgcaagctgctagatatggaacttgagatggccttcttcgtggggcctggcaataggctgggggagccaatcccaatcagcaaagcccacgaacatatatttggaatggtgttgatgaacgattggagcgctcgagatatccagaagtgggaatatgtaccactcgggccttttctcggcaagtcatttggcacaaccgtctccccatgggtggtccccatggatgctcttatgccatttgctgttcccaaccccaaacaggatcctagaccacttccctatttatgccacgacgagccctacacattcgatattaacttaagcgtgaacctgaaaggtgaaggtatgtcccaggctgccacaatttgcaagtccaatttcaagtatatgtattggaccatgctgcagcagctgacccaccactctgtgaatgggtgtaacctgcgccccggggatctgctagcttccgggacgatctccggacctgagcctgaaaactttggatcaatgctggaactctcatggaagggaaccaagcccatagatctgggaaacggacagacgcgaaagttcctgttagacggcgatgaggtgattattacgggatattgtcagggagatgggtacagaataggtttcggccagtgtgccggcaaagtgctccccgccctgctgccaagt

SEQ ID NO: 2803 - DNA, 1257 bp, Artificial Sequence
  derived and/or modified sequence
atgagtttcatcccggtcgcggaggacagtgattttcccatccataacctcccttacggcgtattctccacgcgaggggatccgcgaccgcgaatcggagttgccatcggcgatcagatccttgacttgtctatcattaagcatctgttcactggacccgtcctgtccaagcaccaggatgtctttaaccaacctacactaaattcgttcatgggtctcggacaagcggcctggaaagaggcacgtgtattcctccaaaacctgctctccgtgtcccaggcccggctccgtgacgacactgagctgaggaagtgtgccttcatctcccaggcctctgccaccatgcatctgcctgctaccatcggtgattatactgacttttactcatctcgacaacacgcaaccaatgttggtataatgtttagagataaggagaacgccctgatgcctaactggttgcacttgcctgtggggtatcatggccgggctagcagtgtcgtcgttagcggaacgcctattcgcagaccaatgggtcaaatgaaacctgatgattctaagccgcctgtctacggtgcttgcaagttgttagatatggagttggagatggccttctttgttgggcctggaaaccgcctcggggagcctatccctatttcaaaggctcacgaacatatttttggtatggtacttatgaatgactggtccgcccgagacatccagaaatgggagtatgttcccttaggcccttttctaggcaaatcattcggtacaacggtctcaccctgggtcgtccctatggatgctcttatgccttttgcagtgccgaaccctaaacaagatccgcggccactcccgtacctctgtcatgacgaaccatacacgttcgatatcaacctctccgtcaacctcaaaggcgagggaatgtcgcaggcggccacgatctgtaaatccaactttaagtacatgtactggacgatgctccagcaactaacccaccatagcgtaaacggatgcaatcttcgtcccggcgatttgttggcgagcggtactatatcaggccccgaacctgaaaatttcggttcaatgttggagttgagctggaagggaactaaaccaatagatcttggtaacggccaaactcgcaagttcttgctagacggggatgaggtgatcattaccggatactgccaaggagatggatataggatcgggtttggacagtgtgccggcaaggtccttccagcccttttaccttct

SEQ ID NO: 2804 - DNA, 1257 bp, Artificial Sequence
  derived and/or modified sequence
atgagttttatacccgttgcagaagattcagatttccctattcataacttgccatacggtgtttttagtaccaggggggatccacgtccaaggattggggtggcaatcggcgaccagatcctcgatttgtctataattaaacatctttttaccggaccggtcttgtcaaagcaccaagatgtcttcaatcaacccactcttaacagcttcatgggcctcgggcaggctgcctggaaggaagcccgggtattcttacaaaaccttctctccgtctcccaggctcgtttacgtgatgatacggaactccgaaaatgtgcatttatcagtcaagcgtcagcaactatgcatctacctgctaccatcggtgactataccgacttctattcttcccgacaacacgcaacaaacgtgggaatcatgttccgggataaggaaaatgcattgatgccaaactggcttcatcttccagtgggttaccatggcagagctagttccgttgtggtgtcgggtactccgataaggaggccaatgggacagatgaagcctgacgacagtaaaccaccagtgtacggagcatgtaaactcctcgatatggaattggaaatggccttcttcgttggaccggggaatagattaggtgaaccaataccgatttctaaagcccacgagcatattttcggtatggtgttaatgaatgattggtccgcacgagacatccagaaatgggagtacgttccattgggtccgttccttggtaaatctttcggtactaccgtgtcgccatgggttgtccccatggatgcacttatgccattcgcggtccccaatccgaaacaagatcctcgtccgttgccatacttgtgtcatgacgaaccttatactttcgatattaatttgtcagtcaatctcaaaggtgagggaatgtctcaggctgctactatctgcaagtccaattttaagtacatgtattggactatgctccagcagctcactcatcactcagttaatggatgtaatttgaggcccggagatttgctcgctagtgggactatatcaggtcctgagcctgagaacttcgggagtatgttagagttgtcttggaagggcactaaacctattgatttgggaaatggacagactcggaaattcttgttggatggtgacgaggtcatcattactggttattgtcaaggcgatggttatagaataggattcggacaatgcgctggtaaagtcttgcctgcactccttccttcg

SEQ ID NO: 2805 - DNA, 1257 bp, Artificial Sequence
  derived and/or modified sequence
atgtcctttatccctgtggcggaggacagtgactttcccattcacaatctgccctacggagtgttctctactaggggcgatccaaggccacgaatcggggtggcgattggcgaccagatcctcgacctgtctatcatcaagcatttgttcacggggccggtgctgtctaagcaccaggatgtgttcaaccagcctactctgaatagtttcatggggctggggcaggccgcgtggaaggaggcacgcgtgttcctgcagaatctgctcagtgtttctcaggcccgcctgcgcgatgatacagagcttcgcaagtgtgcattcattagccaggcctctgcgaccatgcatctccctgcaactattggtgactacaccgacttttactcttctaggcaacacgccaccaacgttggtattatgtttcgggacaaggaaaatgctctgatgcctaattggttgcaccttccagtcggctaccacggcagagccagcagtgtggtagtatcaggaactccaattaggcgccctatgggtcagatgaaaccagacgactctaaaccgccagtgtatggggcttgcaaactgcttgacatggaattggagatggccttcttcgtgggacctgggaataggctgggcgagcctattcccatatccaaggctcatgagcacatctttggaatggtccttatgaacgattggagcgctagagacatccagaaatgggaatacgtccctttgggtccgttcttgggtaagtcatttggtacaaccgtcagcccgtgggtggttccaatggacgccctcatgccatttgctgtgcctaatcccaaacaggatcctcgccctctgccgtacctgtgtcacgacgagccatacacgttcgatatcaacctgagtgtaaacctcaagggagagggaatgtcccaggcagccacgatctgcaagtctaactttaaatacatgtactggacaatgcttcagcagttgactcaccatagtgtaaacggctgcaaccttagacctggagatctgctggcctccggcacaatcagcggtccggagccggagaacttcgggtcaatgctcgaactgtcttggaagggcacaaagcccatcgatttgggaaatggccaaacccgaaagttcttgctggacggagacgaggtgattatcaccggatactgccagggggacggataccggataggcttcggtcaatgtgccggcaaggtcctcccggcattgctgcccagc

SEQ ID NO: 2806 - DNA, 1257 bp, Artificial Sequence
  derived and/or modified sequence
atgtctttcattcccgttgccgaagactctgatttccccatccacaatttgccttacggcgtcttctcaaccaggggagacccccgtcctagaataggcgtggcaatcggtgaccagatccttgacctgtccattattaaacacttgtttactggtccagtgttgtcaaagcaccaagatgtttttaaccaacccaccctgaactctttcatgggtctgggacaggccgcctggaaggaagccagggtttttcttcaaaacctgctctccgtgtctcaggctcgtctgcgcgacgacacagaactcaggaagtgtgcattcatatcacaggcatctgctaccatgcacctgcccgccaccattggagattacacagacttttacagctcacgccagcacgctactaacgtaggcattatgttccgtgacaaggaaaatgctctcatgcctaactggttgcatttgcccgtgggctatcacggcagggcttctagcgtggtcgtgagcggtacacctataaggcgccctatgggacagatgaagcccgatgactccaagccccctgtgtatggtgcttgcaagctcctggatatggagctggagatggccttctttgtaggtccaggaaatcgcctgggagagccaatcccaatctctaaggctcacgagcatatcttcggtatggtgctgatgaacgattggtccgcacgtgacattcaaaagtgggagtacgtccctttgggccctttccttggcaagagctttggcaccaccgtctccccatgggtggttccaatggacgccctgatgccatttgctgtgcccaatcccaagcaggacccccgtcccctgccatatctgtgccatgacgagccatatactttcgatattaatttgtccgtgaacttgaaaggagagggtatgagccaagccgctactatctgcaagagcaatttcaagtacatgtattggacaatgctgcaacagctcactcatcacagtgtcaatggctgcaacctccgccccggagacctcctggcctctggtacaatctctggtcctgagccagagaactttggtagcatgctcgaattgtcttggaagggcaccaaaccaatcgatctgggcaacggccaaacaagaaaatttctgctggacggagatgaggttatcatcaccggctattgtcagggtgacggatataggataggatttggtcagtgcgccggcaaggtcctgcctgctctgcttccaagc

SEQ ID NO: 2807 - DNA, 1257 bp, Artificial Sequence
  derived and/or modified sequence
atgtcttttatccccgtcgctgaggattccgattttcctatacataatctaccatacggcgtcttctccactaggggcgatccgaggccacgtattggcgttgccatcggcgatcagatcctcgacctatcgatcatcaagcatctgttcaccggcccagttctctcgaagcaccaggatgtgtttaatcaaccgacgttgaattcatttatgggactgggccaggccgcctggaaggaggctagagtctttctgcagaatcttctgagcgtgagccaggctcgacttcgagacgatacggagcttcgaaaatgcgcttttatcagccaggcgtccgccacgatgcatctgccggcaaccatcggggactatacagatttctacagttctcgtcagcacgccaccaacgtaggcatcatgttccgggacaaagaaaacgcgctgatgcccaactggctgcacttaccggttggataccacggtagggcaagtagtgtcgtggtgtcaggcacgccaatacggcgccctatgggacaaatgaagcctgatgatagcaaaccgcccgtttatggcgcatgcaagctgctggatatggagcttgagatggccttcttcgtgggacccggtaatagactaggtgaacctatccctatcagtaaagcacatgaacacatcttcgggatggtactcatgaacgattggtccgccagagatatccagaagtgggaatatgtgcccctgggtccgttcctgggaaaaagcttcggcacgacagtgagtccctgggtggtgcctatggatgctcttatgccattcgccgttccaaaccctaagcaagatccacgaccgctgccgtacctctgccacgacgagccctacacgtttgatattaacctgtcggtgaatctgaagggagaaggtatgagtcaggctgctaccatatgtaaatccaacttcaaatatatgtattggacgatgctacaacaactcacgcaccactccgtcaatggttgtaatctgagacccggtgacctgctagcatcaggcactataagcggtcctgagcctgagaatttcggctccatgctggagttgagctggaaggggaccaagcctatagatctgggcaacggtcagaccaggaagttcttgctcgacggtgatgaggtcattattaccggctactgccagggcgacggttatcgtattggctttggtcagtgcgcaggcaaggtgctccccgctctgttgccatca

SEQ ID NO: 2808 - DNA, 1257 bp, Artificial Sequence
  derived and/or modified sequence
atgtctttcataccagtggccgaagattcagactttcctattcataatctgccatatggtgtgttctccactcgaggcgatcctagaccacgcattggtgtagctatcggtgatcaaatcctggacttgagcattatcaagcatctgttcaccgggcccgtcctcagcaaacatcaggatgttttcaaccaacccacactgaactcattcatggggctgggacaggccgcttggaaggaagcccgcgttttcctgcagaatttgctgtccgtttcacaggctcggctcagagacgacacagagctgaggaagtgcgcttttatcagccaagcaagcgcaaccatgcacctccctgccaccatcggggactacactgatttctactcgagtcgtcagcacgcaacaaacgttggaatcatgttccgggataaagaaaacgcccttatgccaaactggctacatttgcctgtgggatatcatggcagagccagttctgtggtagtttccgggacacctattcgacgacctatgggccagatgaagcctgatgattccaagcctccggtctatggcgcatgtaagctcttagatatggagctcgaaatggcctttttcgtggggccggggaaccgcctcggtgagccaatcccaatctcaaaggctcacgaacacatcttcgggatggtactgatgaacgactggtcagctagagatatccagaaatgggaatacgtacccttgggacccttcttaggcaagtcattcgggaccacagtgtccccttgggtggtgccaatggacgcactgatgcccttcgctgtgccaaatccaaaacaggaccctaggcctctgccctacctgtgtcacgacgagccctacaccttcgacattaatctcagtgtgaacctcaagggggaaggtatgtctcaggccgcaacaatctgtaaaagtaactttaaatacatgtactggactatgcttcaacaactgactcaccatagtgtaaacggatgcaacctgcgtccgggcgacctcctggcgtccggcactatttcagggcccgagccggaaaactttggaagtatgctggagctcagctggaagggaacaaaacccattgatctgggaaatgggcagaccagaaagttccttctcgatggggacgaagtcattattactggatactgccagggagacggatacaggatcggcttcgggcagtgcgcaggaaaggtcctccccgctctcctgccctcc

SEQ ID NO: 2809 - DNA, 1257 bp, Artificial Sequence
  derived and/or modified sequence
atgtccttcatccccgtggctgaggatagcgacttcccaattcataaccttccgtatggagtgttctctacccggggtgacccaaggccgcggattggggttgcaattggcgaccaaatcctagacctatccatcatcaaacatctttttactgggcccgtactgtctaagcatcaggatgtgttcaaccagcccacactcaactcatttatgggtctgggacaggctgcttggaaagaggctagggtattcttgcagaaccttctgtcagtttcacaggcccgattgcgagatgacactgaattgaggaagtgcgcattcatatctcaggcaagtgccacaatgcacctgccagctacaatcggtgattacaccgacttctatagctctcgccagcacgccacaaacgtgggcattatgttcagggacaaagagaatgccctaatgccaaactggctccatcttccggtgggttaccacggccgcgctagcagcgttgtggtctcagggacgccgatcaggagaccaatgggacaaatgaagcccgacgactccaaacctcccgtttatggcgcctgcaaactgctggatatggagcttgaaatggctttttttgtcggccctggtaatcgcctgggcgagcctatcccgatcagcaaagctcacgagcacatcttcggtatggtcctcatgaacgactggagtgccagagacattcagaagtgggagtatgtgccgctgggtccgtttcttgggaagagttttggaacaactgtcagcccctgggtcgtacccatggacgctttgatgcccttcgccgtccctaaccctaagcaggaccctagacccctcccttacctgtgtcatgacgagccttacaccttcgatataaacttgagtgtgaacctaaaaggcgagggaatgtcacaggcagcaactatttgcaaatcaaatttcaaatacatgtattggaccatgctgcagcagctgacacatcattctgtgaacgggtgtaatctgaggcctggcgatttgctggcaagcggcaccattagcggtccagagcctgaaaacttcgggtcaatgttggagttgtcctggaaaggtacaaagcccatcgatctgggtaacggccagactagaaagttcttgctcgatggtgatgaggtgattatcaccggttattgtcagggggacggctacaggatcggatttggtcagtgtgctggaaaggtgctgccagcactgctgccttct

SEQ ID NO: 2810 - DNA, 1257 bp, Artificial Sequence
  derived and/or modified sequence
atgagctttattcccgttgccgaagactccgatttcccaatccataacctgccctacggagttttctcaacaagaggagaccctaggcctagaatcggtgtcgctattggtgatcagattctcgatctgtccataatcaaacatctcttcactggaccggttctatcaaagcatcaggatgttttcaaccaacctaccttgaacagctttatgggtctgggtcaggcagcctggaaagaagccagagtgttcctccagaacctgctatctgtctcacaggcgcggctgagagatgacaccgaattaagaaagtgtgcattcataagccaagcctcagccacgatgcatctgcccgccacaatcggggattacactgacttctattcctcacgccagcacgccacaaacgtgggaatcatgttcagagacaaagagaatgccctgatgcccaattggctacatttgcccgtgggctaccacggcagagcctcaagtgtggttgtttccggaacccctatacgccgccccatgggccagatgaaaccggacgattctaaacctcctgtctacggggcttgtaagctcctcgacatggaactggagatggcattcttcgtcgggccaggcaatcggctgggagagcctatcccaatttctaaggcccacgaacatatcttcggaatggtgttgatgaacgactggagcgcccgagacatacagaaatgggagtacgtgcctttggggcccttcctgggaaagtctttcggaactaccgtctctccatgggtggtccctatggatgccctgatgcctttcgctgtaccaaacccaaagcaggaccctagacctctcccatatctctgtcatgatgaaccctataccttcgatatcaatctgtctgttaatcttaaaggtgagggtatgtcgcaggctgcaaccatttgcaaatctaattttaaatatatgtactggaccatgctgcagcagctcacacaccactcagtcaacggctgtaacctccggccgggagacctgctagctagcgggaccatctccggcccagaacccgaaaatttcggcagcatgctcgaattgtcatggaaaggcactaaacctattgacttaggcaatgggcagactagaaagttcctgctggatggcgatgaggttatcattacggggtactgtcagggagatggctatcgaattgggtttgggcagtgcgctgggaaggtcttgcccgctctcctcccttca

SEQ ID NO: 2811 - DNA, 1257 bp, Artificial Sequence
  derived and/or modified sequence
atgtcttttatacccgtggcagaagactccgatttcccgatccataatctcccatatggcgtctttagcacgcgtggcgacccccggccacgcataggagttgcgatcggagaccaaatcttagacttgagcattattaaacacctgttcaccgggcccgtgttgagtaagcaccaggacgtgtttaaccaacctaccctgaactcatttatgggccttgggcaggccgcttggaaggaagccagggtctttctgcaaaaccttctttccgttagccaggcccgcttacgtgacgacacagagctcaggaaatgtgcctttatttcccaggcatctgccaccatgcacctacctgcgacaattggcgactatacagacttttatagctctagacagcatgccacaaatgttggaatcatgtttcgggataaggagaacgctctgatgcccaattggttacaccttcctgttggataccatggtcgggcttcatcggtggtggtctctgggacgcctatccggaggcccatgggccagatgaagccagacgactccaagcccccggtgtatggggcttgcaagttactcgacatggaattggaaatggctttcttcgtgggtccaggcaatagattgggcgaaccaattcctatctcaaaagcacacgagcatatctttgggatggtcctgatgaatgactggtccgcgagggacattcaaaagtgggaatacgtgccactggggccttttcttggcaagtctttcggaaccaccgtgtccccctgggtggtccccatggacgcactgatgccttttgctgtacctaatccaaaacaggacccccgacccctcccctatctctgccatgacgagccatacaccttcgatataaatctgagcgtgaacttgaagggtgaaggaatgtcccaggccgccaccatctgtaaaagtaattttaagtatatgtattggacaatgctgcagcagttaacccatcatagcgttaacggatgcaacctccggccaggggatctgctggccagcgggaccatatctggtcctgagcctgagaattttggtagcatgcttgagttatcatggaagggtactaaaccaatagatctgggcaatgggcagacccggaagtttctactggatggggatgaggtcattatcaccgggtactgtcaaggcgatggttacaggatagggttcggccagtgcgcagggaaggtactaccagcactgctcccaagt

SEQ ID NO: 2812 - DNA, 1257 bp, Artificial Sequence
  derived and/or modified sequence
atgagctttatcccggtagcagaagactctgacttcccaatccataatctaccctatggagtcttttcaaccagaggagatcctaggcctcggatcggcgtcgccatcggagatcagattttggacctgtccataatcaaacacctcttcaccggcccggtactcagtaaacaccaagacgtctttaatcagccaaccctcaattcatttatgggcctcggccaggcagcttggaaagaggccagagtgttcctccagaatcttttgtctgtgtcccaggcccggctacgcgatgataccgaactgcggaagtgcgctttcatatctcaagcctccgccactatgcacttgccagcaacaattggtgactataccgacttctactcctccagacagcatgcaaccaacgtcggcatcatgtttagggataaagaaaatgccctgatgcccaattggttgcatttgccggttggctatcacgggagagcaagctccgtggtagtgagtggcaccccaatacggcggcccatgggacaaatgaaaccggacgattctaagcctcccgtctatggcgcatgtaagctgctcgacatggaactggagatggcattcttcgttggtcccgggaaccgacttggagagcccatccccatctcaaaggcccatgaacacatcttcggcatggtcctgatgaatgattggtccgcgcgggacatccagaaatgggaatacgtgccactgggaccttttctcggcaaaagcttcggtactactgtgtctccatgggtcgttccaatggacgcactcatgccattcgctgttccaaaccccaaacaggatccgcggccgctgccctacttatgccacgacgaaccatatacattcgatattaatctgagcgtaaacctcaaaggagaaggaatgagccaggcagccaccatctgtaaaagtaacttcaaatacatgtattggaccatgctgcaacagctgactcaccactccgtgaatggttgcaacttgcgtcctggcgacttactggctagcggcaccatctccgggccggaaccagagaatttcggcagtatgctggaactatcctggaaaggaaccaagcccatcgacttgggaaacggacagactcggaagttcctgttggacggggatgaggtgattattactggatactgtcagggagacggatacagaattggattcggacagtgtgccgggaaggtactgcccgcactgctaccctca

SEQ ID NO: 2813 - DNA, 1257 bp, Artificial Sequence
  derived and/or modified sequence
atgtcctttattcctgtggcagaggacagtgacttcccaatccacaatctgccctacggagtatttagcactagaggtgaccctcgcccaaggatcggagtggccatcggggatcagattctcgacctgagtattattaaacacttgttcacgggaccggtcctgtctaaacaccaagacgtgtttaaccagccgacgctgaacagctttatgggcctaggacaggcggcttggaaagaggctagggttttcctgcagaaccttctgtccgtgtcacaggcaagactcagggatgatacggaactgagaaaatgtgctttcatcagccaggccagcgcaacgatgcacctccctgccacaatcggcgattacaccgacttttatagtagtaggcaacacgctaccaacgtgggaataatgttcagggataaggagaatgcgctgatgcccaattggctgcatctccctgtgggttaccacgggagagcttcttccgtcgtcgtctccggaactcccattcggcggcccatggggcagatgaaacccgacgactctaaacctccggtgtatggagcatgcaagctgttggacatggaactagagatggctttttttgtgggccccggtaaccggcttggagaaccaattcctattagtaaggcacatgaacacatcttcgggatggttctaatgaacgattggtcagcacgggatattcagaagtgggagtacgtacctcttggccctttcttaggcaaatcgttcggcacaaccgtgtcaccttgggtagtccccatggacgccttgatgcccttcgccgtccccaatcccaagcaagaccccaggcccttaccctatttgtgccatgatgagccttatacctttgacatcaacctaagcgtgaacctcaaaggcgagggcatgagtcaagctgctaccatctgcaagtcaaacttcaagtatatgtattggacgatgctccagcagctcacccaccactcagtcaatggttgcaatttaagacctggcgacctgctcgccagcggaactatctccggcccagaacccgagaattttgggtccatgctggagctctcctggaaaggtacaaaacccatagatcttgggaacgggcagacaaggaagtttctgctggatggagatgaggtgatcattacaggatactgccaaggggacgggtaccggattggattcggccagtgtgcaggaaaggtcctgcctgccctcctcccgtcg

SEQ ID NO: 2814 - DNA, 1257 bp, Artificial Sequence
  derived and/or modified sequence
atgtcgtttattccagtggcagaggatagcgattttcccattcataatctgccttacggagtattttctacgcgcggggacccccggcccagaatcggggtggctattggcgatcagatactcgacctgtcaattataaaacacctctttaccggtccagtcctcagcaaacatcaggatgtgttcaaccagcccacgctgaactcctttatgggccttggtcaggcggcctggaaagaagcccgggtctttctgcagaacctattgagcgtgtcccaagcccgcctgagagatgataccgagcttcggaagtgcgcctttatctctcaagccagcgcaaccatgcatctgcctgcaacgataggcgattataccgacttctacagctcacgccaacatgcaaccaatgtcggaattatgtttcgcgacaaggaaaacgcattgatgcctaattggcttcacctgcccgtcggttaccacggccgcgcttccagcgtggtcgtgtccggaaccccgatcagaaggcccatgggccagatgaaaccagacgattcaaaaccgcccgtgtacggagcctgtaagctgctggatatggagcttgaaatggcctttttcgtaggcccggggaaccggctgggtgagcctatccccatcagtaaagcacacgaacacatatttggcatggttcttatgaatgactggtctgcccgtgatattcaaaagtgggagtatgtgccccttggaccctttttgggtaagtcgtttgggacaactgtcagcccgtgggttgtgcctatggacgccctgatgccattcgcggttcccaatcctaaacaggacccacgtccccttccgtatttgtgccatgatgagccatatactttcgatatcaacttgtctgtgaacctcaagggggaggggatgtcccaggccgcgactatatgcaagtccaattttaaatatatgtactggactatgcttcaacagctgacacatcacagcgtcaacggttgcaacttgcggcctggggatctcctggcctcgggaacgatctccggacccgagcctgaaaatttcggctcaatgctggaactgtcttggaaagggactaagcccattgacctggggaatgggcagacaaggaaatttttgctcgacggcgacgaggtcattattacgggctattgtcaaggggatggatatcgcattggcttcggacagtgcgccggcaaggtcctgccagccctcctcccctcg

SEQ ID NO: 2815 - DNA, 1257 bp, Artificial Sequence
  derived and/or modified sequence
atgagttttatccctgttgccgaggattctgatttccccatccataatctgccatacggggtgttctccacaagaggagatcccagaccacgcatcggcgtcgcaattggggatcagatcctggacctcagcatcatcaaacacctgttcactggcccggtcctgagtaaacatcaggatgtttttaaccaaccgacattgaactccttcatgggtctcggccaggccgcttggaaggaggctcgggtttttctgcagaatttgttgagtgtgtcccaagcgcgcctgcgagatgacaccgaactgcgcaagtgcgccttcatcagccaagcctctgccaccatgcaccttccagccacaatcggcgattataccgatttttatagttcacggcaacatgccactaacgttggtattatgttccgcgacaaggaaaatgctcttatgccaaactggctccaccttcctgttggctatcacggtcgcgcatcctctgtggtagtcagcgggacgcccatcaggcgacccatgggacagatgaaaccagacgatagcaagccccctgtttatggtgcatgcaaacttctggatatggagctggagatggctttcttcgtgggtcctggcaatcgactgggcgagcctattcctattagcaaggctcatgagcatatctttggcatggttttgatgaatgattggagtgcgcgcgatatccagaaatgggaatacgtgccactcggccctttcctcggaaagagctttggaaccaccgtgtccccatgggtggtccctatggacgccctcatgccctttgcggtgcctaacccaaagcaggacccgaggcccctgccttacctttgtcatgatgaaccatacactttcgacattaacctgagcgtgaatctgaagggtgagggcatgtcacaagccgccactatttgtaagtctaacttcaagtatatgtactggacgatgctccagcaactgacccaccactccgtaaacgggtgtaacctgcgccccggggacctcctcgcatccggaaccatttccggcccagaaccagaaaattttggttccatgctcgagctgtcttggaagggtactaaacctatcgatctcggaaatggacagactcgaaaattcttgttggacggagacgaagtaattatcacgggctattgtcagggtgacggctatagaattgggttcggacaatgtgccggcaaggttttgccagccctgctgcctagt

SEQ ID NO: 2816 - DNA, 1257 bp, Artificial Sequence
  derived and/or modified sequence
atgtcattcatcccggtagcagaggactccgacttcccaatccataacctgccctacggcgtgttttcaaccagaggcgatccaagaccacgcattggcgtggctatcggtgatcagatcctcgacctgtccatcatcaagcatctgttcaccggcccggtcctctccaaacaccaggacgtgttcaatcagccaaccctcaacagcttcatggggttgggacaggccgcgtggaaagaagcgcgggttttcctgcaaaatctgcttagcgtgagccaggcaaggctgcgggacgacactgaactcaggaagtgcgcgttcatctcgcaggcgtcggccaccatgcatctgccagccacgattggggactacactgacttttactcgtcaagacagcatgccaccaatgtgggcatcatgttccgagataaggaaaacgccctgatgccgaactggctgcaccttccggtgggataccacgggagagcttcctcggtggtggtgtccggaactccgatccgccggccaatgggccagatgaaacccgacgattcgaagccgcctgtctacggagcgtgcaagctcctggatatggagttggaaatggcatttttcgtgggaccggggaaccggctgggagagcctatcccgatttcgaaggcccacgagcacatcttcggaatggtgcttatgaacgactggagcgcccgcgacatccaaaagtgggagtatgtccctcttggaccttttctgggaaagagcttcggaaccactgtgtcaccgtgggtcgtccctatggatgcgctgatgccattcgctgtgccgaatcccaagcaagacccccgcccgctcccatacctgtgccacgatgagccgtacacctttgatataaatctgagtgtcaatctgaagggcgaaggaatgtcccaggccgcaacgatctgcaaatcgaactttaaatacatgtactggactatgctccagcaactgactcatcacagcgtcaacggctgcaacctccgccctggagatctcttggcatcaggtactatctcgggtcccgaacctgagaacttcgggtccatgctcgaactgtcttggaagggaaccaaaccaatcgacctcggaaacggacaaactcgcaagttcctgctggacggagacgaagtgatcatcaccggatactgtcagggtgatggataccggattggcttcgggcaatgtgctggtaaggtgttgccggccctcctgccgtcc

SEQ ID NO: 2817 - DNA, 1257 bp, Artificial Sequence
  derived and/or modified sequence
atgagttttatacccgttgccgaggactctgactttcctatacacaacctaccgtatggggtcttcagtacccggggcgatccaagaccaagaattggagtggcgatcggcgatcaaatcctggacttatcaataataaagcatcttttcaccggaccggtgctgagcaaacaccaggatgtcttcaatcagcccaccctcaactcgttcatggggctcgggcaggcagcttggaaagaagcccgcgtctttctccagaatctcttgtccgttagtcaggcgagactgcgcgatgatactgagctcagaaagtgcgcctttatctcccaagcttctgctacgatgcatttgcctgccacaataggggactatacggacttctactcttcccgtcagcacgccaccaatgtcggcatcatgttcagagataaagagaacgccctaatgcccaattggctgcatctcccagtcggctatcatgggagagcatcgagcgtggtagtcagcggaacccccatccggagacctatgggccagatgaaacccgacgatagcaagcctcccgtgtacggagcctgcaaattgttggacatggagctggaaatggcattcttcgtcggacctggtaaccgcctgggagaacccattcctatttcaaaggctcatgagcatatcttcggtatggtcctgatgaatgactggagcgctagggatattcaaaaatgggagtatgtgcccctggggccttttctgggaaagtccttcggaaccaccgtatctccttgggtagtgcctatggacgccctaatgccgttcgcagtgcccaatcctaaacaggatccccgacctctcccttatctgtgccacgacgagccttatactttcgacatcaacttaagcgttaacctcaaaggagagggaatgtcccaagcagcgacaatctgcaaatccaatttcaagtacatgtactggacgatgctgcagcaacttacccaccattcagtgaatggctgcaacctgcggccgggcgacctgctggctagcgggactatcagcggacccgaaccggaaaatttcgggagcatgctggaattgtcgtggaaggggaccaaaccgatcgatctaggcaatggccagaccaggaaattcctgctcgacggggacgaggtcattataactggatattgccagggtgacggctaccgaattggatttgggcagtgcgccggtaaggtcctgcccgctctgctgccatca

SEQ ID NO: 2818 - DNA, 1257 bp, Artificial Sequence
  derived and/or modified sequence
atgtcgtttattccagtggccgaggatagcgatttcccaattcacaatctgccttacggggttttctccacacgcggcgatccacgacccagaattggggtcgccattggcgaccagatcttggatttgtcaatcattaaacatctgttcactggacctgtgctgtcgaagcatcaagatgtgtttaaccagccgaccttgaactccttcatgggcctgggccaggccgcctggaaagaagcccgggtgtttctacagaatctactgagtgtctcgcaggcccggcttagagacgacactgaactgaggaagtgcgcttttatttctcaagcgtctgcaacgatgcacctgcctgccaccatcggagattacacggacttctatagttcccgtcagcacgcaacgaatgtagggattatgttccgcgataaagagaatgcactgatgccgaactggctgcatctcccggtgggataccatggccgggcctcttcggtggtcgtgtcaggtactccgattcgtcgcccgatgggtcagatgaagcctgacgacagcaaaccacccgtatacggagcttgcaaattactcgatatggaacttgaaatggcttttttcgtcggaccaggtaatcggctcggggaacctatccctatttctaaggcacatgagcacattttcgggatggtccttatgaatgactggtctgctcgggacattcaaaaatgggagtatgtccccctcggccctttcttaggaaaatcattcgggacaaccgtctctccctgggtagtgccaatggatgcccttatgccattcgcagtgcctaaccctaagcaagacccgaggcccctgccatacctttgtcacgatgagccatatacattcgacattaatctgtccgttaacctcaaaggagaggggatgagtcaggcagcaaccatttgcaagagcaactttaagtatatgtattggaccatgctccagcagctgacccaccacagcgtgaacggctgcaacttgcgccctggtgatctcctcgcatcggggacgatctctggccctgaacccgagaattttgggtcaatgctggagttgagctggaaggggaccaagcccattgacctgggcaacggacagacgagaaaatttttgctggacggcgatgaggtgattattacaggatactgtcagggagatggttataggatcggcttcggtcagtgcgccggcaaagtgctcccggcacttcttccatcg

SEQ ID NO: 2819 - DNA, 1257 bp, Artificial Sequence
  derived and/or modified sequence
atgagctttatacccgtcgccgaagatagcgattttcccatccacaacttaccgtacggggtgttttctactcgaggagatcccagaccgagaatcggcgtcgcaattggagaccagattctcgatctttcaattatcaagcatctgtttactggcccggttctgtccaaacatcaggatgtgtttaaccagccgacactgaacagtttcatgggcctaggccaagctgcctggaaggaagcaagagtttttctgcagaatctgcttagcgtttcccaggcccgattgcgggatgacactgagctgagaaagtgcgcttttatttctcaagccagtgccactatgcacttacccgccaccatcggggattacactgatttctacagttctcggcagcacgctacaaacgtcgggattatgttccgagataaggaaaacgctttgatgcctaattggcttcaccttccagtgggatatcatggccgcgcctctagcgtggtcgtgagcggcacgcccatacggcggccaatgggccagatgaagcccgatgacagcaagcccccagtttacggagcctgtaaattgcttgatatggaactcgagatggctttcttcgttggccccggaaaccgcctcggtgagcccatcccaatctcgaaggctcacgaacacatcttcgggatggtactgatgaatgactggtctgcccgagatatacagaaatgggaatatgtgcctctcggcccattcctgggaaagtcgttcgggactacagtgagcccatgggtggttcctatggatgccctgatgccatttgctgtgcctaatccgaagcaggatccccgcccactcccttatctgtgtcacgatgaaccctatacgttcgacattaatctgagcgttaatctgaaaggtgaaggcatgtcacaggctgccactatttgtaagtccaacttcaaatacatgtattggacaatgctccagcagctgacacaccacagtgtaaatggttgcaacctgcgtccaggtgacctgctggcatctggcacaattagcggacctgaaccagagaacttcggaagcatgttggagttatcttggaagggaactaaacctatcgatctgggcaacggacagactaggaagtttctcctggatggggacgaagttattatcacaggctattgccagggcgacggctatagaatcggctttggccagtgcgctggtaaggtactaccggctttacttcccagc

SEQ ID NO: 2820 - DNA, 1257 bp, Artificial Sequence
  derived and/or modified sequence
atgtcattcatccctgtggccgaggattccgattttcccatccacaatctgccatacggggtgttctcaacgcggggagatcctaggccacgaattggcgtggctattggcgatcagattcttgacctcagcataatcaaacatctatttacggggccagtgctgagcaaacatcaggacgtgtttaaccagcctactttgaactcatttatgggtcttggacaggccgcctggaaagaagctagagttttccttcaaaacttgctctccgtttcccaagctcggctacgcgacgacaccgaactgagaaagtgcgctttcataagccaggctagcgctaccatgcatctgccggcgactattggtgattatacggacttctatagctctcgccagcacgcgactaacgtgggaatcatgttcagggataaggaaaacgcgttgatgccaaattggctacacttgccggtaggttatcacggccgagccagctcagtcgtcgtgtctggaacccccatccgaaggcccatggggcagatgaaacccgatgatagcaagcctcccgtctatggcgcctgtaagttgctggatatggaattggaaatggccttctttgttgggcccgggaatcgacttggtgagcctatccctatcagtaaggcccacgagcacatattcggcatggtgctgatgaatgattggagtgccagggacattcagaagtgggagtacgtgccactgggcccattcctcgggaagtcgttcgggaccactgtgagcccctgggttgtcccaatggatgcactgatgcccttcgcggtacctaatccaaagcaggacccgcgccccctgccttacctttgtcacgacgagccctatactttcgatattaatctgtctgtcaacctcaagggcgagggtatgagccaagcggctactatctgtaaatcgaattttaaatacatgtattggaccatgctccaacagctgacacaccactcagttaatgggtgcaacctgagacccggggacctgctggcctctggcactatatccggccccgaaccggaaaattttggcagcatgttagagctgagctggaaggggaccaagcctatcgatcttggcaatggacagacaaggaagttcttgctggacggggatgaagtcataatcaccggctactgtcagggtgacggttatcgtatcggttttggacagtgcgcaggtaaagttttaccagcgctgctacccagc

SEQ ID NO: 2821 - DNA, 1257 bp, Artificial Sequence
  derived and/or modified sequence
atgtccttcattcccgtggcagaagactccgattttccaatccacaatttgccttatggcgttttcagcacgaggggtgaccctagacctagaattggcgtcgctatcggtgaccaaatcttggatttgagcatcattaaacacttgttcactggcccagtgctttccaagcaccaagatgttttcaatcagccgactctgaactcttttatgggcctgggacaggcggcgtggaaagaggccagggtatttcttcagaatctgctgagtgtatctcaggctaggctgcgcgatgacaccgaattgcgcaagtgtgcgttcatttcacaagccagcgctaccatgcaccttcctgccaccatcggcgactatactgatttttacagctccaggcaacacgctacgaatgtgggaatcatgtttagggacaaggaaaacgcccttatgccaaattggctccatcttccagtcggatatcatggcagagcctcttccgtagtggtatccggcactccaatccgcaggcctatgggccagatgaaacctgatgattccaagcccccggtatatggcgcctgcaagttgctggatatggaactcgaaatggcatttttcgtcggccccggtaataggctcggcgagcctatccctatttctaaggctcacgagcatatttttggcatggttctgatgaacgattggagtgcacgcgacatccagaagtgggaatacgtcccattgggcccctttcttggcaaaagtttcggtactaccgtgtcaccctgggtggtcccaatggacgctcttatgcccttcgctgtaccaaacccaaagcaggaccctagaccgttgccttacctctgccatgacgagccgtacaccttcgacattaatttgtctgtcaacctgaaaggagaaggaatgtcccaggcggctactatttgtaagagcaacttcaagtacatgtattggacaatgctgcagcaactgacacaccatagtgtcaacggttgtaatctgaggccaggcgatctcttggcttcaggcactatcagtggtccagaaccagagaactttggttctatgctggagctgtcttggaagggaactaagcctattgatctgggtaatggacaaacaaggaagtttctcttggatggtgacgaggtgataatcaccggctattgccaaggcgacggctacagaatcggtttcggtcaatgcgctggtaaggtgttgcccgcgctgctcccgagc

SEQ ID NO: 2822 - DNA, 1257 bp, Artificial Sequence
  derived and/or modified sequence
atgtccttcattcccgtcgccgaggactccgacttccccatccataatctaccttacggcgtgttcagtacaagaggcgacccaaggcccagaatcggggtggccataggcgaccaaatactggatctgagcattataaaacatttattcactggacctgtgctgtccaagcaccaggacgtcttcaaccaaccaaccctaaattcctttatgggtctgggacaggctgcatggaaagaagcacgcgtcttcctgcagaacctcctctcagtgagtcaggctcggctgcgtgatgacactgaattaagaaagtgtgcctttataagtcaagctagtgctaccatgcacctcccagccaccataggtgactataccgacttctattccagccggcagcacgctacaaacgtgggcattatgtttcgcgacaaggaaaacgctctgatgccaaattggctgcatcttcccgtgggctatcacggcagggcaagctctgtggttgtcagcgggacccccattcgcaggcctatgggccagatgaagcctgacgacagcaagccccccgtgtatggcgcatgcaaactactggatatggaactagagatggctttcttcgtcggcccagggaacagactgggtgaacctattcctattagtaaggctcacgagcacatcttcggcatggttctaatgaacgactggtctgcacgtgacattcaaaagtgggaatacgtccctctcggccccttccttggcaagtcattcggcacaactgtgtccccctgggttgtccccatggacgcactcatgccattcgccgtgcctaatcctaaacaggatccaaggccactgccttacctgtgtcacgacgaaccctatacttttgacataaacctctctgttaatctgaagggcgaggggatgtcccaggccgctaccatctgcaagtcaaatttcaaatatatgtattggacaatgctgcaacagctaacccatcattccgtgaacggctgcaacctaaggcccggcgatctgctggcctctggcacaatttccggaccagagcccgagaacttcggcagtatgctggaattgtcttggaaaggcactaaacctatagaccttggcaatgggcagaccaggaaatttctcctggatggggacgaagttataatcaccgggtattgccaaggggatgggtatcggatcgggtttgggcagtgtgcagggaaggtgctgcccgccctgctaccctca

SEQ ID NO: 2823 - DNA, 1257 bp, Artificial Sequence
  derived and/or modified sequence
atgtccttcatccccgtggcagaggacagcgatttcccgatccacaacctcccttacggagtgttcagcacacgaggggatccgaggcctagaattggggtggccatcggggaccaaatcctggatctgtccatcataaagcatctgttcactggcccagtgctgtccaaacatcaggacgttttcaatcagccaactttaaattccttcatgggcctgggtcaagcagcgtggaaggaggcaagggtgttcttacagaatttgctctctgtgtctcaggcccggcttcgagacgacacagagctacgtaagtgcgctttcatctcccaggccagcgctaccatgcacttgcctgcaactatcggcgattacactgacttctattcctcacgccagcacgccactaacgtgggcattatgtttcgggataaagagaacgcattgatgccgaactggctgcacctgccagtgggttatcatggccgagctagttccgtggttgtctcagggacgcctattagacgaccaatgggacagatgaaaccggacgactcaaagcccccagtgtatggagcctgcaaactcttggacatggaactggagatggcctttttcgtgggccccggcaatagactgggagaacccattcccatctccaaggctcacgaacatatattcggtatggttctgatgaatgactggagcgcccgggacattcagaagtgggagtatgtccccctcggaccctttttggggaaaagtttcgggaccacagtctctccttgggtggtccctatggacgctcttatgccattcgcagtgcccaacccgaagcaggatccgcggcccctgccctatctttgccacgacgagccttacacattcgacattaatctttcagttaatctcaaaggagagggtatgtcgcaggcagccaccatttgcaagtccaatttcaaatacatgtactggactatgcttcaacagctgacacaccacagtgtgaatggctgcaatctgcgcccaggagaccttcttgccagcggtactatctcaggacccgaaccagaaaacttcgggagtatgctagaattgagctggaagggcacaaagccaatcgatctcgggaatgggcaaacacgaaagtttcttctcgatggagacgaagtaattattactggttattgccagggggatggataccggattggattcggtcagtgtgctggaaaggtccttcctgccctgctcccttct

SEQ ID NO: 2824 - DNA, 1257 bp, Artificial Sequence
  derived and/or modified sequence
atgagctttataccagtggccgaagactctgattttccgatccataacctcccgtatggagtttttagtactcggggagatcccaggccgcgaataggagttgctatcggtgatcaaatcttggatttatcaattataaagcacctgtttaccggaccggttttaagtaaacatcaggatgttttcaatcagccaactctgaatagctttatgggattgggacaggcagcatggaaggaagctcgggttttccttcagaaccttttgtcagttagtcaagcccgacttagagatgatacagagctccgaaagtgtgcgtttatctcgcaagcatcagccaccatgcacctcccggctacgataggtgattatacggatttctatagttcgcgtcaacatgccactaatgtgggaatcatgtttcgagacaaggaaaacgctttgatgccaaattggttgcacctaccggtcggttaccatggacgagcttcatctgtggtggtgtccggcacaccaatcaggcgcccgatgggtcagatgaagccagacgactctaagccccctgtttatggagcatgtaagctcctagatatggaattggagatggcattctttgtcggaccaggaaatcggttgggcgaaccgattccaatttcaaaggcccatgagcatatttttggaatggttcttatgaacgattggtcagctcgtgatatccagaaatgggagtacgttcctctcggacctttcttgggaaagtcctttggaactacggtttcaccgtgggtggtaccaatggatgctctcatgccgtttgcagttcctaatccaaagcaagatccgagacctcttccttacttgtgtcacgatgagccatacacgttcgacattaatcttagtgtgaacttgaagggtgaagggatgtcccaagcggcaacaatttgcaaaagtaattttaaatatatgtactggacgatgctccaacagctgacccatcattcggttaacggttgtaatttacgccctggagatctgcttgcgtccggaactataagcggaccagaacctgagaactttggatcaatgcttgaactgagctggaaaggaaccaagccaattgatctgggaaatggacaaactcggaaatttttattagacggagatgaagttattataactggatattgccagggagatggctaccgtatcggatttggtcaatgtgccggaaaggtactaccggctctgttgccatcc

SEQ ID NO: 2825 - DNA, 1257 bp, Artificial Sequence
  derived and/or modified sequence
atgtctttcattccagtggcggaagactccgactttcctatccacaacctgccctacggagtgttctccaccagaggggaccccaggccccggatcggagtggctatcggcgaccagatccttgatctctctataatcaagcatctattcacaggacccgtgctgtccaagcatcaggatgtgttcaaccagcctaccttgaacagcttcatgggcctcggccaagctgcttggaaagaggcgcgggtgtttttgcagaatctcttgagcgtgtctcaagcacgacttagagacgataccgagttacgcaaatgcgcatttatcagtcaggcctccgcaaccatgcatctgcctgccacaatcggagactatactgatttctactcctccaggcagcatgctacaaacgttggaatcatgttccgcgataaagagaatgcgctcatgccgaattggctccaccttcctgtggggtatcatggacgggccagtagcgtcgtcgtgtcaggaaccccaattcggcgacctatggggcagatgaaaccggacgactccaagccccccgtatacggggcatgcaagctccttgacatggagcttgaaatggcattctttgttgggccgggcaatcgcctaggggagcccatcccaatcagcaaggcccacgagcacattttcggaatggtcctgatgaatgactggagcgctcgggacatccagaagtgggagtacgtgccccttggtccattcctggggaagagcttcggcaccacagtgagcccctgggttgtacccatggacgctctgatgcccttcgccgtccccaatcccaagcaggatcccagacctctcccctacctctgccacgatgagccttataccttcgacattaacctcagcgtcaatctcaagggggagggcatgtcacaggccgctaccatttgtaagagcaactttaagtacatgtactggacaatgcttcagcagctgacccaccacagcgtgaatggatgcaatctccggccaggcgacctgctcgcaagtggtacaatcagtggccctgagccagagaacttcgggtccatgctggaactgagctggaaaggaacaaagcctattgatcttgggaacggccagactcggaagttcctgctcgacggcgacgaagtgataatcaccgggtactgccaaggtgacgggtacaggattgggtttggacagtgcgctgggaaggttctacctgcgcttttaccttca

SEQ ID NO: 2826 - DNA, 1257 bp, Artificial Sequence
  derived and/or modified sequence
atgtcatttattccagtagccgaagattcagattttccaattcataatttaccatatggtgttttcagtacaaggggagatcctagaccaagaattggagttgcaattggagaccaaattttggacttatctattatcaaacatctttttacaggtccagttttatctaaacatcaagatgtatttaatcaacctacattaaattcatttatgggacttggacaagcagcatggaaagaagctagagtatttcttcaaaatttactttcagtatcccaagctagattaagagatgatactgaattaagaaagtgtgcatttatttctcaagcttccgcaacaatgcatttacctgctacaattggtgattatacagatttttattcatctcgtcaacacgctacaaatgttggaattatgtttagagataaagaaaatgcattaatgccaaattggcttcacttaccagttggatatcacgggagagcttcttctgtcgtagttagtggtacaccaattagaagaccaatgggacaaatgaaaccagatgatagtaaaccaccagtctatggagcttgtaaacttttagatatggaacttgaaatggccttttttgttggacctggtaatcgtctaggtgaaccaattccaattagtaaagcacatgaacatatttttggaatggttttaatgaatgattggtctgctagagatattcaaaaatgggaatatgttccacttgggccatttcttggaaaatcctttggaacaactgttagtccatgggttgttccaatggatgctcttatgccatttgctgttccaaaccctaaacaagatccaagaccacttccttatctttgtcatgacgaaccttatacgttcgatattaatttatcagttaaccttaaaggtgaaggaatgtcacaagcagctacaatatgtaagtcaaattttaaatatatgtattggacaatgcttcaacaattaactcaccacagcgttaatggatgtaaccttagaccaggagatcttttagcttctggaacgatttcaggacctgaaccagaaaattttggttccatgttagaactttcttggaaaggaactaagccaatagatttaggtaatggtcaaacaagaaaatttcttttagatggagatgaagttataataactggatattgtcaaggagacggatatagaattggatttggacaatgtgctggaaaggtacttcctgctcttttaccatca

SEQ ID NO: 2827 - DNA, 1257 bp, Artificial Sequence
  derived and/or modified sequence
atgtctttcattccagtagctgaggattctgacttccctatacataatctcccctacggtgtcttctctacacgaggcgatccaagaccccggatcggggttgccataggggatcagatcctggatcttagtatcataaagcacctttttacaggacccgtgctgtctaaacatcaggatgtctttaatcagcctacactgaacagttttatggggctcgggcaggccgcctggaaagaagcacgggtgttcctgcagaatctgctgtccgtcagccaggctaggctgagagacgacacagagttaaggaagtgtgcatttatctctcaggcctccgccaccatgcatcttcctgccactattggagactacactgatttctattcttctcgccagcacgctacgaatgtggggatcatgtttcgtgacaaggagaacgctttgatgcctaattggctgcacctccccgtgggctatcacggccgggcctcttcagtcgtagtctccggtaccccaatcagaaggccgatgggccaaatgaagccagacgacagtaagccgccggtgtacggggcttgtaagctcttagatatggagctggaaatggccttttttgtcggacccggaaatcgactgggggaacccattcccattagcaaggcccacgaacacattttcgggatggttctgatgaatgattggtccgctcgagacattcagaagtgggagtacgtgccactcggacctttcttgggtaaatcgttcggcactacagtgtccccttgggtggtccctatggatgccctcatgccattcgcggtgcccaaccccaaacaggatcccagacctctgccctatctctgccacgacgagccttacactttcgacattaatctctctgtgaacttaaaaggagaaggaatgagccaggctgccactatttgcaaatcaaactttaagtacatgtattggaccatgctgcagcagctgactcatcatagtgtgaacgggtgcaatctgcgaccaggggacctcctggcgtccggcaccatctccgggcccgaacccgaaaatttcggttcaatgctggaactctcgtggaagggtacaaagcctattgacttgggaaatggacagactcgcaagttcctgctggacggagacgaagttataataacagggtattgccagggtgatggctaccggatcgggttcggacaatgtgcgggcaaggtgctgcctgctctgctgccttcc

SEQ ID NO: 2828 - DNA, 1257 bp, Artificial Sequence
  derived and/or modified sequence
atgtctttcattcccgtggccgaagactctgattttccaatccacaatctgccttatggcgtattcagtacaaggggtgatcccagaccacggattggggtcgctatcggggaccagattttggacctttcaattattaagcacctcttcacgggccctgtcctgtctaagcatcaggatgtcttcaaccagcctactttgaattcctttatgggactggggcaggcagcatggaaggaagctcgcgtctttctgcaaaacctcctgtctgtgtcccaggcgaggctgagagacgataccgaactgaggaaatgtgctttcataagtcaggcctccgcaacgatgcatcttcctgccaccattggagactataccgatttttactctagtcgacaacacgctaccaatgtgggcataatgttccgagacaaagaaaatgcccttatgccaaattggctgcacctccccgtggggtaccacggccgagcctcttctgtcgtggtttcaggcactccgattcgccgcccaatggggcagatgaagcccgacgattccaaaccccctgtgtatggtgcctgtaagctgttggacatggagctggagatggcctttttcgtgggccctggcaatcggctcggggagcctatccccatctcaaaagcccacgaacatatttttggaatggtgctgatgaacgactggtccgctagagacattcagaaatgggagtatgttccacttgggccctttttggggaagtccttcggaaccacggtcagtccctgggtggtccccatggatgcgctgatgccctttgccgtgcccaaccccaagcaggacccaagaccgctcccctacctgtgccacgacgaaccctacacatttgacattaatctgagcgtgaacttgaaaggggaaggcatgagtcaggctgctacgatttgcaagtccaattttaagtacatgtactggacaatgctgcagcagctgacccaccatagtgtgaacggatgcaatttgcggccaggcgacttgttggcgagcgggacaatttctggcccagagccagagaatttcggctctatgctggagctgtcttggaaaggaacaaaacctatcgatctggggaacggccagactcgaaagttcctgttggacggggatgaggtgattatcacgggctattgccagggcgacggctatagaatcggcttcggccagtgtgccggaaaagtacttcccgcactcctcccatct

SEQ ID NO: 2829 - DNA, 1257 bp, Artificial Sequence
  derived and/or modified sequence
atgtctttcatccccgtagctgaggacagcgacttccccatacacaatctgccgtatggggtgttctccactcgtggcgacccccggccgagaattggcgttgccattggcgaccagatcctggacctcagcatcattaagcacctgttcacagggccagtgttgagtaaacaccaagatgtgttcaatcagcctacgctcaactctttcatggggctcggccaggccgcctggaaggaagcccgtgtgttcctccaaaaccttctcagtgttagccaggcccgtcttcgagacgatactgagttgcggaagtgcgcttttatttctcaggcctctgcgacgatgcacttgcccgctaccatcggggactatactgacttttatagctctagacagcacgcgactaacgtcggaattatgttccgcgacaaggagaacgccctcatgccaaactggctacacttacccgttgggtatcacggaagggcatcgtctgttgtggtaagcgggactccaatcaggcgccctatgggacaaatgaagcctgacgactctaagcctcctgtatatggtgcttgtaaattgctcgatatggaacttgagatggccttctttgtcggccctggcaataggctgggtgagccgataccgatcagtaaagcccatgaacatatattcgggatggtgctaatgaacgactggtccgcacgcgatatccagaagtgggagtatgtccccctcgggcccttcttgggaaaatcctttggtactaccgtctcaccatgggttgtgcctatggatgccctcatgccattcgcagtgcccaatcccaagcaagatccgcgcccattgccatacctttgccacgatgagccgtacacatttgatattaacctatcagtcaatctgaagggcgaaggcatgagccaggcggctacaatctgcaaatctaattttaaatatatgtactggactatgctgcagcagctcactcaccattccgtgaatgggtgcaatttacgacctggagacctccttgcatccggcactattagcggacccgaaccagaaaactttggaagtatgttggagttgtcatggaagggtacaaagccgatcgacctgggtaacggacagactcgcaaattcctgctcgacggggacgaggtgataataacgggttactgccagggcgatgggtacaggattggattcggacaatgtgcaggaaaagttttacctgccctgttgccgtct

SEQ ID NO: 2830 - DNA, 1257 bp, Artificial Sequence
  derived and/or modified sequence
atgtcctttatacctgttgccgaagattctgacttcccaatccataacctcccatatggggtgttctctacaagaggtgatccaaggccaaggatcggtgtagcaattggggaccagatactggatctctcaattattaagcacttgttcaccggaccagtcctgtctaagcaccaggatgtattcaaccagccaaccttgaactctttcatggggctgggacaggccgcttggaaagaggccagagtcttccttcagaacctgctgagtgtgtcacaagctcggctccgagatgatacagagcttaggaagtgtgcctttattagccaggcatccgcaaccatgcacctgccagcaactattggcgattatacggatttctactcatctcgccaacatgcaacaaacgttggcattatgttcagggataaagagaatgcattaatgcccaattggttgcacttacccgtgggctatcacggccgcgcctccagcgtggttgtgagcggtacaccaattcgccggcccatgggccaaatgaaaccagacgactcaaagccgccggtgtacggcgcctgtaaactgctggatatggaactggagatggctttttttgtgggccccggcaatcgcttaggcgagccaatacccattagcaaggcccacgagcacatcttcggaatggtcctgatgaatgactggagtgcaagggacatccagaagtgggaatatgtgcccttagggcctttcttagggaagtccttcggcacaaccgtgtccccttgggtggttcctatggatgccctcatgccattcgccgtgcccaaccccaaacaggatccacggcccttgccctacctctgccatgacgaaccctatacgtttgatatcaacctgtcggttaacctgaaaggcgaaggcatgagtcaggctgccaccatctgtaaaagtaattttaagtacatgtactggaccatgctgcagcagctgacccaccactccgttaatggttgcaatctccgccccggggatcttcttgccagcggcaccatcagcggaccggagcccgaaaactttggttctatgttagagctcagctggaagggcacaaaacctattgatctcggaaacggccaaacacggaagtttttgctggacggtgatgaagtgataataacagggtactgccagggggacggctataggatcgggttcgggcagtgtgccggaaaagtgttaccggcccttctgccgtcc

SEQ ID NO: 2831 - DNA, 1257 bp, Artificial Sequence
  derived and/or modified sequence
atgagcttcatcccggttgcggaggattctgacttcccaatccataatctgccttatggcgttttcagcacgaggggcgatccaaggcccaggattggtgttgctatcggagaccagatcctggatctcagtataattaaacacctgttcacgggtccggtcctcagcaaacaccaagatgtgtttaaccagccgacactcaactcgttcatgggactgggtcaagcggcatggaaggaggcgcgcgttttcttgcagaatctccttagcgtatcacaggcccgcttgcgggatgacactgaactccgcaaatgtgctttcataagccaggcatccgcaacaatgcatcttccggcgacaattggagactatacagatttttatagctcacgtcaacacgcaacgaatgtgggcatcatgtttcgagacaaggaaaatgccctgatgcctaattggcttcacctgcccgtgggctaccacggcagagcgagcagtgtggtggtctccgggacccccattcgaaggcctatggggcagatgaagcctgatgattcaaagccccccgtctatggagcatgcaaactcctggatatggagttagaaatggccttcttcgtcggtcccggaaatcgcctcggcgaacccatacctatttcgaaggcccacgaacacatattcggcatggtattgatgaatgactggtcggcccgcgacatccagaagtgggagtatgtcccactggggccttttctaggaaaatccttcggaaccacggtttcaccctgggtggtccctatggacgctctcatgccattcgccgtaccaaatcccaagcaggatccccgacctctcccatacctttgtcatgacgaaccctataccttcgatattaacctttctgtaaatctaaagggtgagggcatgtcgcaagccgccacaatttgcaagtccaattttaagtatatgtactggaccatgttacagcaactcactcatcattccgtgaatggatgcaatttacggccaggggacctcctggcatccggaacaattagtggacctgagcctgagaactttggtagtatgctcgagctgtcatggaaaggcactaagcctatcgatcttggtaacggtcagacccggaaatttctgctcgacggggacgaagtcattatcactggatactgccagggcgacggatatcgcattgggttcggtcagtgcgcaggaaaggtattgccagctcttttaccaagc

SEQ ID NO: 2832 - DNA, 1257 bp, Artificial Sequence
  derived and/or modified sequence
atgagcttcatccctgtggccgaggactctgactttccgatccataacctgccctacggggtgttctctacacgcggggatccgcgccctcggattggggtggcaattggtgatcagatcctggatcttagcatcatcaagcacttgttcactggccccgtgctatctaagcaccaggatgtcttcaatcagccaacactcaattccttcatgggattaggacaggccgcgtggaaagaggccagagtttttctgcagaatctcctgagtgtctcgcaggctagattaagagacgacacagagctgagaaagtgtgctttcatctctcaggcctctgcaaccatgcatcttccagcaacaatcggagactacacggacttttactcaagtagacaacatgccacaaatgttggaattatgttccgggacaaggagaacgctcttatgcctaactggctgcacctgccagttggttatcacgggagagcctctagtgttgtcgtctccggcacaccaatcagacgtcctatgggccagatgaaacccgacgactctaagcctccggtgtacggggcctgcaaactcctggacatggagctggagatggccttctttgtcggccccggcaaccggctcggtgaacctatccccatcagtaaagctcacgagcacatcttcggtatggtcctcatgaatgactggtcagcccgcgacattcagaaatgggagtatgttccgctgggacctttcctaggtaagtcttttggtactaccgttagtccgtgggtcgtgccgatggatgccctaatgccattcgctgtgcccaacccaaagcaggacccacgcccgctcccgtatctgtgccatgacgaaccatacacattcgacattaatttatccgttaatctcaagggtgaggggatgtcacaggcggcaacaatctgcaaaagcaattttaaatatatgtattggaccatgctccagcagctgacacaccattctgttaatggttgcaatctaaggcctggtgacctgctcgcgtctggcacaattagcggacctgagcccgagaatttcgggtctatgctagaactgtcctggaagggcacaaagccaatcgacttggggaatgggcagacacggaagtttctgctggacggagatgaagtgatcattaccggctactgtcaaggagacggctaccggatcggatttgggcagtgcgcagggaaggtcctgccagcactgttgccctca

SEQ ID NO: 2833 - DNA, 1257 bp, Artificial Sequence
  derived and/or modified sequence
atgtcatttatacccgtggctgaagactccgactttcctatccataatctgccgtacggggtcttctctactcgtggagatcctcgcccccgcattggggtggcaatcggcgaccagatacttgatctgagtattattaaacatctcttcacaggccctgtcctttctaaacaccaggacgttttcaaccagccaacactcaacagcttcatgggtttagggcaggctgcttggaaagaagcccgtgtgttcttgcaaaacctcctgagtgtatcccaggcgagactgagggatgatactgaacttagaaaatgtgcattcatcagccaggcctctgccaccatgcacctgccggcgacaattggcgattataccgatttttactcatctagacaacacgccacgaatgtggggatcatgttccgggacaaggaaaatgccctgatgcccaattggctgcatctgccggttgggtaccatggtcgggcttcgagcgtggtagtgtcaggcacgccgatccgacggcctatggggcaaatgaaaccagatgattctaaaccgccggtctatggggcttgcaaactgctggacatggaactagagatggccttcttcgtaggcccagggaatagattaggagagcctatcccaataagcaaggcacacgagcacatttttggcatggtactgatgaacgactggtccgccagagacatacagaagtgggaatatgtacccttagggccctttctcggaaaatcctttgggactacggtgtctccttgggtggtacctatggacgccctcatgccgtttgcagtgccaaaccctaagcaggatcccagacccctcccatacttatgccatgatgaaccctacaccttcgacatcaacctgtccgtaaacttgaaaggagaaggcatgtctcaggcagctacaatttgcaaaagtaacttcaagtatatgtattggacaatgcttcagcagttgacacatcactcagtcaatgggtgtaatctccgccctggagacctacttgcgtcaggcacaatttcagggcctgagcccgagaatttcggctctatgctggaactgtcttggaagggcacaaaaccgatagacctggggaatggccaaacaagaaagttccttctggacggggatgaagttattattaccggctattgtcaaggagatggctaccgtattggatttggccaatgcgccggcaaggtgctgcctgcactactgccctca

SEQ ID NO: 2834 - DNA, 1257 bp, Artificial Sequence
  derived and/or modified sequence
atgtcttttatcccggtcgctgaggatagcgacttcccaatccataatttgccatatggcgtattttctacacgtggcgacccgcgcccaaggatcggcgtcgccataggggaccagattttggatctttcaattattaagcacctctttacgggcccggttctgtcgaagcatcaagatgtattcaatcagcctacactgaatagtttcatgggactcggtcaggctgcatggaaagaagcccgcgtttttttacagaatctgctgagcgtttctcaggcgaggttacgtgatgacacggagctgcggaaatgcgcattcattagtcaggcgtcagcgactatgcacctcccggcaactatcggagattacacagacttttattcttcacgtcagcatgctacgaatgttggtatcatgtttagagataaggaaaatgcgttaatgccgaactggcttcatctaccggttgggtatcatgggagggcatctagcgtcgtagttagcggtactcctatacgccggcctatggggcaaatgaagcccgatgattctaaaccgccggtctatggcgcttgcaaattacttgatatggaactggagatggcattttttgttggtccaggcaaccgcctgggcgaaccgatccctatatccaaagcgcacgagcatatttttggcatggttctaatgaatgactggtctgctcgggacattcaaaaatgggaatacgtgccgctcggcccttttttaggaaagagctttggcacaaccgtctcgccatgggttgtgcccatggatgctcttatgccgttcgccgtgccgaatccgaaacaagaccctaggccgttaccgtatttatgccatgacgaaccttatacgtttgacatcaatcttagcgttaatctaaaaggagaagggatgtcacaggcagcgacaatctgcaaaagcaattttaagtatatgtattggacaatgcttcagcagttgacacatcactcggtgaatggatgcaatcttcgtcctggggatctcctagcatcaggtacaatttcaggcccggagcctgaaaacttcgggagcatgctggaactttcttggaaaggcaccaaaccaattgacttaggcaacggtcaaacacgtaaatttctgttagatggcgatgaagttattattactggttattgccagggtgatggatataggattggctttgggcaatgtgcaggaaaagttctgccggcgctgttaccgtca

SEQ ID NO: 2835 - DNA, 1257 bp, Artificial Sequence
  derived and/or modified sequence
atgtctttcatccctgtagccgaagattccgatttcccaatccataatctgccttatggggttttcagtacacgcggggatccccggcctcgcattggggtggctataggggaccagattctcgatttgtcaattataaaacatctctttactggaccagtcctaagtaaacaccaggatgtatttaaccagcccactctcaactctttcatggggctaggacaggccgcctggaaagaggcaagggtgttcctccagaatctccttagtgtgtcccaggcaaggctccgagatgatacagaactgcgaaaatgtgcattcatatcccaggcctctgcgactatgcaccttccagccactatcggagattatacagatttctatagttcacgacagcacgctactaatgtgggaatcatgttcagggacaaagaaaatgctctcatgccaaactggttacacctacccgtcgggtatcatgggcgggccagttctgtggtggtttctgggactcctataaggaggccaatggggcagatgaaacctgatgattctaaacctcccgtttatggagcctgcaagctgctggatatggaacttgaaatggcttttttcgtcggacccgggaacagacttggagaacctattccaatctctaaagctcacgaacacattttcggaatggtacttatgaacgactggtcagctcgggatattcagaagtgggaatacgtcccacttggaccttttctaggaaagtctttcgggacaacagtgtctccttgggtagtgcccatggatgcattaatgcctttcgcggtacctaaccctaaacaggatccccgccccttgccatacctttgccacgatgaaccttatactttcgatatcaatctctctgttaacctcaaaggagaagggatgagtcaagctgctacaatctgtaaatcaaatttcaaatatatgtattggactatgctccagcagttaactcaccactctgtgaatgggtgtaatttgcggcctggggatctgcttgcatctggaactatctcaggacccgaacctgaaaattttggatctatgctggaactttcctggaaagggacaaaacctatcgatcttgggaacgggcagactagaaaattccttctagacggagatgaagtcataatcacaggatattgccagggggatgggtatagaattggattcggacagtgcgccggaaaggtgctccccgcccttctgccatcc

SEQ ID NO: 2836 - DNA, 1257 bp, Artificial Sequence
  derived and/or modified sequence
atgtcttttattccagttgctgaagattccgacttcccaatccataatcttccgtacggggtgttttccacccggggcgatccccgcccccggatcggcgtggctatcggagaccagatcctggacctctccattatcaaacatctgttcacaggacccgtcttaagcaagcatcaagatgtgttcaatcagccgacattgaacagtttcatggggctcggtcaggcagcttggaaggaggcaagagtatttctgcagaaccttctgtccgtgtcacaagctagactgcgggatgatacagagctcagaaaatgtgcattcatcagtcaagccagtgccacgatgcacctcccagccacaatcggagattataccgatttctacagttcacgacaacacgcgactaacgtcggcatcatgttcagggataaggagaatgccctaatgcccaactggctgcacttgcccgttgggtatcacggtagggcgtcgtcagtggtcgtatctgggactcctattagacggcccatgggtcagatgaaacctgacgactctaagccacccgtgtacggagcgtgcaaactgctggacatggagctcgaaatggcatttttcgttggacctggaaatcgactgggtgaacctatcccaatctccaaagctcatgaacatattttcggaatggtcttaatgaatgattggtccgcgcgtgatattcaaaagtgggaatatgttccactcggaccctttcttggcaaaagcttcgggacaaccgtgagtccgtgggtagtgcctatggacgccctgatgccgtttgcggtaccaaacccaaaacaggaccccaggcctctcccctatctctgtcacgacgagccatacacctttgacattaacctgtctgtgaacctgaaaggagagggaatgtcgcaggccgccactatttgcaaaagcaactttaaatacatgtattggacaatgcttcagcagctcacgcaccattcggttaatggatgtaatcttcggccaggcgacctccttgccagcggcaccatatcaggacctgagccagaaaatttcgggtcaatgctggagctgtcctggaaaggtaccaagccaattgatttggggaacgggcagacacgaaagttcctgcttgatggcgacgaagtaatcatcacagggtactgtcaaggggacgggtacagaatcggctttggacagtgcgcgggaaaagtcctgccagccctcctccctagt

SEQ ID NO: 2837 - DNA, 1257 bp, Artificial Sequence
  derived and/or modified sequence
atgagttttataccggtggccgaggactccgactttcctatccataaccttccatatggcgtgttctcaaccagaggggatccacgacctcgaatcggcgtggccatcggtgaccagatcctggacctgtccatcattaagcatctgttcacaggccctgtgctcagtaagcaccaggacgtttttaatcagccaacactcaactcgtttatgggtctaggccaggcagcctggaaggaggcccgagtctttctccagaacctgttgagcgtgtcccaagccagactcagagatgacaccgagctgaggaagtgtgcctttatatcccaggcatcagctaccatgcacctccctgcaacaattggggactacaccgacttttactcttctcgccagcatgccactaatgtgggcatcatgtttagagataaggagaatgctctgatgcctaattggctccacctccctgtgggatatcatgggcgggcctcttccgtcgtcgtcagcggcacccctatcagaagacctatgggacagatgaagccagacgattcgaaaccccccgtgtacggcgcctgtaagctacttgacatggagttagagatggccttcttcgtcggacccgggaacagactgggagaacccattccgatttccaaggcccatgagcatatttttggaatggtgctgatgaacgactggagtgccagggatatccagaagtgggagtatgtccccctgggaccctttctgggcaaaagtttcgggacaacggtgagcccctgggtggttcccatggacgctctcatgcctttcgccgtgcctaaccccaaacaggacccgcgcccactcccgtatttgtgccatgacgagccttacaccttcgacatcaatctgtcagtgaatttgaagggcgaaggaatgtcccaggccgctaccatttgcaaatctaactttaagtacatgtattggactatgctccaacagctgacacaccacagtgtgaacgggtgcaacctgcgccctggtgacctgctcgcgagcggtaccataagcggccctgagcctgagaatttcgggtcgatgctggagctttcgtggaaaggcaccaaaccaatcgatcttggcaacgggcagacgcgcaagtttctgctcgacggcgacgaagtgatcattaccgggtattgtcagggcgacggatatcgcatcgggttcggacagtgcgcaggaaaagtgttgccagctctgcttccgtca

SEQ ID NO: 2838 - DNA, 1257 bp, Artificial Sequence
  derived and/or modified sequence
atgtcctttattccagtggccgaggatagtgatttccctattcacaacctgccctacggggtcttttctacaagaggtgatcctcggccacgaataggcgtcgcaatcggtgaccagattctggacctgagcatcatcaaacacctatttacaggtcctgtgctttccaagcaccaggatgtatttaaccaacctaccctgaactcttttatgggtctggggcaagcagcgtggaaggaggctcgggtgtttctgcagaacctcctttcagtttcacaggctcggctgcgcgacgatacagagctccgaaaatgcgccttcatctcacaggcatccgcaaccatgcacctcccagcaaccattggcgactacacagacttttattcatccagacagcatgctaccaatgtgggaatcatgttcagagacaaagagaatgctctcatgccgaactggctgcaccttcctgtgggttaccacggacgcgcttccagcgtagtggtgtcaggaactccaattcgacggcccatgggccagatgaaacctgatgactctaaaccgccagtgtacggagcctgcaaactgctggatatggagctcgagatggcctttttcgtggggccggggaataggttgggcgagccgatccccatatctaaggcccacgaacatattttcggcatggtgttaatgaacgattggtccgcccgggatatacaaaaatgggagtatgtacccctcgggcctttccttgggaaatcgtttggcacgaccgtatctccctgggtggtgccaatggatgccctgatgccgttcgctgtccctaaccctaagcaggacccccggcccctaccatatctttgtcatgacgaaccttacaccttcgacattaaccttagtgtcaatctgaagggggaggggatgagccaggctgccactatttgcaagtccaattttaaatacatgtattggaccatgttgcagcaactgacacaccattccgtcaacgggtgcaacctgcgccctggagaccttttggcatctggaaccatctctggccctgaacctgaaaatttcggctcaatgctcgaactctcatggaaagggactaagcctatcgacctgggcaacggacagacaagaaaattcctgttggatggagatgaggtcattataacgggctactgccagggggatggctatcgaatcggcttcggccagtgtgctggtaaagtactgccagctttactgccctct

SEQ ID NO: 2839 - DNA, 1257 bp, Artificial Sequence
  derived and/or modified sequence
atgtcattcatacctgtcgcagaggattcggattttcccatccataacctgccttacggggttttttcaacaagaggcgatcccagaccaaggattggagtcgccattggagatcagatccttgacctgtctatcatcaagcatctgttcactggcccggtcctgagcaagcatcaggacgtgtttaaccaaccaacactgaattctttcatgggactgggccaagcagcgtggaaggaggcccgggttttcttgcagaatctactgagcgtgtcccaggccagactcagagatgacacggaactacgaaagtgtgccttcatatcacaggcttccgcaaccatgcacttgccagctacaatcggggactatacggacttttactcttcccgccagcacgctacaaacgttgggattatgttccgtgataaagagaatgcactgatgcctaactggctgcatctaccagtcggctaccatggccgggcatcgtctgtcgtagtgagtggcaccccaatccgacgcccaatgggccaaatgaagcccgacgactcaaaacccccagtatatggggcttgcaaactgctggacatggaacttgaaatggcgtttttcgtcggcccaggtaaccggctcggggagccgatcccaatctctaaagctcatgagcacatttttggcatggttctcatgaatgattggtcggctagagatatccagaaatgggaatatgtgcccttaggacccttcctaggcaaatctttcgggaccaccgtgagcccatgggtagtgccaatggacgcactcatgccattcgctgtgcctaacccaaaacaggacccgcggccgttgccctatctgtgccacgacgagccatacacattcgacattaacctctccgttaatctcaagggagaagggatgtctcaggcagccacaatttgcaaatcgaacttcaaatatatgtactggaccatgctgcagcagctaacccaccattccgtgaacggctgtaacctgcgccccggagacctgctcgcttctggtacgattagcgggcccgaacccgagaactttggttcaatgcttgagctgtcctggaagggtaccaagcctattgaccttggaaacggccaaactcgcaagtttcttctcgacggagatgaggttattatcacaggttactgtcagggagatgggtaccgcataggctttgggcagtgcgccggcaaggtcctgcccgcacttcttcccagc

SEQ ID NO: 2840 - DNA, 1257 bp, Artificial Sequence
  derived and/or modified sequence
atgtcctttatccctgtcgctgaggactctgattttccaatccataacctgccatacggggtcttctcaacccgcggtgaccctcgtcctagaataggcgtggcaatcggcgaccaaatcttggacctgagcattatcaaacatttgttcactggccccgttctgtccaaacatcaagacgtgttcaatcaacccacgctgaattcgtttatgggattaggccaggctgcgtggaaagaagcgcgcgtttttctgcaaaacctgctgtcagtttcacaagcgcgccttcgcgacgataccgaattgcggaagtgcgcgtttatcagccaggcatccgccacgatgcacctgccagcaaccattggggattacaccgacttctattctagccgccaacacgcaacgaatgtcggtattatgtttcgcgataaggaaaatgcacttatgccaaattggctgcacctgccggtgggttatcatgggcgggcgtcgagcgtggtggttagtggtaccccaatccgccgcccaatgggtcaaatgaagccggatgattcgaagccaccagtgtatggcgcatgtaagcttttggacatggaattggagatggcttttttcgtgggtcctggtaatcgtctgggtgagccgatccctattagcaaggcacacgagcatatctttggtatggtcctgatgaacgattggagcgcccgcgacattcaaaaatgggaatatgtgcctttgggaccttttttgggcaagagcttcgggactaccgtgtcaccgtgggttgttccgatggacgctctgatgcctttcgcagtgccgaacccaaaacaggatccgagaccactgccttatctgtgtcacgacgaaccctatactttcgatatcaatctgtcagtcaacctgaagggagaaggcatgagccaagctgcaacgatctgtaagagcaactttaagtacatgtattggactatgctccagcaactgacccaccatagcgtcaatgggtgcaaccttagaccgggtgacctgctggctagcgggactatctccgggccagagccagagaatttcggcagcatgctagaactgagttggaagggcaccaaaccgatcgatctgggcaacggtcagacgagaaaattcctgttagacggtgacgaggttatcattactggctattgtcaaggtgacggttatagaatcgggtttgggcagtgtgccggcaaggttctcccagctcttctcccgtca

SEQ ID NO: 2841 - DNA, 1257 bp, Artificial Sequence
  derived and/or modified sequence
atgtcatttattcccgtagccgaagattcagattttcctatccataatcttccttatggcgtgttcagcaccagaggagatccaagacctcggataggggttgcaattggggatcaaatccttgacctctctattatcaagcacctgtttacgggccccgtgctaagtaaacatcaggacgtgttcaatcagccaaccctaaattcgtttatgggcctgggccaagccgcgtggaaggaggcacgggtatttctacagaatctgctgtcagtgtctcaggctcggttgcgagacgacacagagctccgcaagtgcgcctttatcagtcaggcgtccgccacgatgcatttaccggctaccattggcgactataccgacttctatagttcgcggcagcacgctacaaatgttggcatcatgtttcgcgataaggagaatgcgctcatgcccaattggctccatcttccagtcggctaccatggccgcgctagcagtgttgtggtgtctggcacacccatccgacgccccatgggacagatgaagccagatgatagcaaaccaccggtttacggcgcttgcaaactgctagacatggagttagagatggcattcttcgtgggcccaggaaaccgcttgggtgagccaattccgatcagcaaggcacacgagcatatatttggcatggtactgatgaacgattggtctgctcgggacatccagaagtgggagtatgtcccattgggcccctttcttggcaaatccttcggaacaaccgtctcgccttgggtcgtccccatggatgccctcatgcccttcgccgtgccaaacccaaagcaggacccccggcctttaccttacctttgtcatgatgaaccctatacctttgatataaacttgagtgtgaacctcaagggggaaggtatgtcacaggccgccaccatctgcaaatctaactttaagtatatgtactggaccatgcttcagcagctgacacatcattcagtcaatggatgcaacctgcgtcctggcgacctgcttgcatcgggtaccatttcaggccccgagccggagaattttggaagcatgctggaattgagctggaagggtaccaagccaatagacctcggcaacggccaaacaaggaaattcctactggatggggacgaggtcattataacaggctattgtcagggggatggctatagaatcggttttggccagtgcgctgggaaagtgctccctgctttgctcccttca

SEQ ID NO: 2842 - DNA, 1257 bp, Artificial Sequence
  derived and/or modified sequence
atgagcttcatccccgtggccgaggacagcgacttccccatccacaacctgccctacggcgtgttcagcacccgcggcgacccccgcccccgcatcggcgtggccatcggcgaccagatcctggacctgagcatcatcaagcacctgttcaccggccccgtgctgagcaagcaccaggacgtgttcaaccagcccaccctgaacagcttcatgggcctgggccaggccgcctggaaggaggcccgcgtgttcctgcagaacctgctgagcgtgagccaggcccgcctgcgcgacgacaccgagctgcgcaagtgcgccttcatcagccaggccagcgccaccatgcacctgcccgccaccatcggcgactacaccgacttctacagcagccgccagcacgccaccaacgtgggcatcatgttccgcgacaaggagaacgccctgatgcccaactggctgcacctgcccgtgggctaccacggccgcgccagcagcgtggtggtgagcggcacccccatccgccgccccatgggccagatgaagcccgacgacagcaagccccccgtgtacggcgcctgcaagctgctggacatggagctggagatggccttcttcgtgggccccggcaaccgcctgggcgagcccatccccatcagcaaggcccacgagcacatcttcggcatggtgctgatgaacgactggagcgcccgcgacatccagaagtgggagtacgtgcccctgggccccttcctgggcaagagcttcggcaccaccgtgagcccctgggtggtgcccatggacgccctgatgcccttcgccgtgcccaaccccaagcaggacccccgccccctgccctacctgtgccacgacgagccctacaccttcgacatcaacctgagcgtgaacctgaagggcgagggcatgagccaggccgccaccatctgcaagagcaacttcaagtacatgtactggaccatgctgcagcagctgacccaccacagcgtgaacggctgcaacctgcgccccggcgacctgctggccagcggcaccatcagcggccccgagcccgagaacttcggcagcatgctggagctgagctggaagggcaccaagcccatcgacctgggcaacggccagacccgcaagttcctgctggacggcgacgaggtgatcatcaccggctactgccagggcgacggctaccgcatcggcttcggccagtgcgccggcaaggtgctgcccgccctgctgcccagc

SEQ ID NO: 2843 - DNA, 1260 bp, Artificial Sequence
  derived and/or modified sequence
atgagcttcatccccgtggccgaggacagcgacttccccatccacaacctgccctacggcgtgttcagcaccagaggcgaccccagacccagaatcggcgtggccatcggcgaccagatcctggacctgagcatcatcaagcacctgttcaccggccccgtgctgagcaagcaccaggacgtgttcaaccagcccaccctgaacagcttcatgggcctgggccaggccgcctggaaggaggccagagtgttcctgcagaacctgctgagcgtgagccaggccagactgagagacgacaccgagctgagaaagtgcgccttcatcagccaggccagcgccaccatgcacctgcccgccaccatcggcgactacaccgacttctacagcagcagacagcacgccaccaacgtgggcatcatgttcagagacaaggagaacgccctgatgcccaactggctgcacctgcccgtgggctaccacggcagagccagcagcgtggtggtgagcggcacccccatcagaagacccatgggccagatgaagcccgacgacagcaagccccccgtgtacggcgcctgcaagctgctggacatggagctggagatggccttcttcgtgggccccggcaacagactgggcgagcccatccccatcagcaaggcccacgagcacatcttcggcatggtgctgatgaacgactggagcgccagagacatccagaagtgggagtacgtgcccctgggccccttcctgggcaagagcttcggcaccaccgtgagcccctgggtggtgcccatggacgccctgatgcccttcgccgtgcccaaccccaagcaggaccccagacccctgccctacctgtgccacgacgagccctacaccttcgacatcaacctgagcgtgaacctgaagggcgagggcatgagccaggccgccaccatctgcaagagcaacttcaagtacatgtactggaccatgctgcagcagctgacccaccacagcgtgaacggctgcaacctgagacccggcgacctgctggccagcggcaccatcagcggccccgagcccgagaacttcggcagcatgctggagctgagctggaagggcaccaagcccatcgacctgggcaacggccagaccagaaagttcctgctggacggcgacgaggtgatcatcaccggctactgccagggcgacggctacagaatcggcttcggccagtgcgccggcaaggtgctgcccgccctgctgcccagctag

SEQ ID NO: 2844 - DNA, 1403 bp, Artificial Sequence
  derived and/or modified sequence
gggaaataagagagaaaagaagagtaagaagaaatataagagccaccatgtcctttatccctgtggccgaagattcggacttccccattcacaacctcccgtacggtgtattctccacacgcggtgaccccagaccgagaatcggggtagccattggagatcagatcttggacttgtcgatcatcaaacatctcttcaccggcccagtcctctcgaaacatcaggacgtgtttaatcagcccacccttaactccttcatgggactgggacaggccgcatggaaggaagcgcgggtctttcttcaaaaccttttgagcgtgtcacaggcgaggctgagggacgatactgagctgcggaagtgtgcgtttatctcacaagcgtccgcgacaatgcatcttccagctactatcggggactatacagatttctacagctcccgccagcacgcgacgaatgtcggaatcatgttccgagacaaagagaatgcgttgatgcctaactggttgcacctcccggtgggctatcacggtcgagccagctcggtcgtggtgtcaggaacgccgattagaaggcctatgggtcagatgaaacccgacgactcgaaaccgccggtatatggcgcgtgcaagttgctggatatggagcttgaaatggcgttcttcgtcggtcccggtaaccggttgggtgaacccattcccatcagcaaggcccatgaacatatcttcggcatggtgctcatgaacgactggtcagctagagatattcagaagtgggagtatgtgcccttggggccctttctcgggaagtcgtttgggacgaccgtcagcccctgggtcgtaccgatggacgctcttatgccgtttgccgtaccaaatcccaaacaggaccctaggcctctcccgtacttgtgtcacgatgagccctacacgttcgatatcaacctctcggtcaatctcaaaggagagggaatgtcgcaggcggcaacgatttgcaagtcaaatttcaagtatatgtactggaccatgcttcaacaactcacacaccacagcgtgaatgggtgtaacttgcgcccaggggacctcctcgcatccggaactatttccggtcccgagccagagaactttggatcaatgcttgaactgtcgtggaaggggacaaagcctattgaccttggaaatggacaaacgcggaaatttctgctggatggagatgaggtgatcattacggggtactgccagggagatggttaccgcatcgggtttggacagtgcgcagggaaggtgctccctgcgcttctgccctcgtgataagctgccttctgcggggcttgccttctggccatgcccttcttctctcccttgcacctgtacctcttggtctttgaataaagcctgagtaggaag

SEQ ID NO: 2845 - DNA, 1260 bp, Artificial Sequence
  derived and/or modified sequence
atgtccttcatacccgtggccgaagatagtgacttccccatccacaacctcccatatggtgtgttctcaacccgtggcgatcctcgcccaagaataggggtagcgatcggggatcagatccttgacctcagtattattaagcacttgtttaccgggcccgtcttgagcaaacaccaggacgtgtttaaccagccaacactgaatagttttatggggctaggacaggcggcctggaaagaggcccgtgtttttctgcagaatttgttgtctgtatcacaggctcgcctgcgcgacgacacggaactgcgcaagtgcgcatttatttcacaggcaagtgccaccatgcacctccctgctacaattggtgactacaccgatttttactcgtcgagacagcacgcaaccaacgtcggaatcatgtttagggataaggaaaatgccctcatgccaaactggttacatctccccgtaggttatcatggcagggcctcttctgtggtcgttagtggaacaccaattaggcgacctatgggccagatgaaacccgacgactctaagccccctgtgtatggcgcatgtaaactactggacatggaactcgagatggccttcttcgtgggacctgggaatcggttgggcgaaccaatccctattagtaaagcccatgaacatatatttggcatggtcctcatgaacgactggagtgctcgcgatatccaaaagtgggaatacgtgccactcggcccattccttgggaaaagtttcggtactacggtctccccatgggtggtgcctatggatgcactaatgccttttgccgtgcctaaccccaaacaggatccacgcccactgccttatttgtgccacgatgagccatatacctttgatatcaacttgtcggtcaacctgaagggagagggtatgtcacaagccgccacaatatgcaagagtaacttcaaatacatgtactggacaatgttacagcaactaacccatcattccgtcaatggctgcaatttgagacctggcgatctactcgcttcgggcaccatttccgggcctgagcccgagaacttcgggtctatgctggagctgagctggaaggggactaagcccatcgatcttggtaatgggcagacccggaagttcctactggacggtgatgaggtgattatcacagggtactgccaaggcgatggctaccggattgggttcggccagtgtgcaggcaaggttcttcctgctctcctgccttcttag

SEQ ID NO: 2846 - DNA, 1260 bp, Artificial Sequence
  derived and/or modified sequence
atgtcattcattccggtcgccgaagacagcgattttcccatccacaatctgccatacggagtctttagtacccgtggcgaccctagaccaaggataggcgtggctatcggcgaccagattctggatctttcaatcattaagcacctctttacagggcccgttctatctaaacaccaggatgtgttcaatcagcccacactgaattcctttatgggcttgggtcaggctgcctggaaggaggcgagagtgttcttacagaatctgttatccgtgagccaggctcggctgcgcgacgatacagagctaaggaagtgtgcatttatatctcaggcgagcgccaccatgcatctccctgccaccattggagattatacagacttctatagcagcagacagcatgccaccaacgtcggcataatgttccgggataaggagaatgcactcatgcctaattggcttcacctccctgttggctaccacggccgcgcctcttcggtcgtcgtgtctggcacccctattcgtaggcccatggggcagatgaagcccgatgattcaaaaccccccgtgtatggcgcctgtaagcttttggacatggagctggaaatggccttttttgtaggaccgggaaatagacttggcgaaccaattcctatctcgaaagcccacgaacacatctttggcatggtcttgatgaatgactggagcgctcgcgacattcagaagtgggagtatgtcccgcttgggccctttttagggaagtccttcggtaccaccgtgtccccttgggttgtgcctatggacgctctgatgcccttcgcggtgccgaatcccaagcaggatcccagaccactgccgtatctctgccatgatgagccgtatacctttgatataaatctgtctgtcaatctgaagggcgaaggcatgtctcaggctgctactatctgtaagtccaacttcaagtacatgtactggaccatgctccaacagctgacccaccattcagtgaacgggtgcaatctcagaccgggggatctgctggcctccggaaccatcagcggtcctgagccggaaaactttggaagcatgctggaactatcttggaaaggcactaaacccatagacctgggcaacggccaaactcggaagtttctgttagatggcgatgaagtgatcatcaccggatattgccagggtgatgggtatcgcattggatttggtcagtgtgcaggcaaggtgcttccggcactgctgccttcttag

SEQ ID NO: 2847 - DNA, 1260 bp, Artificial Sequence
  derived and/or modified sequence
atgtccttcatacccgtggctgaggacagcgactttcccatccacaatctgccctacggggtttttagcactaggggcgatccacgcccaagaattggtgtagctattggggaccagatcctcgacttatccatcatcaagcacctctttactgggccagtgctgtccaaacatcaagatgttttcaatcagcctactttaaatagcttcatgggccttggacaggccgcctggaaagaagctcgagtttttctgcagaaccttctaagcgtgagccaggcaaggctccgcgacgacaccgagttacgaaagtgtgcctttatttcacaggcctctgcaaccatgcatctcccagccacaatcggcgactacactgacttttactcatctcgccagcacgcgacaaacgtcgggatcatgtttcgcgataaagagaatgccctcatgcccaactggctgcacctccccgtgggctatcacggcagagcctcttctgttgtggtttccggtacgccaattaggcggcctatgggccaaatgaaacctgacgattctaagcctcctgtctacggcgcatgtaagcttctggacatggagctggaaatggccttcttcgttggacctggtaatcgcctcggggagcccattcctatttccaaggcgcacgaacacatattcggaatggtgttaatgaatgactggtctgcccgggacatccagaaatgggaatatgtccccctgggcccttttttaggaaaatcattcggcactactgtatctccttgggtcgtgcccatggacgccctgatgcctttcgccgtgcccaatcccaaacaagatccgagaccccttccctatctatgtcatgacgagccttacacgttcgacattaatttgagcgtgaacttgaaaggcgagggcatgtctcaggccgctactatatgcaagtctaactttaagtatatgtactggacaatgctccagcagctgacacatcactccgttaacgggtgtaatttacgaccaggggatctgctagcaagtggaacgatttctggccccgagccagagaatttcggcagcatgctcgaactgtcctggaagggtactaaacctatcgacttaggcaacggccagacaaggaaatttctgttagacggcgatgaggtcatcatcactggatattgccagggggatggctacagaatagggttcggccaatgcgccgggaaggtcctccccgcccttctcccaagctag

SEQ ID NO: 2848 - DNA, 1260 bp, Artificial Sequence
  derived and/or modified sequence
atgtccttcatccctgtggccgaggacagcgacttccccatccacaacctgccctatggagtcttcagcaccaggggggacccccggccccgcatcggcgtggccatcggggaccagatcctggacctgagcatcatcaagcacctgttcaccggccctgtgctgagcaagcaccaggatgtgttcaaccagcccaccctgaacagcttcatgggcctgggccaggccgcctggaaggaggcccgggtcttcctgcagaacctgctgtctgtgtcccaggcccggctgagagatgacacagagctgaggaaatgtgccttcatcagccaggccagcgccaccatgcacctgcctgccaccatcggggactacacagacttctacagcagccggcagcacgccaccaacgtgggcatcatgttccgggacaaggaaaatgccctgatgcccaactggctgcacctgcctgtgggctaccacggccgggccagctctgtggtggtgtctggcacccccatccggcggcccatgggccagatgaagccagatgacagcaagccccctgtgtatggagcctgcaagctgctggacatggagctggagatggccttctttgtgggccctggcaaccggctgggggagcccatccccatcagcaaggcccacgagcacatcttcggcatggtgctgatgaatgactggagcgcccgggacatccagaagtgggagtatgtgcccctgggccccttcctgggcaagagctttggcaccaccgtgagcccctgggtggtgcccatggatgccctgatgccctttgctgtgcccaaccccaagcaggacccccggcccctgccctacctgtgccatgatgagccctacacctttgacatcaacctgtctgtgaacctgaagggggagggcatgagccaggccgccaccatctgcaagagcaacttcaagtacatgtactggaccatgctgcagcagctgacccaccacagcgtgaatggctgcaacctgcggcctggggacctgctggccagcggcaccatcagcggccctgagccagaaaattttggctccatgctggagctgtcctggaagggcaccaagcccatcgacctgggcaatggccagaccaggaagttcctgctggatggagatgaggtgatcatcaccggctactgccagggagatggctacagaattggatttggccagtgtgccggcaaggtgctgcctgccctgctgcccagctag

SEQ ID NO: 2849 - DNA, 1471 bp, Artificial Sequence
  derived and/or modified sequence
ggaagggcgggcgagactgtggaggacctggagctggcgggggtcagggcccgcagccgtgccgggtgctcttcagcatgtccttcatcccggtggccgaggattccgacttccccatccacaacctgccctacggcgtcttctcgaccagaggcgacccaagaccgaggataggtgtggccattggcgaccagatcctggacctcagcatcatcaagcacctctttactggtcctgtcctctccaaacaccaggatgtcttcaatcagcctacactcaacagcttcatgggcctgggtcaggctgcctggaaggaggcgagagtgttcttgcagaacttgctgtctgtgagccaagccaggctcagagatgacaccgaacttcggaagtgtgcattcatctcccaggcttctgccacgatgcaccttccagccaccataggagactacacagacttctattcctctcggcagcatgctaccaacgtcggaatcatgttcagggacaaggagaatgcgttgatgccaaattggctgcacttaccagtgggctaccatggccgtgcctcctctgtcgtggtgtctggcaccccaatccgaaggcccatgggacagatgaaacctgatgactctaagcctcccgtatatggtgcctgcaagctcttggacatggagctggaaatggctttttttgtaggccctggaaacagattgggagagccgatccccatttccaaggcccatgagcacatttttggaatggtccttatgaacgactggagtgcacgagacattcagaagtgggagtatgtccctctcgggccattccttgggaagagttttgggaccactgtctctccgtgggtggtgcccatggatgctctcatgccctttgctgtgcccaacccgaagcaggaccccaggcccctgccgtatctgtgccatgacgagccctacacatttgacatcaacctctctgttaacctgaaaggagaaggaatgagccaggcggctaccatatgcaagtccaattttaagtacatgtactggacgatgctgcagcagctcactcaccactctgtcaacggctgcaacctgcggccgggggacctcctggcttctgggaccatcagcgggccggagccagaaaacttcggctccatgttggaactgtcgtggaagggaacgaagcccatagacctggggaatggtcagaccaggaagtttctgctggacggggatgaagtcatcataacagggtactgccagggggatggttaccgcatcggctttggccagtgtgctggaaaagtgctgcctgctctcctgccatcatgagattttctctgctcttctggaaacaaagggctcaagcacccctttcaaccctgtgactggggtcctccctcgggctgtaggcctggtccgccattcagtgacaaataaagccattgtgctctgaggcctgcact

SEQ ID NO: 2850 - DNA, 2152 bp, Artificial Sequence
  derived and/or modified sequence
cggggcggggctctggaagggcgggcgagactgtggaggacctggagctggcgggggtcagggtaggggggaggggcagggctcggggttcgggggcggggtgttcacggtgagaccaaaagtcaggcccgcagccgtgccgggtgctcttcagcatgtccttcatcccggtggccgaggattccgacttccccatccacaacctgccctacggcgtcttctcgaccagaggcgacccaagaccgaggataggtgtggccattggcgaccagatcctggacctcagcatcatcaagcacctctttactggtcctgtcctctccaaacaccaggatgtcttcaatcagcctacactcaacagcttcatgggcctgggtcaggctgcctggaaggaggcgagagtgttcttgcagaacttgctgtctgtgagccaagccaggctcagagatgacaccgaacttcggaagtgtgcattcatctcccaggcttctgccacgatgcaccttccagccaccataggagactacacagacttctattcctctcggcagcatgctaccaacgtcggaatcatgttcagggacaaggagaatgcgttgatgccaaattggctgcacttaccagtgggctaccatggccgtgcctcctctgtcgtggtgtctggcaccccaatccgaaggcccatgggacagatgaaacctgatgactctaagcctcccgtatatggtgcctgcaagctcttggacatggagctggaaatggctttttttgtaggccctggaaacagattgggagagccgatccccatttccaaggcccatgagcacatttttggaatggtccttatgaacgactggagtgcacgagacattcagaagtgggagtatgtccctctcgggccattccttgggaagagttttgggaccactgtctctccgtgggtggtgcccatggatgctctcatgccctttgctgtgcccaacccgaagcaggaccccaggcccctgccgtatctgtgccatgacgagccctacacatttgacatcaacctctctgttaacctgaaaggagaaggaatgagccaggcggctaccatatgcaagtccaattttaagtacatgtactggacgatgctgcagcagctcactcaccactctgtcaacggctgcaacctgcggccgggggacctcctggcttctgggaccatcagcgggccggagccagaaaacttcggctccatgttggaactgtcgtggaagggaacgaagcccatagacctggggaatggtcagaccaggaagtttctgctggacggggatgaagtcatcataacagggtactgccagggggatggttaccgcatcggctttggccagtgtgctggaaaagtgctgcctgctctcctgccatcatgagattttctctgctcttctggaaacaaagggctcaagcacccctttcaaccctgtgactggggtcctccctcgggctgtaggcctggtccgccattcagtgacaaataaagccattgtgctctgaggcctgcactgccgcagatgcagctgtgtccacttatgatcgtgatttgatccagtgggtcaaggtgtgtaaagcctccctgccagatattcattaatatgttttctcactcttattagtgaggtcaggggtctttgtgggattttcttattagacatcccaggcctcctggtattccatggaatttgaaaagagactggcacctgtagtagtcagggctctccagagaaatagaaccaaggagaaagagatcgatttattgattgattgattgattttaagcaaattggcttctgggattctggagggtggcaagcccaaaacctgctgggtgggttgctggctggagacccaaggaagagctgcagtttgagtctgaagcagtctgctgtcaaaatttcctcttcctctgggaagtgagtcattgtttggtgaaggccatcaactgattagatgaggcccagccacactgtgggggtcttctgctttactccactgatttaagttttatttcacctaaaaagtactttcttagaaacatgtagaatagcatttgagcaaatatttgggtaccttagtctagccaaattaatacagaaaactgcccatcaca

SEQ ID NO: 2851 - DNA, 1549 bp, Artificial Sequence
  derived and/or modified sequence
aaaagtcaggtaggagcctccggggtccctgctgtgtcacccggacaggccgtgggggcgggcaggggggcggggccgggcctgaccacagcggccgagttcagtcctgctctccgcacgccaccttaggcccgcagccgtgccgggtgctcttcagcatgtccttcatcccggtggccgaggattccgacttccccatccacaacctgccctacggcgtcttctcgaccagaggcgacccaagaccgaggataggtgtggccattggcgaccagatcctggacctcagcatcatcaagcacctctttactggtcctgtcctctccaaacaccaggatgtcttcaatcagcctacactcaacagcttcatgggcctgggtcaggctgcctggaaggaggcgagagtgttcttgcagaacttgctgtctgtgagccaagccaggctcagagatgacaccgaacttcggaagtgtgcattcatctcccaggcttctgccacgatgcaccttccagccaccataggagactacacagacttctattcctctcggcagcatgctaccaacgtcggaatcatgttcagggacaaggagaatgcgttgatgccaaattggctgcacttaccagtgggctaccatggccgtgcctcctctgtcgtggtgtctggcaccccaatccgaaggcccatgggacagatgaaacctgatgactctaagcctcccgtatatggtgcctgcaagctcttggacatggagctggaaatggctttttttgtaggccctggaaacagattgggagagccgatccccatttccaaggcccatgagcacatttttggaatggtccttatgaacgactggagtgcacgagacattcagaagtgggagtatgtccctctcgggccattccttgggaagagttttgggaccactgtctctccgtgggtggtgcccatggatgctctcatgccctttgctgtgcccaacccgaagcaggaccccaggcccctgccgtatctgtgccatgacgagccctacacatttgacatcaacctctctgttaacctgaaaggagaaggaatgagccaggcggctaccatatgcaagtccaattttaagtacatgtactggacgatgctgcagcagctcactcaccactctgtcaacggctgcaacctgcggccgggggacctcctggcttctgggaccatcagcgggccggagccagaaaacttcggctccatgttggaactgtcgtggaagggaacgaagcccatagacctggggaatggtcagaccaggaagtttctgctggacggggatgaagtcatcataacagggtactgccagggggatggttaccgcatcggctttggccagtgtgctggaaaagtgctgcctgctctcctgccatcatgagattttctctgctcttctggaaacaaagggctcaagcacccctttcaaccctgtgactggggtcctccctcgggctgtaggcctggtccgccattcagtgacaaataaagccattgtgctctgaggcctgc

SEQ ID NO: 2852 - DNA, 1260 bp, Artificial Sequence
  derived and/or modified sequence
atgagcttcatccccgtggccgaggacagcgacttccccatccacaacctgccctacggcgtgttctcaacacgcggggatccacgacccagaattggagtggctattggtgaccaaatactagatttgtctatcattaaacatctgtttacagggcccgtgctgagcaaacatcaggatgtctttaaccaaccaactctcaatagcttcatggggctgggacaagctgcatggaaggaagccagagtatttttgcaaaacttactgtctgtgtcacaagctcgactcagagacgacaccgagctgcggaaatgcgcttttatttcacaagcctctgccaccatgcatttgcccgccacgatcggcgactacactgatttctactcctcgcggcagcatgccactaatgtcggaattatgttcagagacaaggaaaacgcgctcatgccaaattggttgcaccttccagttggatatcatggccgcgccagctccgtcgtggtctcaggcacaccgatcagaagacccatgggccagatgaaacccgacgacagtaaacccccggtctatggcgcctgtaaacttctggatatggagctggaaatggccttttttgtggggcctggcaaccggcttggggaaccgatcccaatctcaaaggcccacgaacacatttttggcatggtactcatgaatgactggagtgcaagagacatccagaagtgggagtatgtccccctgggtcctttcctaggtaagtcatttggaactactgtgagcccctgggtagtgcctatggatgcccttatgccattcgccgtgcctaatcccaaacaggatcctcggccacttccctatctgtgccacgatgaaccttatacttttgatatcaatctctctgtcaacctcaaaggagaggggatgtcccaggcagcaaccatttgtaaaagcaattttaaatacatgtactggactatgctgcagcaactaacacatcactcagttaatggctgcaacctgcggccgggcgatctgcttgcatcagggacgatctccgggcctgagccagagaacttcggcagtatgcttgagctgagctggaagggcactaaaccaatcgaccttgggaacggtcagacgcgtaagttcctgctggacggcgacgaagttataatcaccggctactgccagggcgacggatacaggatcggttttggccagtgcgctgggaaagtgttacccgccctcctgccaagttag

SEQ ID NO: 2853 - DNA, 1260 bp, Artificial Sequence
  derived and/or modified sequence
atgagcttcatccccgtggccgaggacagcgacttccccatccacaatctgccatacggcgtcttcagcacccggggggatccaaggccaaggatcggcgttgccatcggcgatcagatcttggatctgtctattatcaagcatctgttcactgggcctgttctatccaagcaccaggacgtatttaatcaacctactctgaacagctttatgggactgggccaggccgcctggaaggaggccagggtgtttctgcagaacctcttgagtgttagtcaggcgcgcctccgggatgatacagaattacggaagtgtgctttcatcagccaggcctctgctaccatgcatttaccagctactatcggagattatactgatttctactcttcccgccaacatgccacaaacgtgggcataatgtttagggacaaagagaacgccctcatgccaaattggctccacttgccggtgggatatcacggcagagcatcttctgtggtggtgagtggtaccccaatacggaggcccatgggccagatgaagcctgacgacagtaaacccccagtgtacggcgcctgcaagctgctggacatggaactagagatggcttttttcgtgggacctggcaatcgcctaggggagcctatacctatttctaaggcccacgagcacatttttggcatggtgttaatgaacgactggtcggcaagagatattcaaaaatgggaatacgtgccactcggaccctttctgggaaagtcctttggaacaactgtgtctccttgggttgtgccaatggacgcccttatgccctttgccgtaccaaatcccaagcaggatccacgccctctcccttacctgtgccacgatgagccctatacttttgatatcaacctttccgtcaatctaaagggggagggcatgtcacaggccgcgaccatctgcaagagcaactttaagtatatgtactggaccatgttgcagcagttgactcatcatagcgttaatgggtgcaatctgcgcccaggggacctactggcctccggcacaatcagtggtccagaacccgagaattttggatccatgttggagttgtcttggaaaggcacaaagccaatcgacttgggaaacggacaaactcggaagttcctcctggacggggatgaggttatcattactggctattgccaaggggatggataccgtattggcttcggtcagtgtgcaggcaaagttctgccagcattgttacccagctag

SEQ ID NO: 2854 - DNA, 1260 bp, Artificial Sequence
  derived and/or modified sequence
atgagcttcatccccgtggccgaggacagcgacttccccatccacaatctcccctatggggttttttccacaagaggcgaccctagaccacggataggcgtcgctatcggagatcagatcctcgatctttcaattatcaagcacctcttcacgggtcccgtgttgtctaagcaccaggatgtgttcaaccagccgacactgaattcgtttatgggcctaggccaggccgcctggaaagaagctcgagtgttcctccaaaacctgctctccgtgagccaggcccgcctgagggacgacactgaacttcgaaagtgcgcctttatctctcaggccagcgctaccatgcatctgcccgcaaccattggtgattatacagacttttattcctctcgtcagcacgctacaaatgtgggcattatgtttcgcgataaggaaaacgccctcatgcctaactggctgcatctgccagtggggtaccacgggcgtgcttcgtccgtcgtggtgagtggcactcctatcaggcggcctatgggacagatgaagcctgacgactcgaaaccgcctgtgtacggggcctgtaagttattagatatggagttggaaatggccttcttcgtaggccccggcaataggttaggggagccgatacccatttccaaagcccatgagcacatctttggcatggttcttatgaatgattggagtgctcgggacatacagaaatgggaatatgtgcccttggggcctttcttgggaaaatcattcggtacaaccgtgtcaccatgggtggtgcctatggacgcccttatgccattcgcagttccgaatccaaagcaggatcctcgacctctgccgtacctttgtcacgacgagccttatacgttcgacatcaatcttagtgttaatctaaaaggagaaggcatgtcacaggccgcaaccatctgcaaatccaatttcaaatacatgtactggaccatgctgcagcagctcacccaccattccgtgaacggatgtaatttgcggcccggagacctgctggcgtccggtaccatcagcggcccagaaccggagaactttggaagcatgttagagctctcttggaagggcactaagcccatcgatctaggaaatggccaaacccgaaaatttttgctagacggcgacgaggtgatcattacagggtattgtcagggggacggctacaggatcggcttcggacagtgcgccggcaaggtgctcccggcgcttctacccagctag

SEQ ID NO: 2855 - DNA, 1260 bp, Artificial Sequence
  derived and/or modified sequence
atgagttttattcccgtggctgaagacagtgactttcccatccataatctgccctatggcgttttctccacgcgaggagatcccagacctcgtatcggcgtcgccattggcgaccagatccttgatttgagcatcattaaacacttgttcaccggaccggtgctgagtaagcaccaagacgtgttcaaccagcctactcttaatagctttatgggactcggccaggctgcctggaaggaggctcgcgtatttctgcagaatctgctcagtgtgagccaggctcggctcagagatgataccgagctgcgaaaatgcgcctttataagccaggcctctgccaccatgcaccttcccgcaacgatcggggattatactgatttctactcctctaggcagcatgcaactaacgtcggtatcatgttcagagacaaggagaatgccttgatgccaaactggctgcacctgcccgttggctatcacggccgagcctccagcgtagtcgtatcagggacccccatcaggcgcccaatgggacaaatgaagcccgatgatagtaagcctcctgtgtatggcgcatgtaagctgctggacatggaacttgaaatggcattcttcgtgggccctggtaaccggctgggggagcctatccccatttctaaggcccatgaacacatatttggcatggtgttgatgaatgactggagtgccagggacatccagaaatgggagtatgtgcctttgggtccctttctgggaaagagcttcggaaccaccgtaagcccttgggtggttccaatggacgctctcatgccattcgcagtgcctaaccccaagcaggatcctaggcctctgccctacctgtgccatgacgaaccctacaccttcgatatcaacctttcagttaacctgaagggagaagggatgagtcaagccgctaccatctgtaagtctaactttaaatacatgtactggaccatgctccagcaactgacgcatcacagtgtgaatgggtgcaatctcaggcctggcgatctactcgcctcaggaaccatttctggacctgagcctgagaacttcggctcaatgttggaactcagttggaaaggaacgaaacccattgatcttggcaacggacagactcggaagttcctgctcgacggggatgaggtgattatcaccgggtattgccaaggcgatggctatcggattggttttgggcaatgtgccggtaaagtgctgcccgcactgctaccttcttag

SEQ ID NO: 2856 - DNA, 1260 bp, Artificial Sequence
  derived and/or modified sequence
atgagtttcatccccgtcgccgaggattctgattttccaatccataatctgccgtacggggtattttcaaccagaggcgacccccgtccacgaattggcgttgcaatcggagatcagattctcgacttatccattatcaagcacctgttcaccggcccagttctgtctaaacaccaagacgtcttcaatcagcccacactcaattcctttatggggctgggccaggctgcttggaaagaggcccgagtgtttctgcaaaatctgctaagcgtgagccaggccagactgcgagacgacactgagctgagaaaatgtgcatttattagtcaagcgagcgctacgatgcacctccccgcaaccattggggactatactgacttctactcgtctaggcaacacgccaccaacgttgggattatgttccgtgacaaagaaaatgcccttatgcctaattggctccacctgccagtgggatatcatggcagagcatcaagcgttgtggtatcaggaactcctatcagacggcctatgggccagatgaaaccagacgactctaaaccgccagtttacggtgcttgtaaattgctcgatatggagttagagatggctttcttcgtagggccaggcaacagacttggagagcctatccctatcagtaaagcccatgaacatatctttggtatggtgttgatgaatgactggtcagcccgagacattcagaagtgggaatacgtgcctcttggcccattccttggcaagagttttgggactaccgtgagcccttgggttgtgcccatggacgctctgatgccgtttgctgtgcccaaccctaagcaggacccacgccctctaccctatctgtgccatgacgaaccatacacttttgacattaacctgtcagtcaatttgaagggagaaggcatgagtcaagcagcaacaatttgtaagagtaatttcaagtacatgtactggaccatgctccagcagctcacccatcattctgtgaatgggtgcaaccttcgcccaggcgatctgctcgctagcggaacaattagcgggcctgagcctgaaaacttcggctccatgctcgagcttagctggaaggggactaagcccatcgacttaggcaacgggcaaacccgcaagtttctgcttgatggggatgaagtgattattacgggttactgccaaggcgacgggtataggatcggattcgggcaatgtgccggaaaggtgctacctgctttactcccatcatag

SEQ ID NO: 2857 - DNA, 1260 bp, Artificial Sequence
  derived and/or modified sequence
atgtccttcatacctgtcgcagaggacagcgactttcccatccacaatcttccttacggagtcttctctaccaggggagacccaagaccccgaattggcgtcgccataggagaccagatcttagacttgagcatcatcaagcacttatttactggtccagttctttccaaacatcaggacgtctttaaccaaccaactcttaacagcttcatgggactgggtcaagccgcatggaaggaagcacgggtcttcttacagaacctactgtctgttagccaagctcggctcagggacgacactgaattgaggaagtgcgcattcataagtcaggcctcggctactatgcacctccctgcaaccattggggactacactgacttctattcctctaggcaacacgccacaaatgtgggaatcatgttcagagacaaggaaaacgccctgatgcctaattggcttcacctgcctgtgggttatcatggcagggcatccagcgtggtggtcagtggtaccccgattagacggccaatggggcagatgaagcccgatgacagcaagcccccagtatatggagcatgtaaactgctggatatggaacttgaaatggccttttttgtgggtccgggaaacaggttaggcgaacctatacccattagtaaggctcatgaacatatcttcgggatggtgctgatgaatgactggtcggccagggatattcagaaatgggagtatgtaccgctcgggcctttccttggaaaatcattcggaacaacagtctccccttgggtcgtccccatggatgccctgatgccgtttgccgtccccaatcctaaacaggatccgaggcctctaccttacttatgtcatgacgaaccatacacgttcgacatcaatctgagtgtgaacttgaagggcgaagggatgtcccaggccgcaaccatctgcaagtcaaactttaagtacatgtactggaccatgctacagcagctcacccaccactccgtcaatggctgtaacctgagaccaggggacttgctggcgagcggcacaatcagcggccctgagcccgagaatttcggttccatgctagagctgtcctggaaaggaactaaacccatcgacctgggcaacggccagacacgaaaattcctgctcgacggggatgaggttattataactgggtattgtcagggcgacggctaccggataggctttggacaatgcgctggcaaggtcctgccagcccttctgccttcatag

SEQ ID NO: 2858 - RNA, 1403 nt, Artificial Sequence
  derived and/or modified sequence
gggaaauaagagagaaaagaagaguaagaagaaauauaagagccaccauguccuuuaucccuguggccgaagauucggacuuccccauucacaaccucccguacgguguauucuccacacgcggugaccccagaccgagaaucgggguagccauuggagaucagaucuuggacuugucgaucaucaaacaucucuucaccggcccaguccucucgaaacaucaggacguguuuaaucagcccacccuuaacuccuucaugggacugggacaggccgcauggaaggaagcgcgggucuuucuucaaaaccuuuugagcgugucacaggcgaggcugagggacgauacugagcugcggaagugugcguuuaucucacaagcguccgcgacaaugcaucuuccagcuacuaucggggacuauacagauuucuacagcucccgccagcacgcgacgaaugucggaaucauguuccgagacaaagagaaugcguugaugccuaacugguugcaccucccggugggcuaucacggucgagccagcucggucguggugucaggaacgccgauuagaaggccuaugggucagaugaaacccgacgacucgaaaccgccgguauauggcgcgugcaaguugcuggauauggagcuugaaauggcguucuucgucggucccgguaaccgguugggugaacccauucccaucagcaaggcccaugaacauaucuucggcauggugcucaugaacgacuggucagcuagagauauucagaagugggaguaugugcccuuggggcccuuucucgggaagucguuugggacgaccgucagccccugggucguaccgauggacgcucuuaugccguuugccguaccaaaucccaaacaggacccuaggccucucccguacuugugucacgaugagcccuacacguucgauaucaaccucucggucaaucucaaaggagagggaaugucgcaggcggcaacgauuugcaagucaaauuucaaguauauguacuggaccaugcuucaacaacucacacaccacagcgugaauggguguaacuugcgcccaggggaccuccucgcauccggaacuauuuccggucccgagccagagaacuuuggaucaaugcuugaacugucguggaaggggacaaagccuauugaccuuggaaauggacaaacgcggaaauuucugcuggauggagaugaggugaucauuacgggguacugccagggagaugguuaccgcaucggguuuggacagugcgcagggaaggugcucccugcgcuucugcccucgugauaagcugccuucugcggggcuugccuucuggccaugcccuucuucucucccuugcaccuguaccucuuggucuuugaauaaagccugaguaggaag

SEQ ID NO: 2859 - protein, 2871 aa, Artificial Sequence
  derived and/or modified sequence
MRRGRLLEIALGFTVLLASYTSHGADANLEAGNVKETRASRAKRRGGGGHDALKGPNVCGSRYNAYCCPGWKTLPGGNQCIVPICRHSCGDGFCSRPNMCTCPSGQIAPSCGSRSIQHCNIRCMNGGSCSDDHCLCQKGYIGTHCGQPVCESGCLNGGRCVAPNRCACTYGFTGPQCERDYRTGPCFTVISNQMCQGQLSGIVCTKTLCCATVGRAWGHPCEMCPAQPHPCRRGFIPNIRTGACQDVDECQAIPGLCQGGNCINTVGSFECKCPAGHKLNEVSQKCEDIDECSTIPGICEGGECTNTVSSYFCKCPPGFYTSPDGTRCIDVRPGYCYTALTNGRCSNQLPQSITKMQCCCDAGRCWSPGVTVAPEMCPIRATEDFNKLCSVPMVIPGRPEYPPPPLGPIPPVLPVPPGFPPGPQIPVPRPPVEYLYPSREPPRVLPVNVTDYCQLVRYLCQNGRCIPTPGSCRCECNKGFQLDLRGECIDVDECEKNPCAGGECINNQGSYTCQCRAGYQSTLTRTECRDIDECLQNGRICNNGRCINTDGSFHCVCNAGFHVTRDGKNCEDMDECSIRNMCLNGMCINEDGSFKCICKPGFQLASDGRYCKDINECETPGICMNGRCVNTDGSYRCECFPGLAVGLDGRVCVDTHMRSTCYGGYKRGQCIKPLFGAVTKSECCCASTEYAFGEPCQPCPAQNSAEYQALCSSGPGMTSAGSDINECALDPDICPNGICENLRGTYKCICNSGYEVDSTGKNCVDINECVLNSLLCDNGQCRNTPGSFVCTCPKGFIYKPDLKTCEDIDECESSPCINGVCKNSPGSFICECSSESTLDPTKTICIETIKGTCWQTVIDGRCEININGATLKSQCCSSLGAAWGSPCTLCQVDPICGKGYSRIKGTQCEDIDECEVFPGVCKNGLCVNTRGSFKCQCPSGMTLDATGRICLDIRLETCFLRYEDEECTLPIAGRHRMDACCCSVGAAWGTEECEECPMRNTPEYEELCPRGPGFATKEITNGKPFFKDINECKMIPSLCTHGKCRNTIGSFKCRCDSGFALDSEERNCTDIDECRISPDLCGRGQCVNTPGDFECKCDEGYESGFMMMKNCMDIDECQRDPLLCRGGVCHNTEGSYRCECPPGHQLSPNISACIDINECELSAHLCPNGRCVNLIGKYQCACNPGYHSTPDRLFCVDIDECSIMNGGCETFCTNSEGSYECSCQPGFALMPDQRSCTDIDECEDNPNICDGGQCTNIPGEYRCLCYDGFMASEDMKTCVDVNECDLNPNICLSGTCENTKGSFICHCDMGYSGKKGKTGCTDINECEIGAHNCGKHAVCTNTAGSFKCSCSPGWIGDGIKCTDLDECSNGTHMCSQHADCKNTMGSYRCLCKEGYTGDGFTCTDLDECSENLNLCGNGQCLNAPGGYRCECDMGFVPSADGKACEDIDECSLPNICVFGTCHNLPGLFRCECEIGYELDRSGGNCTDVNECLDPTTCISGNCVNTPGSYICDCPPDFELNPTRVGCVDTRSGNCYLDIRPRGDNGDTACSNEIGVGVSKASCCCSLGKAWGTPCEMCPAVNTSEYKILCPGGEGFRPNPITVILEDIDECQELPGLCQGGKCINTFGSFQCRCPTGYYLNEDTRVCDDVNECETPGICGPGTCYNTVGNYTCICPPDYMQVNGGNNCMDMRRSLCYRNYYADNQTCDGELLFNMTKKMCCCSYNIGRAWNKPCEQCPIPSTDEFATLCGSQRPGFVIDIYTGLPVDIDECREIPGVCENGVCINMVGSFRCECPVGFFYNDKLLVCEDIDECQNGPVCQRNAECINTAGSYRCDCKPGYRFTSTGQCNDRNECQEIPNICSHGQCIDTVGSFYCLCHTGFKTNDDQTMCLDINECERDACGNGTCRNTIGSFNCRCNHGFILSHNNDCIDVDECASGNGNLCRNGQCINTVGSFQCQCNEGYEVAPDGRTCVDINECLLEPRKCAPGTCQNLDGSYRCICPPGYSLQNEKCEDIDECVEEPEICALGTCSNTEGSFKCLCPEGFSLSSSGRRCQDLRMSYCYAKFEGGKCSSPKSRNHSKQECCCALKGEGWGDPCELCPTEPDEAFRQICPYGSGIIVGPDDSAVDMDECKEPDVCKHGQCINTDGSYRCECPFGYILAGNECVDTDECSVGNPCGNGTCKNVIGGFECTCEEGFEPGPMMTCEDINECAQNPLLCAFRCVNTYGSYECKCPVGYVLREDRRMCKDEDECEEGKHDCTEKQMECKNLIGTYMCICGPGYQRRPDGEGCVDENECQTKPGICENGRCLNTRGSYTCECNDGFTASPNQDECLDNREGYCFTEVLQNMCQIGSSNRNPVTKSECCCDGGRGWGPHCEICPFQGTVAFKKLCPHGRGFMTNGADIDECKVIHDVCRNGECVNDRGSYHCICKTGYTPDITGTSCVDLNECNQAPKPCNFICKNTEGSYQCSCPKGYILQEDGRSCKDLDECATKQHNCQFLCVNTIGGFTCKCPPGFTQHHTSCIDNNECTSDINLCGSKGICQNTPGSFTCECQRGFSLDQTGSSCEDVDECEGNHRCQHGCQNIIGGYRCSCPQGYLQHYQWNQCVDENECLSAHICGGASCHNTLGSYKCMCPAGFQYEQFSGGCQDINECGSAQAPCSYGCSNTEGGYLCGCPPGYFRIGQGHCVSGMGMGRGNPEPPVSGEMDDNSLSPEACYECKINGYPKRGRKRRSTNETDASNIEDQSETEANVSLASWDVEKTAIFAFNISHVSNKVRILELLPALTTLTNHNRYLIESGNEDGFFKINQKEGISYLHFTKKKPVAGTYSLQISSTPLYKKKELNQLEDKYDKDYLSGELGDNLKMKIQVLLH

SEQ ID NO: 2860 - protein, 985 aa, Artificial Sequence
  derived and/or modified sequence
MGFVPSADGKACEDIDECSLPNICVFGTCHNLPGLFRCECEIGYELDRSGGNCTDVNECLDPTTCISGNCVNTPGSYICDCPPDFELNPTRVGCVDTRSGNCYLDIRPRGDNGDTACSNEIGVGVSKASCCCSLGKAWGTPCEMCPAVNTSEYKILCPGGEGFRPNPITVILEDIDECQELPGLCQGGKCINTFGSFQCRCPTGYYLNEDTRVCDDVNECETPGICGPGTCYNTVGNYTCICPPDYMQVNGGNNCMDMRRSLCYRNYYADNQTCDGELLFNMTKKMCCCSYNIGRAWNKPCEQCPIPSTDEFATLCGSQRPGFVIDIYTGLPVDIDECREIPGVCENGVCINMVGSFRCECPVGFFYNDKLLVCEDIDECQNGPVCQRNAECINTAGSYRCDCKPGYRFTSTGQCNDRNECQEIPNICSHGQCIDTVGSFYCLCHTGFKTNDDQTMCLDINECERDACGNGTCRNTIGSFNCRCNHGFILSHNNDCIDVDECASGNGNLCRNGQCINTVGSFQCQCNEGYEVAPDGRTCVDINECLLEPRKCAPGTCQNLDGSYRCICPPGYSLQNEKCEDIDECVEEPEICALGTCSNTEGSFKCLCPEGFSLSSSGRRCQDLRMSYCYAKFEGGKCSSPKSRNHSKQECCCALKGEGWGDPCELCPTEPDEAFRQICPYGSGIIVGPDDSAVDMDECKEPDVCKHGQCINTDGSYRCECPFGYILAGNECVDTDECSVGNPCGNGTCKNVIGGFECTCEEGFEPGPMMTCEDINECAQNPLLCAFRCVNTYGSYECKCPVGYVLREDRRMCKDEDECEEGKHDCTEKQMECKNLIGTYMCICGPGYQRRPDGEGCVDENECQTKPGICENGRCLNTRGSYTCECNDGFTASPNQDECLDVILSLLLLSPAFPSCFFSPRTIGKGTASQRCYKTCVRSAPATGTPSPNRNAAVTEGEAGVPTVRSALSRGLWLSRNSVPMAEDS

SEQ ID NO: 2861 - protein, 1149 aa, Artificial Sequence
  derived and/or modified sequence
MRRGRLLEIALGFTVLLASYTSHGADANLEAGNVKETRASRAKRRGGGGHDALKGPNVCGSRYNAYCCPGWKTLPGGNQCIVPICRHSCGDGFCSRPNMCTCPSGQIAPSCGSRSIQHCNIRCMNGGSCSDDHCLCQKGYIGTHCGQPVCESGCLNGGRCVAPNRCACTYGFTGPQCERDYRTGPCFTVISNQMCQGQLSGIVCTKTLCCTYINECEIGAHNCGKHAVCTNTAGSFKCSCSPGWIGDGIKCTDLDECSNGTHMCSQHADCKNTMGSYRCLCKEGYTGDGFTCTDLDECSENLNLCGNGQCLNAPGGYRCECDMGFVPSADGKACEDIDECSLPNICVFGTCHNLPGLFRCECEIGYELDRSGGNCTDVNECLDPTTCISGNCVNTPGSYICDCPPDFELNPTRVGCVDTRSGNCYLDIRPRGDNGDTACSNEIGVGVSKASCCCSLGKAWGTPCEMCPAVNTSEYKILCPGGEGFRPNPITVILEDIDECQELPGLCQGGKCINTFGSFQCRCPTGYYLNEDTRVCDDVNECETPGICGPGTCYNTVGNYTCICPPDYMQVNGGNNCMDMRRSLCYRNYYADNQTCDGELLFNMTKKMCCCSYNIGRAWNKPCEQCPIPSTDEFATLCGSQRPGFVIDIYTGLPVDIDECREIPGVCENGVCINMVGSFRCECPVGFFYNDKLLVCEDIDECQNGPVCQRNAECINTAGSYRCDCKPGYRFTSTGQCNDRNECQEIPNICSHGQCIDTVGSFYCLCHTGFKTNDDQTMCLDINECERDACGNGTCRNTIGSFNCRCNHGFILSHNNDCIDVDECASGNGNLCRNGQCINTVGSFQCQCNEGYEVAPDGRTCVDINECLLEPRKCAPGTCQNLDGSYRCICPPGYSLQNEKCEDIDECVEEPEICALGTCSNTEGSFKCLCPEGFSLSSSGRRCQDLRMSYCYAKFEGGKCSSPKSRNHSKQECCCALKGEGWGDPCELCPTEPDEAFRQICPYGSGIIVGPDDSAVDMDECKEPDVCKHGQCINTDGSYRCECPFGYILAGNECVDTDECSVGNPCGNGTCKNVIGGFECTCEEGFEPGPMMTCEDINECAQNPLLCAFRCVNTYGSYECKCPVGYVLREDRRMCKDEDECEEGKHDCT

SEQ ID NO: 2862 - DNA, 11756 bp, Artificial Sequence
  derived and/or modified sequence
gtggtgatgagggcgacgaaggagggggtgtcattttctttttctttctttttttaaaaaaagtatttctctcgcgagaaaccgctgcgcggacgatacttgaagaggtggggaaaggagggggctgcgggagccgcggcagagactgtgggtgccacaagcggacaggagccacagctgggacagctgcgagcggagccgagcagtggctgtagcggccacgactgggagcagccgccgccgcctcctcgggagtcggagccgccgcttctccactggcaggggccgcctgaagtgggagcagcgcctggagaaggcgggaggagcccggcccgggggacgggcggcgggatagcgggaccccggcggcgcggtgcgcttcagggcgcagcggcggccgcagaccgagccccgggcgcggcaagaggcggcgggagccggtggcggctcggcatcatgcgtcgagggcgtctgctggagatcgccctgggatttaccgtgcttttagcgtcctacacgagccatggggcggacgccaatttggaggctgggaacgtgaaggaaaccagagccagtcgggccaagagaagaggcggtggaggacacgacgcgcttaaaggacccaatgtctgtggatcacgttataatgcttactgttgccctggatggaaaaccttacctggcggaaatcagtgtattgtccccatttgccggcattcctgtggggatggattttgttcgaggccaaatatgtgcacttgcccatctggtcagatagctccttcctgtggctccagatccatacaacactgcaatattcgctgtatgaatggaggtagctgcagtgacgatcactgtctatgccagaaaggatacatagggactcactgtggacaacctgtttgtgaaagtggctgtctcaatggaggaaggtgtgtggccccaaatcgatgtgcatgcacttacggatttactggaccccagtgtgaaagagattacaggacaggcccatgttttactgtgatcagcaaccagatgtgccagggacaactcagcgggattgtctgcacaaaaacgctctgctgtgccacagtcggccgagcctggggccacccctgtgagatgtgtcctgcccagcctcacccctgccgccgtggcttcattccaaatatccgcacgggagcttgtcaagatgtggatgaatgccaggccatccccgggctctgtcagggaggaaattgcattaatactgttgggtcttttgagtgcaaatgccctgctggacacaaacttaatgaagtgtcacaaaaatgtgaagatattgatgaatgcagcaccattcctggaatctgtgaagggggtgaatgtacaaacacagtcagcagttacttttgcaaatgtccccctggtttttacacctctccagatggtaccagatgcatagatgttcgcccaggatactgttacacagctctgacaaacgggcgctgctctaaccagctgccacagtccataaccaaaatgcagtgctgctgtgatgccggccgatgctggtctccaggggtcactgtcgcccctgagatgtgtcccatcagagcaaccgaggatttcaacaagctgtgctctgttcctatggtaattcctgggagaccagaatatcctcccccaccccttggccccattcctccagttctccctgttcctcctggctttcctcctggacctcaaattccggtccctcgaccaccagtggaatatctgtatccatctcgggagccaccaagggtgctgccagtaaacgttactgattactgccagttggtccgctatctctgtcaaaatggacgctgcattccaactcctgggagttgccggtgtgagtgcaacaaagggttccagctggacctccgtggggagtgtattgatgttgatgaatgtgagaaaaacccctgtgctggtggtgagtgtattaacaaccagggttcgtacacctgtcagtgccgagctggatatcagagcacactcacgcggacagaatgccgagacattgatgagtgtttacagaatggccggatctgcaataatggacgctgcatcaacacagatggcagttttcattgcgtgtgtaatgcgggctttcatgttacacgagatgggaagaactgtgaagatatggatgaatgcagcataaggaacatgtgccttaatggaatgtgtatcaatgaagatggcagttttaaatgtatttgcaaacctggattccagctggcatcagatggacgttattgcaaagacattaacgagtgtgaaacccctgggatctgcatgaatgggcgttgcgtcaacactgatggctcctacagatgtgaatgcttccctggactggctgtgggtctggatggccgtgtgtgtgttgacacacacatgcggagcacatgctatggtggatacaagagaggccagtgtatcaaacctttgtttggtgctgtcactaaatctgaatgctgttgcgccagcactgagtatgcatttggggaaccttgccagccgtgtcctgcacagaattcagcggaatatcaggcactctgcagcagtgggccaggaatgacgtcagcaggcagtgatataaatgaatgtgcactagatcctgatatttgcccaaatggaatctgtgaaaaccttcgtgggacctataaatgtatatgcaattcaggatatgaagtggattcaactgggaaaaactgcgttgatattaatgaatgtgtactgaacagtctcctttgtgacaatggacaatgtagaaatactcctggaagttttgtctgtacctgccccaagggatttatctacaaacctgatctaaaaacatgtgaagacattgatgaatgcgaatcaagtccttgcattaatggagtctgcaagaacagcccaggctcttttatttgtgaatgttcttctgaaagtactttggatccaacaaaaaccatctgcatagaaaccatcaagggcacttgctggcagactgtcattgatgggcgatgtgagatcaacatcaatggagccaccttaaagtcccagtgctgctcctccctcggtgctgcgtggggaagcccgtgcaccctatgccaagttgatcccatatgtggtaaagggtactcaagaattaaaggaacacaatgtgaagatatagatgaatgtgaagtgttcccaggagtgtgtaaaaatggcctgtgtgttaacactagggggtcattcaagtgtcagtgtcccagtggaatgactttggatgccacaggaaggatctgtcttgatatccgcctggaaacctgcttcctgaggtacgaggacgaggagtgcaccctgcctattgctggccgccaccgcatggacgcctgctgctgctccgtcggggcagcctggggtactgaggaatgcgaggagtgtcccatgagaaatactcctgagtacgaggagctgtgtccgagaggacccggatttgccacaaaagaaattacaaatggaaagcctttcttcaaagatatcaatgagtgcaagatgatacccagcctctgcacccacggcaagtgcagaaacaccattggcagctttaagtgcaggtgtgacagcggctttgctcttgattctgaagaaaggaactgcacagacattgacgaatgccgcatatctcctgacctctgtggcagaggccagtgtgtgaacacccctggggactttgaatgcaagtgtgacgaaggctatgaaagtggattcatgatgatgaagaactgcatggatattgatgagtgtcagagagatcctctcctatgccgaggtggtgtttgccataacacagagggaagttaccgctgtgaatgcccgcctggccatcagctgtcccccaacatctccgcgtgtatcgacatcaatgaatgtgagctgagtgcacacctgtgccccaatggccgttgcgtgaacctcatagggaagtatcagtgtgcctgcaaccctggctaccattcaactcccgataggctattttgtgttgacattgatgaatgcagcataatgaatggtggttgtgaaaccttctgcacaaactctgaaggcagctatgaatgtagctgtcagccgggatttgcactaatgcctgaccagagatcatgcaccgacatcgatgagtgtgaagataatcccaatatctgtgatggtggtcagtgcacaaatatccctggagagtacaggtgcttgtgttatgatggattcatggcatctgaagacatgaagacttgtgtagatgtcaatgagtgtgacctgaatccaaatatctgcctaagtgggacctgtgaaaacacgaaaggctcatttatctgccactgtgatatgggctactccggcaaaaaaggaaaaactggctgtacagacatcaatgaatgtgaaattggagcacacaactgtggcaaacatgctgtatgtaccaatacagcaggaagcttcaaatgtagctgcagtcccgggtggattggagatggcattaagtgcactgatctggacgaatgttccaatggaacccatatgtgcagccagcatgcagactgcaagaataccatgggatcttaccgctgtctgtgcaaggaaggatacacaggtgatggcttcacttgtacagaccttgatgagtgctctgagaacctgaatctctgtggcaatggccagtgcctcaatgcaccaggaggataccgctgtgaatgcgacatgggcttcgtgcccagtgctgacgggaaagcctgtgaagatattgatgagtgctcccttccgaacatctgtgtctttggaacttgccacaacctccctggcctgttccgctgtgagtgtgagataggctacgaactggacagaagcggcgggaactgcacagatgtgaatgaatgcctggatccaaccacgtgcatcagtgggaactgtgtcaacactccaggcagctatatctgtgactgcccacctgattttgaactgaacccaactcgagttggctgtgttgatacccgctctggaaattgctatttggatattcgacctcgaggagacaatggagatacagcctgcagcaatgaaattggagttggtgtttccaaagcttcctgctgctgttctctgggtaaagcctggggtactccttgtgagatgtgtcctgctgtgaacacatccgagtacaaaattctttgtcctggaggggaaggtttccgaccaaatcctatcaccgttatattggaagatattgatgagtgccaggagctaccagggctgtgccaaggaggaaaatgtatcaacacctttgggagtttccagtgccgctgtccaaccggctactacctgaatgaagatacacgagtgtgtgatgatgtgaatgaatgtgagactcctggaatctgtggtccagggacatgttacaacaccgttggcaactacacctgtatctgtcctccagactacatgcaagtgaatgggggaaataattgcatggatatgagaagaagtttgtgctacagaaactactatgctgacaaccagacctgtgatggagaattgttattcaacatgaccaagaagatgtgctgctgttcctacaacattggccgggcgtggaacaagccctgtgaacagtgtcccatcccaagtacagatgagtttgctacactctgtggaagtcaaaggccaggctttgtcatcgacatttataccggtttacccgttgatattgatgagtgccgggagatcccaggggtctgtgaaaatggagtgtgtatcaacatggttggcagcttccgatgtgaatgtccagtgggattcttctataatgacaagttgttggtttgtgaagatattgacgagtgtcagaacggcccagtgtgccagcgcaacgccgaatgcatcaacactgcaggcagctaccgctgtgactgtaagcccggctaccgcttcacctccacaggacagtgcaatgatcgtaatgaatgtcaagaaatccccaatatatgcagtcatgggcagtgcattgacacagttggaagcttttattgcctttgccacactggttttaaaacaaatgatgaccaaaccatgtgcttggacataaatgaatgtgaaagagatgcctgtgggaatggaacttgccggaacacaattggttccttcaactgccgctgcaatcatggtttcatcctttctcacaacaatgactgtatagatgttgatgaatgtgcaagtggaaatgggaatctttgcagaaatggccaatgcattaatacagtggggtctttccagtgccagtgcaatgaaggctatgaggtggctccagatgggaggacctgtgtggatatcaatgaatgtcttctagaacccagaaaatgtgcaccaggtacctgtcaaaacttggatgggtcctacagatgcatttgcccacctggatacagtcttcaaaatgagaagtgtgaagatattgatgagtgtgtcgaagagccagaaatttgtgccctgggcacatgcagtaacactgaaggcagcttcaaatgtctgtgtccagaagggttttccttgtcctccagtggaagaaggtgccaagatttgcgaatgagctactgttatgcgaagtttgaaggaggaaagtgttcatcacccaaatccagaaatcactccaagcaggaatgctgctgtgccttgaagggagaaggctggggagacccctgcgagctctgccccacggaacctgatgaggccttccgccagatatgtccttatggaagtgggatcatcgtgggacctgatgattcagcagttgatatggacgaatgcaaagaacccgatgtctgtaaacatggacagtgcatcaatacagatggttcctatcgctgcgagtgtccctttggttatattctagcagggaatgaatgtgtagatactgatgaatgttctgttggcaatccttgtggaaatggaacctgcaagaatgtgattggaggttttgaatgcacctgcgaggagggatttgagcccggtccaatgatgacatgtgaagatataaatgaatgtgcccagaatcctctgctctgtgccttccgatgtgtgaacacttatgggtcatatgaatgcaaatgtcccgtgggatatgtgctcagagaagaccgtaggatgtgcaaagatgaggatgagtgtgaagagggaaaacatgactgtactgaaaaacaaatggaatgcaagaacctcattggcacatatatgtgcatctgtggacccgggtatcagcggagacctgatggagaaggctgtgtagatgagaatgaatgtcagacgaagccagggatctgtgagaatgggcgctgcctcaacacccgtgggagctacacctgtgagtgtaatgatgggtttaccgccagccccaaccaggacgagtgccttgacaatcgggaagggtactgcttcacagaggtgctacaaaacatgtgtcagatcggctccagcaacaggaaccccgtcaccaaatcggaatgctgctgtgacggagggagaggctggggtccccactgtgagatctgccctttccaggggactgtggctttcaagaaactctgtccccatggccgaggattcatgaccaatggagcagatatcgatgaatgcaaggttattcacgatgtttgccgaaatggggaatgtgtcaatgacagaggatcatatcattgcatttgtaaaactgggtacactccagatataactgggacttcctgtgtagatctgaacgagtgcaaccaggctcccaaaccctgcaattttatctgcaaaaacacagaagggagttaccagtgttcatgcccgaaaggctacattctgcaagaggatggaaggagctgcaaagatcttgatgagtgtgcaaccaagcaacacaactgccagttcctatgtgttaacaccattggcggcttcacatgcaaatgtcctcccggatttacccaacaccatacgtcctgcattgataacaatgaatgcacctctgacatcaatctgtgcgggtctaagggcatttgccagaacactcctggaagcttcacctgtgaatgccagcggggattctcacttgatcagaccggctccagctgtgaagacgtggacgagtgtgagggtaaccaccgctgccagcatggctgccagaacatcattgggggctacaggtgcagctgcccccagggctacctccagcactaccagtggaaccagtgtgttgatgaaaacgaatgcctcagcgctcacatctgcggaggagcctcctgtcacaacaccctggggagctacaagtgcatgtgtcccgccggcttccagtatgaacagttcagtggaggatgccaagacatcaatgaatgtggctctgcgcaggccccctgcagctatggctgttccaataccgagggcggttacctgtgtggctgtccacctggttacttccgcataggccaagggcactgtgtttctggaatgggcatgggccgaggaaacccagagccacctgtcagtggtgaaatggatgacaattcactctccccagaggcttgttacgagtgtaagatcaatggctaccccaaacggggcaggaaacggagaagcacaaacgaaactgatgcctccaatatcgaggatcagtctgagacagaagccaatgtgagtcttgcaagttgggatgttgagaagacagccatctttgctttcaatatttcccacgtcagtaacaaggttcgaatcctagaactccttccagctcttacaactctgacgaatcacaacagatacttgatcgaatctggaaatgaagatggcttctttaaaatcaaccaaaaggaagggatcagctacctccacttcacaaagaagaagccagtggctggaacctattcattacaaatcagtagtactccactttataaaaagaaagaacttaaccaactagaagacaaatatgacaaagactacctcagtggtgaactgggtgataatctgaagatgaaaatccaggttttgcttcattaattcaccatccagagaccaaataattaaaagaaaaacaaatatagataggtagaactatattttcccccaatcagaatcatcatatcataggtacaatctttcaccaagtaaatttgtataaataagcactattctttgtattaccaaagcaaggtacaggtgactaccctagttcaaaacaaccactttctcaggcttctcatgtgtgtagctaagctaccttgtcatatgtgttgattcttgaaaactgggacgtgtatttccattgggggttggccatttatgctgacatgccatccttccagcaaacgtacgggaatgtgctttcaattgatggactactctattttttgcaaatttgtaaactttgcttctccaaatacaagtactaggttgtccatttatggtacctatttggtgctagtaaattttcaaactagatttataaatgcactgtaatatgtacacaacttagaaaccaaattacaagtattcagttccaatacttcattaatttcaatcaaccaaagttagttcagtagcttatctcagttatgagtataatacattacatgtaaattaagtgtgtgtatactgtaatcgtgctattttttatcattgaaacatttataaactagaataataatgcccttaatgtgagggtttgtaatggtgcttattaagaccaaagacttgttaaatgtatacaccaagtggtaatgaaatttcggtgactggcccacacgtgcatagaggtctgggaggaccaggaaacagcctcagtggccagaggatcaccagtgcatccttcatcacagcatgtgcaatatgccaagattaccctcggtcattcctgtcaacaaggggtcaatgtcataaatgtcacaataaaacaatctcttcttttttttagtttaccccttggctttgtgttcttgcatggatttggggttggaggggccattccggaggctaaataaagtctcctggatttaaattatcctgggtctcttacttatggcttatgaaagtaccaaatgtataaccactagaagaaaatttaacatatgagtcgatcccttgttttatccattgaaagtagcagagtctggtgtcattaacctgacttgcttgtgagaaatttagattgtagagtcatttctgaaacatgacctaattcatcttgtgacttttaaatagtcttaaataccaagttcagtcattgtcttagagcacatgaatttcattataatagatttatcatgcccccctctcaaatatacacagttttggcaagccttaggtgttctgttccatttttttttcccctaaacatctttcgttagtcaatgctcatctaattacaaagggataatcccagactgtatccaattgctgtaacttttggtttcttaatgtcataatttttaaagtctgttttattttaagtgcaatattgagtatttagctgttaggctcaatccgtcgatatgaaataattttttaaatccctaagggcaggaaagcatttcgtggtagtgaaaataagaggaaataagatggcatgaaggtggtgggcggagaaactaggtaggacacaggaaagtgctctcaaaaatctttgaagagctcagctgaaaaaaatggagtagatttggctcatactattccggaaggcaaaaccagggtcagctgatgtcagccccagtttaatacacacggtcccaattatagagctactcactgaaagaatgggtttccttgcattgtggtgagctccctgtcacaagatagaagagtttcagtctaggcttaatggcaaccattggacaaagatgctttcttccacctaacaggccattaacatcttaaaggtatttttgtatctctaattttgtttataataggtgctcaacagaatgagctgaatggctgttacaaagggggtttgtaccttgggtaagagattaaaatataactcaaaatttccttctaacgctgcacctatggaaccatgtgatagaggtgtattaaaattgttatcgaagaatatatagcatatggtaaacaacagtttgcatatggaaaatgtctttgataatttaaccagaactgcattatattcaataacggattttctttataacaaacaacaggggaaaatggagttggcacacagtggatcactttgatatttttaatagtccaagtctggattttatttattcctgagccaacaattttgaacagcatattttccatgtttctgactgtaacaaaacattttcctcattgttccattgtaaatattcctcttgttggaactctttttaatcctgagatttaaacctgtacctttcaattgtctgtgacctttcaatttcactttcaatagttgaagaacttggctttgtaaatctctcagaagcttgaaaatatcttgtctctaccccctcagcccatttcatttgccaataattattttgtaagtagggttgaaatgaactcagctggccttgtgaaatgtttaaacttgcacaaacaactacatttttgttcaacaaatagcagtttactcagccaaaatcactttggatattgccattacaaatactgttaaacttcagaaatcatgtctgtaaattagatgagccaaaataaaggacaattgggttgatgctgca

SEQ ID NO: 2863 - DNA, 11757 bp, Artificial Sequence
  derived and/or modified sequence
agtatttctctcgcgagaaaccgctgcgcggacgatacttgaagaggtggggaaaggagggggctgcgggagccgcggcagagactgtgggtgccacaagcggacaggagccacagctgggacagctgcgagcggagccgagcagtggctgtagcggccacgactgggagcagccgccgccgcctcctcgggagtcggagccgccgcttctccactggcaggggccgcctgaagtgggagcagcgcctggagaaggcgggaggagcccggcccgggggacgggcggcgggatagcgggaccccggcggcgcggtgcgcttcagggcgcagcggcggccgcagaccgagccccgggcgcggcaagaggcggcgggagccggtggcggctcggcatcatgcgtcgagggcgtctgctggagatcgccctgggatttaccgtgcttttagcgtcctacacgagccatggggcggacgccaatttggaggctgggaacgtgaaggaaaccagagccagtcgggccaagagaagaggcggtggaggacacgacgcgcttaaaggacccaatgtctgtggatcacgttataatgcttactgttgccctggatggaaaaccttacctggcggaaatcagtgtattgtccccatttgccggcattcctgtggggatggattttgttcgaggccaaatatgtgcacttgcccatctggtcagatagctccttcctgtggctccagatccatacaacactgcaatattcgctgtatgaatggaggtagctgcagtgacgatcactgtctatgccagaaaggatacatagggactcactgtggacaacctgtttgtgaaagtggctgtctcaatggaggaaggtgtgtggccccaaatcgatgtgcatgcacttacggatttactggaccccagtgtgaaagagattacaggacaggcccatgttttactgtgatcagcaaccagatgtgccagggacaactcagcgggattgtctgcacaaaaacgctctgctgtgccacagtcggccgagcctggggccacccctgtgagatgtgtcctgcccagcctcacccctgccgccgtggcttcattccaaatatccgcacgggagcttgtcaagatgtggatgaatgccaggccatccccgggctctgtcagggaggaaattgcattaatactgttgggtcttttgagtgcaaatgccctgctggacacaaacttaatgaagtgtcacaaaaatgtgaagatattgatgaatgcagcaccattcctggaatctgtgaagggggtgaatgtacaaacacagtcagcagttacttttgcaaatgtccccctggtttttacacctctccagatggtaccagatgcatagatgttcgcccaggatactgttacacagctctgacaaacgggcgctgctctaaccagctgccacagtccataaccaaaatgcagtgctgctgtgatgccggccgatgctggtctccaggggtcactgtcgcccctgagatgtgtcccatcagagcaaccgaggatttcaacaagctgtgctctgttcctatggtaattcctgggagaccagaatatcctcccccaccccttggccccattcctccagttctccctgttcctcctggctttcctcctggacctcaaattccggtccctcgaccaccagtggaatatctgtatccatctcgggagccaccaagggtgctgccagtaaacgttactgattactgccagttggtccgctatctctgtcaaaatggacgctgcattccaactcctgggagttgccggtgtgagtgcaacaaagggttccagctggacctccgtggggagtgtattgatgttgatgaatgtgagaaaaacccctgtgctggtggtgagtgtattaacaaccagggttcgtacacctgtcagtgccgagctggatatcagagcacactcacgcggacagaatgccgagacattgatgagtgtttacagaatggccggatctgcaataatggacgctgcatcaacacagatggcagttttcattgcgtgtgtaatgcgggctttcatgttacacgagatgggaagaactgtgaagatatggatgaatgcagcataaggaacatgtgccttaatggaatgtgtatcaatgaagatggcagttttaaatgtatttgcaaacctggattccagctggcatcagatggacgttattgcaaagacattaacgagtgtgaaacccctgggatctgcatgaatgggcgttgcgtcaacactgatggctcctacagatgtgaatgcttccctggactggctgtgggtctggatggccgtgtgtgtgttgacacacacatgcggagcacatgctatggtggatacaagagaggccagtgtatcaaacctttgtttggtgctgtcactaaatctgaatgctgttgcgccagcactgagtatgcatttggggaaccttgccagccgtgtcctgcacagaattcagcggaatatcaggcactctgcagcagtgggccaggaatgacgtcagcaggcagtgatataaatgaatgtgcactagatcctgatatttgcccaaatggaatctgtgaaaaccttcgtgggacctataaatgtatatgcaattcaggatatgaagtggattcaactgggaaaaactgcgttgatattaatgaatgtgtactgaacagtctcctttgtgacaatggacaatgtagaaatactcctggaagttttgtctgtacctgccccaagggatttatctacaaacctgatctaaaaacatgtgaagacattgatgaatgcgaatcaagtccttgcattaatggagtctgcaagaacagcccaggctcttttatttgtgaatgttcttctgaaagtactttggatccaacaaaaaccatctgcatagaaaccatcaagggcacttgctggcagactgtcattgatgggcgatgtgagatcaacatcaatggagccaccttaaagtcccagtgctgctcctccctcggtgctgcgtggggaagcccgtgcaccctatgccaagttgatcccatatgtggtaaagggtactcaagaattaaaggaacacaatgtgaagatatagatgaatgtgaagtgttcccaggagtgtgtaaaaatggcctgtgtgttaacactagggggtcattcaagtgtcagtgtcccagtggaatgactttggatgccacaggaaggatctgtcttgatatccgcctggaaacctgcttcctgaggtacgaggacgaggagtgcaccctgcctattgctggccgccaccgcatggacgcctgctgctgctccgtcggggcagcctggggtactgaggaatgcgaggagtgtcccatgagaaatactcctgagtacgaggagctgtgtccgagaggacccggatttgccacaaaagaaattacaaatggaaagcctttcttcaaagatatcaatgagtgcaagatgatacccagcctctgcacccacggcaagtgcagaaacaccattggcagctttaagtgcaggtgtgacagcggctttgctcttgattctgaagaaaggaactgcacagacattgacgaatgccgcatatctcctgacctctgtggcagaggccagtgtgtgaacacccctggggactttgaatgcaagtgtgacgaaggctatgaaagtggattcatgatgatgaagaactgcatggatattgatgagtgtcagagagatcctctcctatgccgaggtggtgtttgccataacacagagggaagttaccgctgtgaatgcccgcctggccatcagctgtcccccaacatctccgcgtgtatcgacatcaatgaatgtgagctgagtgcacacctgtgccccaatggccgttgcgtgaacctcatagggaagtatcagtgtgcctgcaaccctggctaccattcaactcccgataggctattttgtgttgacattgatgaatgcagcataatgaatggtggttgtgaaaccttctgcacaaactctgaaggcagctatgaatgtagctgtcagccgggatttgcactaatgcctgaccagagatcatgcaccgacatcgatgagtgtgaagataatcccaatatctgtgatggtggtcagtgcacaaatatccctggagagtacaggtgcttgtgttatgatggattcatggcatctgaagacatgaagacttgtgtagatgtcaatgagtgtgacctgaatccaaatatctgcctaagtgggacctgtgaaaacacgaaaggctcatttatctgccactgtgatatgggctactccggcaaaaaaggaaaaactggctgtacagacatcaatgaatgtgaaattggagcacacaactgtggcaaacatgctgtatgtaccaatacagcaggaagcttcaaatgtagctgcagtcccgggtggattggagatggcattaagtgcactgatctggacgaatgttccaatggaacccatatgtgcagccagcatgcagactgcaagaataccatgggatcttaccgctgtctgtgcaaggaaggatacacaggtgatggcttcacttgtacagaccttgatgagtgctctgagaacctgaatctctgtggcaatggccagtgcctcaatgcaccaggaggataccgctgtgaatgcgacatgggcttcgtgcccagtgctgacgggaaagcctgtgaagatattgatgagtgctcccttccgaacatctgtgtctttggaacttgccacaacctccctggcctgttccgctgtgagtgtgagataggctacgaactggacagaagcggcgggaactgcacagatgtgaatgaatgcctggatccaaccacgtgcatcagtgggaactgtgtcaacactccaggcagctatatctgtgactgcccacctgattttgaactgaacccaactcgagttggctgtgttgatacccgctctggaaattgctatttggatattcgacctcgaggagacaatggagatacagcctgcagcaatgaaattggagttggtgtttccaaagcttcctgctgctgttctctgggtaaagcctggggtactccttgtgagatgtgtcctgctgtgaacacatccgagtacaaaattctttgtcctggaggggaaggtttccgaccaaatcctatcaccgttatattggaagatattgatgagtgccaggagctaccagggctgtgccaaggaggaaaatgtatcaacacctttgggagtttccagtgccgctgtccaaccggctactacctgaatgaagatacacgagtgtgtgatgatgtgaatgaatgtgagactcctggaatctgtggtccagggacatgttacaacaccgttggcaactacacctgtatctgtcctccagactacatgcaagtgaatgggggaaataattgcatggatatgagaagaagtttgtgctacagaaactactatgctgacaaccagacctgtgatggagaattgttattcaacatgaccaagaagatgtgctgctgttcctacaacattggccgggcgtggaacaagccctgtgaacagtgtcccatcccaagtacagatgagtttgctacactctgtggaagtcaaaggccaggctttgtcatcgacatttataccggtttacccgttgatattgatgagtgccgggagatcccaggggtctgtgaaaatggagtgtgtatcaacatggttggcagcttccgatgtgaatgtccagtgggattcttctataatgacaagttgttggtttgtgaagatattgacgagtgtcagaacggcccagtgtgccagcgcaacgccgaatgcatcaacactgcaggcagctaccgctgtgactgtaagcccggctaccgcttcacctccacaggacagtgcaatgatcgtaatgaatgtcaagaaatccccaatatatgcagtcatgggcagtgcattgacacagttggaagcttttattgcctttgccacactggttttaaaacaaatgatgaccaaaccatgtgcttggacataaatgaatgtgaaagagatgcctgtgggaatggaacttgccggaacacaattggttccttcaactgccgctgcaatcatggtttcatcctttctcacaacaatgactgtatagatgttgatgaatgtgcaagtggaaatgggaatctttgcagaaatggccaatgcattaatacagtggggtctttccagtgccagtgcaatgaaggctatgaggtggctccagatgggaggacctgtgtggatatcaatgaatgtcttctagaacccagaaaatgtgcaccaggtacctgtcaaaacttggatgggtcctacagatgcatttgcccacctggatacagtcttcaaaatgagaagtgtgaagatattgatgagtgtgtcgaagagccagaaatttgtgccctgggcacatgcagtaacactgaaggcagcttcaaatgtctgtgtccagaagggttttccttgtcctccagtggaagaaggtgccaagatttgcgaatgagctactgttatgcgaagtttgaaggaggaaagtgttcatcacccaaatccagaaatcactccaagcaggaatgctgctgtgccttgaagggagaaggctggggagacccctgcgagctctgccccacggaacctgatgaggccttccgccagatatgtccttatggaagtgggatcatcgtgggacctgatgattcagcagttgatatggacgaatgcaaagaacccgatgtctgtaaacatggacagtgcatcaatacagatggttcctatcgctgcgagtgtccctttggttatattctagcagggaatgaatgtgtagatactgatgaatgttctgttggcaatccttgtggaaatggaacctgcaagaatgtgattggaggttttgaatgcacctgcgaggagggatttgagcccggtccaatgatgacatgtgaagatataaatgaatgtgcccagaatcctctgctctgtgccttccgatgtgtgaacacttatgggtcatatgaatgcaaatgtcccgtgggatatgtgctcagagaagaccgtaggatgtgcaaagatgaggatgagtgtgaagagggaaaacatgactgtactgaaaaacaaatggaatgcaagaacctcattggcacatatatgtgcatctgtggacccgggtatcagcggagacctgatggagaaggctgtgtagatgagaatgaatgtcagacgaagccagggatctgtgagaatgggcgctgcctcaacacccgtgggagctacacctgtgagtgtaatgatgggtttaccgccagccccaaccaggacgagtgccttgacgtcatcctttctcttttactgctgtctccagctttcccctcttgcttcttctcacccaggacaatcgggaagggtactgcttcacagaggtgctacaaaacatgtgtcagatcggctccagcaacaggaaccccgtcaccaaatcggaatgctgctgtgacggagggagaggctggggtccccactgtgagatctgccctttccaggggactgtggctttcaagaaactctgtccccatggccgaggattcatgaccaatggagcagatatcgatgaatgcaaggttattcacgatgtttgccgaaatggggaatgtgtcaatgacagaggatcatatcattgcatttgtaaaactgggtacactccagatataactgggacttcctgtgtagatctgaacgagtgcaaccaggctcccaaaccctgcaattttatctgcaaaaacacagaagggagttaccagtgttcatgcccgaaaggctacattctgcaagaggatggaaggagctgcaaagatcttgatgagtgtgcaaccaagcaacacaactgccagttcctatgtgttaacaccattggcggcttcacatgcaaatgtcctcccggatttacccaacaccatacgtcctgcattgataacaatgaatgcacctctgacatcaatctgtgcgggtctaagggcatttgccagaacactcctggaagcttcacctgtgaatgccagcggggattctcacttgatcagaccggctccagctgtgaagacgtggacgagtgtgagggtaaccaccgctgccagcatggctgccagaacatcattgggggctacaggtgcagctgcccccagggctacctccagcactaccagtggaaccagtgtgttgatgaaaacgaatgcctcagcgctcacatctgcggaggagcctcctgtcacaacaccctggggagctacaagtgcatgtgtcccgccggcttccagtatgaacagttcagtggaggatgccaagacatcaatgaatgtggctctgcgcaggccccctgcagctatggctgttccaataccgagggcggttacctgtgtggctgtccacctggttacttccgcataggccaagggcactgtgtttctggaatgggcatgggccgaggaaacccagagccacctgtcagtggtgaaatggatgacaattcactctccccagaggcttgttacgagtgtaagatcaatggctaccccaaacggggcaggaaacggagaagcacaaacgaaactgatgcctccaatatcgaggatcagtctgagacagaagccaatgtgagtcttgcaagttgggatgttgagaagacagccatctttgctttcaatatttcccacgtcagtaacaaggttcgaatcctagaactccttccagctcttacaactctgacgaatcacaacagatacttgatcgaatctggaaatgaagatggcttctttaaaatcaaccaaaaggaagggatcagctacctccacttcacaaagaagaagccagtggctggaacctattcattacaaatcagtagtactccactttataaaaagaaagaacttaaccaactagaagacaaatatgacaaagactacctcagtggtgaactgggtgataatctgaagatgaaaatccaggttttgcttcattaattcaccatccagagaccaaataattaaaagaaaaacaaatatagataggtagaactatattttcccccaatcagaatcatcatatcataggtacaatctttcaccaagtaaatttgtataaataagcactattctttgtattaccaaagcaaggtacaggtgactaccctagttcaaaacaaccactttctcaggcttctcatgtgtgtagctaagctaccttgtcatatgtgttgattcttgaaaactgggacgtgtatttccattgggggttggccatttatgctgacatgccatccttccagcaaacgtacgggaatgtgctttcaattgatggactactctattttttgcaaatttgtaaactttgcttctccaaatacaagtactaggttgtccatttatggtacctatttggtgctagtaaattttcaaactagatttataaatgcactgtaatatgtacacaacttagaaaccaaattacaagtattcagttccaatacttcattaatttcaatcaaccaaagttagttcagtagcttatctcagttatgagtataatacattacatgtaaattaagtgtgtgtatactgtaatcgtgctattttttatcattgaaacatttataaactagaataataatgcccttaatgtgagggtttgtaatggtgcttattaagaccaaagacttgttaaatgtatacaccaagtggtaatgaaatttcggtgactggcccacacgtgcatagaggtctgggaggaccaggaaacagcctcagtggccagaggatcaccagtgcatccttcatcacagcatgtgcaatatgccaagattaccctcggtcattcctgtcaacaaggggtcaatgtcataaatgtcacaataaaacaatctcttcttttttttagtttaccccttggctttgtgttcttgcatggatttggggttggaggggccattccggaggctaaataaagtctcctggatttaaattatcctgggtctcttacttatggcttatgaaagtaccaaatgtataaccactagaagaaaatttaacatatgagtcgatcccttgttttatccattgaaagtagcagagtctggtgtcattaacctgacttgcttgtgagaaatttagattgtagagtcatttctgaaacatgacctaattcatcttgtgacttttaaatagtcttaaataccaagttcagtcattgtcttagagcacatgaatttcattataatagatttatcatgcccccctctcaaatatacacagttttggcaagccttaggtgttctgttccatttttttttcccctaaacatctttcgttagtcaatgctcatctaattacaaagggataatcccagactgtatccaattgctgtaacttttggtttcttaatgtcataatttttaaagtctgttttattttaagtgcaatattgagtatttagctgttaggctcaatccgtcgatatgaaataattttttaaatccctaagggcaggaaagcatttcgtggtagtgaaaataagaggaaataagatggcatgaaggtggtgggcggagaaactaggtaggacacaggaaagtgctctcaaaaatctttgaagagctcagctgaaaaaaatggagtagatttggctcatactattccggaaggcaaaaccagggtcagctgatgtcagccccagtttaatacacacggtcccaattatagagctactcactgaaagaatgggtttccttgcattgtggtgagctccctgtcacaagatagaagagtttcagtctaggcttaatggcaaccattggacaaagatgctttcttccacctaacaggccattaacatcttaaaggtatttttgtatctctaattttgtttataataggtgctcaacagaatgagctgaatggctgttacaaagggggtttgtaccttgggtaagagattaaaatataactcaaaatttccttctaacgctgcacctatggaaccatgtgatagaggtgtattaaaattgttatcgaagaatatatagcatatggtaaacaacagtttgcatatggaaaatgtctttgataatttaaccagaactgcattatattcaataacggattttctttataacaaacaacaggggaaaatggagttggcacacagtggatcactttgatatttttaatagtccaagtctggattttatttattcctgagccaacaattttgaacagcatattttccatgtttctgactgtaacaaaacattttcctcattgttccattgtaaatattcctcttgttggaactctttttaatcctgagatttaaacctgtacctttcaattgtctgtgacctttcaatttcactttcaatagttgaagaacttggctttgtaaatctctcagaagcttgaaaatatcttgtctctaccccctcagcccatttcatttgccaataattattttgtaagtagggttgaaatgaactcagctggccttgtgaaatgtttaaacttgcacaaacaactacatttttgttcaacaaatagcagtttactcagccaaaatcactttggatattgccattacaaatactgttaaacttcagaaatcatgtctgtaaattagatgagccaaaataaaggacaattgggttgatgctgca

SEQ ID NO: 2864 - DNA, 8365 bp, Artificial Sequence
  derived and/or modified sequence
agtatttctctcgcgagaaaccgctgcgcggacgatacttgaagaggtggggaaaggagggggctgcgggagccgcggcagagactgtgggtgccacaagcggacaggagccacagctgggacagctgcgagcggagccgagcagtggctgtagcggccacgactgggagcagccgccgccgcctcctcgggagtcggagccgccgcttctccactggcaggggccgcctgaagtgggagcagcgcctggagaaggcgggaggagcccggcccgggggacgggcggcgggatagcgggaccccggcggcgcggtgcgcttcagggcgcagcggcggccgcagaccgagccccgggcgcggcaagaggcggcgggagccggtggcggctcggcatcatgcgtcgagggcgtctgctggagatcgccctgggatttaccgtgcttttagcgtcctacacgagccatggggcggacgccaatttggaggctgggaacgtgaaggaaaccagagccagtcgggccaagagaagaggcggtggaggacacgacgcgcttaaaggacccaatgtctgtggatcacgttataatgcttactgttgccctggatggaaaaccttacctggcggaaatcagtgtattgtccccatttgccggcattcctgtggggatggattttgttcgaggccaaatatgtgcacttgcccatctggtcagatagctccttcctgtggctccagatccatacaacactgcaatattcgctgtatgaatggaggtagctgcagtgacgatcactgtctatgccagaaaggatacatagggactcactgtggacaacctgtttgtgaaagtggctgtctcaatggaggaaggtgtgtggccccaaatcgatgtgcatgcacttacggatttactggaccccagtgtgaaagagattacaggacaggcccatgttttactgtgatcagcaaccagatgtgccagggacaactcagcgggattgtctgcacaaaaacgctctgctgcacctacatcaatgaatgtgaaattggagcacacaactgtggcaaacatgctgtatgtaccaatacagcaggaagcttcaaatgtagctgcagtcccgggtggattggagatggcattaagtgcactgatctggacgaatgttccaatggaacccatatgtgcagccagcatgcagactgcaagaataccatgggatcttaccgctgtctgtgcaaggaaggatacacaggtgatggcttcacttgtacagaccttgatgagtgctctgagaacctgaatctctgtggcaatggccagtgcctcaatgcaccaggaggataccgctgtgaatgcgacatgggcttcgtgcccagtgctgacgggaaagcctgtgaagatattgatgagtgctcccttccgaacatctgtgtctttggaacttgccacaacctccctggcctgttccgctgtgagtgtgagataggctacgaactggacagaagcggcgggaactgcacagatgtgaatgaatgcctggatccaaccacgtgcatcagtgggaactgtgtcaacactccaggcagctatatctgtgactgcccacctgattttgaactgaacccaactcgagttggctgtgttgatacccgctctggaaattgctatttggatattcgacctcgaggagacaatggagatacagcctgcagcaatgaaattggagttggtgtttccaaagcttcctgctgctgttctctgggtaaagcctggggtactccttgtgagatgtgtcctgctgtgaacacatccgagtacaaaattctttgtcctggaggggaaggtttccgaccaaatcctatcaccgttatattggaagatattgatgagtgccaggagctaccagggctgtgccaaggaggaaaatgtatcaacacctttgggagtttccagtgccgctgtccaaccggctactacctgaatgaagatacacgagtgtgtgatgatgtgaatgaatgtgagactcctggaatctgtggtccagggacatgttacaacaccgttggcaactacacctgtatctgtcctccagactacatgcaagtgaatgggggaaataattgcatggatatgagaagaagtttgtgctacagaaactactatgctgacaaccagacctgtgatggagaattgttattcaacatgaccaagaagatgtgctgctgttcctacaacattggccgggcgtggaacaagccctgtgaacagtgtcccatcccaagtacagatgagtttgctacactctgtggaagtcaaaggccaggctttgtcatcgacatttataccggtttacccgttgatattgatgagtgccgggagatcccaggggtctgtgaaaatggagtgtgtatcaacatggttggcagcttccgatgtgaatgtccagtgggattcttctataatgacaagttgttggtttgtgaagatattgacgagtgtcagaacggcccagtgtgccagcgcaacgccgaatgcatcaacactgcaggcagctaccgctgtgactgtaagcccggctaccgcttcacctccacaggacagtgcaatgatcgtaatgaatgtcaagaaatccccaatatatgcagtcatgggcagtgcattgacacagttggaagcttttattgcctttgccacactggttttaaaacaaatgatgaccaaaccatgtgcttggacataaatgaatgtgaaagagatgcctgtgggaatggaacttgccggaacacaattggttccttcaactgccgctgcaatcatggtttcatcctttctcacaacaatgactgtatagatgttgatgaatgtgcaagtggaaatgggaatctttgcagaaatggccaatgcattaatacagtggggtctttccagtgccagtgcaatgaaggctatgaggtggctccagatgggaggacctgtgtggatatcaatgaatgtcttctagaacccagaaaatgtgcaccaggtacctgtcaaaacttggatgggtcctacagatgcatttgcccacctggatacagtcttcaaaatgagaagtgtgaagatattgatgagtgtgtcgaagagccagaaatttgtgccctgggcacatgcagtaacactgaaggcagcttcaaatgtctgtgtccagaagggttttccttgtcctccagtggaagaaggtgccaagatttgcgaatgagctactgttatgcgaagtttgaaggaggaaagtgttcatcacccaaatccagaaatcactccaagcaggaatgctgctgtgccttgaagggagaaggctggggagacccctgcgagctctgccccacggaacctgatgaggccttccgccagatatgtccttatggaagtgggatcatcgtgggacctgatgattcagcagttgatatggacgaatgcaaagaacccgatgtctgtaaacatggacagtgcatcaatacagatggttcctatcgctgcgagtgtccctttggttatattctagcagggaatgaatgtgtagatactgatgaatgttctgttggcaatccttgtggaaatggaacctgcaagaatgtgattggaggttttgaatgcacctgcgaggagggatttgagcccggtccaatgatgacatgtgaagatataaatgaatgtgcccagaatcctctgctctgtgccttccgatgtgtgaacacttatgggtcatatgaatgcaaatgtcccgtgggatatgtgctcagagaagaccgtaggatgtgcaaagatgaggatgagtgtgaagagggaaaacatgactgtactgaaaaacaaatggaatgcaagaacctcattggcacatatatgtgcatctgtggacccgggtatcagcggagacctgatggagaaggctgtgtagatgagaatgaatgtcagacgaagccagggatctgtgagaatgggcgctgcctcaacacccgtgggagctacacctgtgagtgtaatgatgggtttaccgccagccccaaccaggacgagtgccttgacaatcgggaagggtactgcttcacagaggtgctacaaaacatgtgtcagatcggctccagcaacaggaaccccgtcaccaaatcggaatgctgctgtgacggagggagaggctggggtccccactgtgagatctgccctttccaggggactgtggctttcaagaaactctgtccccatggccgaggattcatgaccaatggagcagatatcgatgaatgcaaggttattcacgatgtttgccgaaatggggaatgtgtcaatgacagaggatcatatcattgcatttgtaaaactgggtacactccagatataactgggacttcctgtgtagatctgaacgagtgcaaccaggctcccaaaccctgcaattttatctgcaaaaacacagaagggagttaccagtgttcatgcccgaaaggctacattctgcaagaggatggaaggagctgcaaagatcttgatgagtgtgcaaccaagcaacacaactgccagttcctatgtgttaacaccattggcggcttcacatgcaaatgtcctcccggatttacccaacaccatacgtcctgcattgataacaatgaatgcacctctgacatcaatctgtgcgggtctaagggcatttgccagaacactcctggaagcttcacctgtgaatgccagcggggattctcacttgatcagaccggctccagctgtgaagacgtggacgagtgtgagggtaaccaccgctgccagcatggctgccagaacatcattgggggctacaggtgcagctgcccccagggctacctccagcactaccagtggaaccagtgtgttgatgaaaacgaatgcctcagcgctcacatctgcggaggagcctcctgtcacaacaccctggggagctacaagtgcatgtgtcccgccggcttccagtatgaacagttcagtggaggatgccaagacatcaatgaatgtggctctgcgcaggccccctgcagctatggctgttccaataccgagggcggttacctgtgtggctgtccacctggttacttccgcataggccaagggcactgtgtttctggaatgggcatgggccgaggaaacccagagccacctgtcagtggtgaaatggatgacaattcactctccccagaggcttgttacgagtgtaagatcaatggctaccccaaacggggcaggaaacggagaagcacaaacgaaactgatgcctccaatatcgaggatcagtctgagacagaagccaatgtgagtcttgcaagttgggatgttgagaagacagccatctttgctttcaatatttcccacgtcagtaacaaggttcgaatcctagaactccttccagctcttacaactctgacgaatcacaacagatacttgatcgaatctggaaatgaagatggcttctttaaaatcaaccaaaaggaagggatcagctacctccacttcacaaagaagaagccagtggctggaacctattcattacaaatcagtagtactccactttataaaaagaaagaacttaaccaactagaagacaaatatgacaaagactacctcagtggtgaactgggtgataatctgaagatgaaaatccaggttttgcttcattaattcaccatccagagaccaaataattaaaagaaaaacaaatatagataggtagaactatattttcccccaatcagaatcatcatatcataggtacaatctttcaccaagtaaatttgtataaataagcactattctttgtattaccaaagcaaggtacaggtgactaccctagttcaaaacaaccactttctcaggcttctcatgtgtgtagctaagctaccttgtcatatgtgttgattcttgaaaactgggacgtgtatttccattgggggttggccatttatgctgacatgccatccttccagcaaacgtacgggaatgtgctttcaattgatggactactctattttttgcaaatttgtaaactttgcttctccaaatacaagtactaggttgtccatttatggtacctatttggtgctagtaaattttcaaactagatttataaatgcactgtaatatgtacacaacttagaaaccaaattacaagtattcagttccaatacttcattaatttcaatcaaccaaagttagttcagtagcttatctcagttatgagtataatacattacatgtaaattaagtgtgtgtatactgtaatcgtgctattttttatcattgaaacatttataaactagaataataatgcccttaatgtgagggtttgtaatggtgcttattaagaccaaagacttgttaaatgtatacaccaagtggtaatgaaatttcggtgactggcccacacgtgcatagaggtctgggaggaccaggaaacagcctcagtggccagaggatcaccagtgcatccttcatcacagcatgtgcaatatgccaagattaccctcggtcattcctgtcaacaaggggtcaatgtcataaatgtcacaataaaacaatctcttcttttttttagtttaccccttggctttgtgttcttgcatggatttggggttggaggggccattccggaggctaaataaagtctcctggatttaaattatcctgggtctcttacttatggcttatgaaagtaccaaatgtataaccactagaagaaaatttaacatatgagtcgatcccttgttttatccattgaaagtagcagagtctggtgtcattaacctgacttgcttgtgagaaatttagattgtagagtcatttctgaaacatgacctaattcatcttgtgacttttaaatagtcttaaataccaagttcagtcattgtcttagagcacatgaatttcattataatagatttatcatgcccccctctcaaatatacacagttttggcaagccttaggtgttctgttccatttttttttcccctaaacatctttcgttagtcaatgctcatctaattacaaagggataatcccagactgtatccaattgctgtaacttttggtttcttaatgtcataatttttaaagtctgttttattttaagtgcaatattgagtatttagctgttaggctcaatccgtcgatatgaaataattttttaaatccctaagggcaggaaagcatttcgtggtagtgaaaataagaggaaataagatggcatgaaggtggtgggcggagaaactaggtaggacacaggaaagtgctctcaaaaatctttgaagagctcagctgaaaaaaatggagtagatttggctcatactattccggaaggcaaaaccagggtcagctgatgtcagccccagtttaatacacacggtcccaattatagagctactcactgaaagaatgggtttccttgcattgtggtgagctccctgtcacaagatagaagagtttcagtctaggcttaatggcaaccattggacaaagatgctttcttccacctaacaggccattaacatcttaaaggtatttttgtatctctaattttgtttataataggtgctcaacagaatgagctgaatggctgttacaaagggggtttgtaccttgggtaagagattaaaatataactcaaaatttccttctaacgctgcacctatggaaccatgtgatagaggtgtattaaaattgttatcgaagaatatatagcatatggtaaacaacagtttgcatatggaaaatgtctttgataatttaaccagaactgcattatattcaataacggattttctttataacaaacaacaggggaaaatggagttggcacacagtggatcactttgatatttttaatagtccaagtctggattttatttattcctgagccaacaattttgaacagcatattttccatgtttctgactgtaacaaaacattttcctcattgttccattgtaaatattcctcttgttggaactctttttaatcctgagatttaaacctgtacctttcaattgtctgtgacctttcaatttcactttcaatagttgaagaacttggctttgtaaatctctcagaagcttgaaaatatcttgtctctaccccctcagcccatttcatttgccaataattattttgtaagtagggttgaaatgaactcagctggccttgtgaaatgtttaaacttgcacaaacaactacatttttgttcaacaaatagcagtttactcagccaaaatcactttggatattgccattacaaatactgttaaacttcagaaatcatgtctgtaaattagatgagccaaaataaaggacaattgggttgatgctgca

SEQ ID NO: 2865 - DNA, 8616 bp, Artificial Sequence
  derived and/or modified sequence
atgagacgaggacgactattagaaattgcactcggctttactgtgctgctggcctcctatactagccacggagctgatgcaaacctggaggcaggtaacgtaaaggaaaccagagcctctagagctaaacgcaggggaggagggggccacgatgcattgaagggtccaaatgtgtgtggtagtcgatacaatgcctactgttgccctgggtggaagacgttgcccggagggaaccagtgcatcgtgcccatctgcagacactcatgcggtgacggattttgctccaggcctaacatgtgtacctgcccctctggacagatcgcaccatcctgcgggtctaggagtatacagcactgtaatatcagatgcatgaatggaggaagttgcagtgacgatcattgcctctgtcaaaaggggtacatcggcactcactgtggacagccagtgtgtgagtctggctgtttgaacggcggccggtgcgtcgcacccaaccgatgtgcatgtacgtatgggtttacaggccctcagtgcgagcgcgattaccgaaccggaccctgctttactgtaataagcaatcagatgtgtcagggacagctgagcggcatagtctgtacaaagactctgtgctgtgctactgtcgggcgcgcttgggggcatccctgcgagatgtgccccgcacagccccatccttgtcgcagaggttttatcccgaacattcggaccggcgcttgtcaagacgtggacgagtgccaggccattcccgggctctgtcaaggcgggaactgcatcaacaccgtggggtctttcgagtgcaagtgtcctgcgggccataaactcaacgaggtgtcccaaaagtgcgaggacattgacgagtgctccactattcccgggatctgcgagggcggggagtgcaccaatacagtcagctcttacttctgcaaatgtccccctggcttttatacttcccccgacgggactcgttgcatcgatgtgcgccccggttattgctacacagcgctcacgaatggacggtgcagcaatcagctgccccagtcgattacaaagatgcagtgttgttgcgatgccgggaggtgctggagtccaggcgttactgtcgcccctgagatgtgccctatccgagccaccgaagactttaataaactctgtagtgtgcctatggtcatcccaggcaggccagagtaccccccaccacctctcggccccattcccccagtactgcctgtgcccccggggttccctccgggccctcagattcctgttccacgtccccccgttgaatatctttacccgtcccgcgagccaccacgggtgctcccagtgaacgtcactgattactgccagcttgtgcgctatctgtgccaaaatggacggtgtatacccactccggggtcttgccgatgtgaatgcaataagggatttcagttagatctccgtggagaatgcattgatgttgacgagtgcgaaaagaatccctgtgcgggtggagagtgcattaataatcaggggtcctatacctgtcaatgcagagctggttatcagtcaaccctcactagaaccgaatgcagggacattgacgagtgcctgcaaaatggacgcatctgtaataatggaaggtgcatcaatacagatgggtcttttcactgtgtttgcaacgccggcttccatgtcacccgagatggcaaaaactgcgaagatatggacgaatgttctattcgcaacatgtgtctgaatggcatgtgcataaacgaagacgggtcctttaaatgcatttgtaagccgggttttcagctggcatcagacggccgttattgtaaagacattaacgagtgtgagactcccggcatctgcatgaatgggcggtgcgtgaacaccgacggctcctatcgctgtgagtgctttccagggctcgccgtggggctagacgggcgagtctgcgtggatacacatatgcgatcgacttgttatggcgggtacaaacgaggtcaatgtatcaaaccgttatttggcgcagttaccaagagtgagtgttgttgcgccagtacagaatacgccttcggcgagccctgtcagccctgtcctgctcagaatagtgccgaataccaggctctgtgtagtagcgggcccggcatgacatctgcaggctcggatattaacgagtgtgccctcgaccccgacatctgcccaaatggaatatgcgaaaatctgcgagggacatataagtgcatatgcaacagtggatatgaggtcgactccacagggaagaattgtgtcgatattaatgaatgcgtgttgaactctttattatgcgacaatggacagtgcaggaatactccaggtagcttcgtgtgtacctgcccgaaaggcttcatctacaaacctgacctaaagacctgtgaggacattgacgagtgtgaatcgtccccgtgcataaatggagtgtgtaaaaattctcctgggtcctttatttgcgagtgttccagcgaatccacgctggacccaactaaaactatctgtattgagacaataaagggcacctgttggcagactgtgatcgacgggaggtgcgagattaacattaatggtgcaacccttaagtcccaatgttgcagctcactcggggccgcctggggcagcccttgtaccctgtgtcaggtggatcccatatgcggcaaaggctattcccgaattaagggaacccagtgtgaggacatcgatgagtgcgaggtttttcccggtgtctgtaagaatgggctgtgtgtgaatacaaggggcagtttcaagtgtcaatgtcctagtgggatgactttggatgcgacgggcaggatatgcctggatatccgactggagacttgtttccttcgctatgaggatgaagagtgcacgcttcccattgcggggcgtcatcgcatggacgcatgctgctgctcagtgggagccgcttggggtacggaggaatgtgaagagtgtcctatgaggaacacgccagaatacgaagagctttgcccacggggccccggattcgcgaccaaggaaattactaatggcaagccattcttcaaagacatcaacgagtgtaagatgatcccctctctgtgcacgcacggaaagtgccgaaatactatcggatcctttaagtgcagatgtgacagcggttttgctctcgactctgaggagcggaactgtacagatattgatgaatgtcgcataagcccagacctatgtggtaggggacagtgtgtcaatactcccggcgatttcgagtgcaagtgcgatgagggctatgaaagcgggtttatgatgatgaaaaattgcatggatattgatgaatgccagagggatccattactgtgtcgcggcggggtatgccataataccgaggggtcataccggtgtgagtgcccccccggacatcagctgtcaccgaatatatcagcatgcatcgacatcaatgagtgtgaactgagcgcccacttatgccctaacggaaggtgcgtaaatctcattggcaaataccagtgtgcttgcaatcctgggtaccacagcacaccagatagactgttttgtgtggatatcgatgaatgctcaatcatgaacggaggatgcgagacattttgtaccaattcagagggctcctatgaatgcagctgccagcccggcttcgcactgatgcccgaccagaggtcgtgtaccgacatcgatgaatgtgaggacaatccaaatatctgcgacgggggtcagtgcacgaacatccccggtgaatatagatgtctgtgttacgatggcttcatggcctcagaggacatgaagacttgcgtggatgttaacgagtgcgatctcaacccaaatatttgtttatcaggaacctgtgaaaacacaaaaggatctttcatctgccactgcgatatgggttatagcggaaaaaaaggaaagaccgggtgtaccgatattaacgagtgcgaaattggcgcccacaattgcggaaaacatgccgtgtgtacgaatacggctggttcttttaagtgctcttgttccccgggctggatcggcgatggaattaaatgtacggacctcgacgagtgctcaaatggcacacatatgtgctcacagcacgcagactgtaagaatacgatgggttcttatagatgcctctgcaaagagggctataccggtgacggatttacctgtactgacctcgacgaatgcagcgaaaacctgaacctgtgcgggaacggtcagtgcttaaatgctccaggcggatacaggtgcgagtgcgatatggggttcgttcctagcgccgatgggaaagcatgcgaagatatcgatgagtgtagtctacctaacatttgtgtgttcggtacttgtcacaatttgccggggttattcagatgtgaatgcgagataggttatgagttagatagatcagggggaaactgcaccgacgtcaatgaatgtttggatcccactacgtgtatctccggcaactgtgttaacactccaggctcatacatctgtgactgcccccctgacttcgaactgaatccaacgagagtcggctgcgtggacacgaggtctggaaattgttaccttgatatccgcccgaggggggataatggggacacagcctgtagcaacgagatcggcgtgggagtgtctaaggctagctgttgttgcagcctgggtaaagcctggggaacaccctgtgagatgtgccccgctgtgaatacctcggagtataagatcctgtgtcccggaggggagggtttcaggcccaatcctattacagtcattcttgaggatatcgatgagtgtcaggagttaccaggcctctgtcagggcggtaagtgtattaatacgtttggctcttttcaatgtcgctgcccaacgggatattatcttaatgaagacaccagagtatgcgatgatgttaatgaatgtgagaccccggggatttgcgggcctgggacttgttacaataccgtggggaactacacctgtatctgcccgcccgactacatgcaagttaacgggggcaataactgcatggacatgcgacggtccctttgctacaggaactattacgcggacaaccagacatgcgacggcgagctgctgttcaacatgacaaaaaaaatgtgctgttgctcgtacaatataggtcgcgcatggaataagccctgcgaacagtgccctatcccttcaacagatgagttcgcaaccttgtgtggctcccagcggccaggctttgtgatagatatctatacaggccttccggtagatattgatgaatgtcgcgagattcccggggtttgcgagaatggagtctgcatcaacatggttggctcatttaggtgtgagtgtcccgtgggcttcttctacaacgataagctgcttgtgtgtgaggacatagacgagtgccaaaacggacctgtgtgccaaagaaacgccgaatgcatcaataccgccggatcttaccggtgtgattgtaagccaggctacaggttcactagcacggggcagtgcaacgatcgcaatgagtgccaggagatccccaacatttgcagccatgggcagtgtatcgatactgtgggtagcttctactgtctttgccacactggattcaagaccaatgacgatcaaactatgtgtctcgacattaacgagtgcgagcgtgatgcatgtgggaacggtacgtgtaggaacactatcggatcctttaattgtaggtgtaaccatgggttcatcctttcccataataacgattgtattgacgtggacgagtgtgcctcaggtaatggtaacttgtgtaggaacggccagtgcattaacaccgtaggcagcttccagtgccagtgtaacgaaggctacgaggtcgctcccgatggcagaacgtgtgtggacattaatgagtgcttgctcgaaccccggaagtgcgccccaggaacttgccaaaacctggatgggtcttacagatgtatctgcccaccagggtactctctccagaacgaaaagtgcgaagatatcgacgaatgcgtggaggagccagaaatttgcgcactgggcacctgttccaacactgaaggcagctttaagtgcttgtgcccggaaggctttagtctcagctcctctgggcgacggtgtcaagatttgagaatgagttattgctacgctaagtttgaaggagggaagtgtagcagtcccaagtctcgcaaccattcaaaacaggagtgctgttgtgctctcaagggcgaaggatggggagacccatgtgagctttgccctacagaaccggacgaagcctttcgacagatctgtccttacggctccggtatcatagtcggccccgacgactcagctgtggatatggacgagtgtaaggaacctgatgtgtgcaaacatggccaatgtatcaatactgacgggtcttacaggtgcgagtgtccgttcggctacatcctagcagggaatgagtgtgtggacactgatgagtgtagcgtgggcaacccttgcgggaacggaacgtgtaagaatgtgattggtggatttgaatgcacttgcgaggagggcttcgagcctgggcctatgatgacttgcgaggacatcaacgaatgcgcacagaaccctctactgtgcgctttccgctgtgtgaatacatatggaagctacgagtgtaagtgtcccgtggggtatgtgctccgggaggacagaaggatgtgtaaggacgaggatgagtgtgaggaggggaaacatgactgcactgaaaagcaaatggaatgtaagaatcttatcggaacctacatgtgcatttgcggccctgggtaccagcgaagaccagacggcgagggctgcgtggatgaaaatgaatgccagaccaaacctggaatatgcgagaatgggaggtgcctgaacacccgaggttcctacacttgcgagtgtaacgatgggttcacagcgtcgccgaaccaggatgagtgcttggacaacagagaaggctattgtttcacagaggtcctgcagaacatgtgccagatcggctcgagtaatagaaacccagtgactaaatctgaatgttgctgtgacggaggtcgggggtggggacctcactgcgagatatgccctttccaaggtactgtcgcctttaagaaactttgtcctcacggccggggcttcatgactaatggggctgatatcgacgagtgcaaggtcattcacgacgtatgtaggaacggagaatgtgtgaatgatcggggttcatatcactgtatatgcaagaccggatacactcctgacatcacggggacatcatgtgtggacctgaatgaatgcaatcaggccccaaagccttgtaattttatatgcaagaacaccgaggggagttatcaatgttcctgtcctaagggctatatcctacaggaggatggccgaagttgtaaagacctagatgagtgcgccacaaagcagcataattgtcagttcctttgtgtgaacacgatcggggggtttacgtgcaagtgcccgccaggcttcacccagcatcatacaagctgtatcgacaacaatgagtgcacgagcgatatcaacctctgtggatctaagggtatctgtcagaacaccccgggcagcttcacatgcgagtgtcaacgggggttcagtcttgatcagacggggtccagctgtgaggacgttgatgagtgcgagggcaaccacaggtgccagcacggttgtcagaatatcattggcgggtacagatgctcctgcccccagggctacctgcagcattatcagtggaatcaatgcgtcgatgagaatgagtgcctttcagctcatatctgcggcggggccagctgccataataccctgggctcctacaagtgcatgtgtcctgccggcttccaatatgagcagttcagcggaggttgtcaggacattaacgaatgtgggagcgcccaggcaccctgttcctacggttgctccaacacagagggcggctacctctgtggatgtcctcccggctactttcgcattggtcaggggcactgtgtttcggggatggggatggggagaggtaacccggagcccccagtctcaggggagatggacgacaattccttgtcccctgaagcatgctatgaatgtaaaataaacgggtaccccaagcggggccggaaacgcaggtcaaccaatgaaaccgacgccagtaacatcgaagaccagagcgaaaccgaggccaacgtaagtctggccagctgggacgtggagaagaccgctatttttgcttttaatatttcccacgtttctaacaaagtgagaatcctggagctgctgccggcgttgactacattgactaatcataatcggtatctgatcgagtcaggcaacgaggacggtttttttaaaatcaaccagaaggaggggatcagttacctacactttaccaaaaagaagccagtggccgggacttattcactgcaaatctcaagcacccctctctataagaagaaggaactgaaccaactggaggacaagtatgacaaagactatttaagtggcgaactaggtgacaatctgaagatgaagatccaggtgttgctgcactag

SEQ ID NO: 2866 - DNA, 2958 bp, Artificial Sequence
  derived and/or modified sequence
atgggtttcgtcccttctgctgatggaaaggcctgcgaggacatagacgagtgctccctacctaacatttgcgttttcggcacctgccacaacctccccggactgtttcgatgcgaatgcgaaatagggtacgaactcgaccgatctggcggaaattgcactgatgttaatgagtgcctcgacccaacaacctgcatttccggtaactgtgtgaacactccaggtagctacatttgtgattgccctcccgattttgagctgaatcctactcgcgtgggatgcgttgacacgcgcagcggcaattgctacctggatatcagacctagaggagataatggtgatacagcctgcagtaatgagatcggagtgggtgttagtaaggcttcgtgttgttgctctctcggcaaggcctggggcaccccgtgcgagatgtgccctgccgtgaatacatcagaatataagatactctgcccagggggggagggattccgccccaatccaatcacagtcattttagaggacatcgacgagtgccaggaacttcctggcctgtgccagggagggaagtgtataaacacattcgggagctttcaatgccggtgcccgacgggttactatttgaacgaggacactcgggtgtgtgacgatgtaaatgagtgcgagacgcccggaatctgtgggcccggaacatgctacaacaccgtcggcaactacacctgcatttgtcccccagactacatgcaggtgaatggcggcaacaattgcatggacatgaggcgctccctgtgctatagaaattactacgccgataaccaaacctgtgatggcgaactgctgtttaacatgactaagaagatgtgctgctgtagttataacatcggaagagcgtggaacaagccctgtgagcagtgtccgataccttctactgatgagtttgcaacactgtgcggtagccagcgcccgggcttcgtcattgatatttacacagggctgccggtagacatcgatgagtgtagagaaatccccggggtgtgcgaaaatggtgtgtgcataaatatggtgggaagctttcgttgcgagtgtcccgtcggatttttttataacgacaagctgctcgtgtgcgaggacatcgatgagtgtcagaatggacctgtgtgtcagaggaacgctgaatgtatcaacactgcaggaagctaccggtgtgattgcaagcctggctaccgattcacatccaccggccagtgtaatgatcgaaacgaatgccaggaaattcccaacatctgcagtcacggccagtgcatcgataccgtggggtctttttactgtctgtgccacaccgggttcaagacgaacgacgatcagactatgtgtttggacataaatgagtgtgaacgagacgcatgcggtaacgggacttgtcgcaacactatcggttcctttaactgtaggtgcaaccacggcttcattcttagccacaacaatgattgtatcgatgtagacgagtgtgcatcaggaaacggcaatctttgtagaaacggccaatgcattaacacagtaggatccttccagtgccagtgtaatgaaggttatgaggtggctccggacggcagaacttgtgtcgacattaacgagtgcctattggaacctcgcaagtgcgcacccggcacttgccagaaccttgatggctcatatcggtgcatttgcccacctggatactccctgcagaacgaaaaatgtgaagatattgatgagtgcgttgaggagcccgaaatttgcgcattggggacatgctcaaataccgagggctcttttaaatgtctttgtccagaaggtttcagccttagcagctcaggcagaaggtgccaggaccttcgaatgagttattgctatgcgaagttcgagggagggaagtgcagctctcctaaatccagaaatcactcgaagcaggaatgctgctgtgcactgaagggcgaggggtggggtgatccttgcgagctgtgcccaaccgagcccgacgaagcctttaggcagatctgtccctatggctctggcatcatcgttggcccagacgattccgcagtggacatggacgaatgcaaagagcctgacgtctgtaagcacggccagtgtatcaatacagacggaagttaccgatgtgagtgtcccttcggctatattttggccgggaatgaatgtgtcgacacagacgaatgcagtgtagggaacccttgtggaaacggtacatgcaagaatgtgatcggaggcttcgaatgcacctgtgaagagggcttcgaacctggcccaatgatgacctgtgaggacataaacgaatgtgcacagaaccctctcctttgcgcatttaggtgcgtgaatacatatgggtcatatgaatgtaaatgtcccgtgggctacgtgctgcgggaggaccggcgtatgtgtaaggacgaggatgaatgcgaggaagggaagcacgactgtactgagaaacaaatggagtgtaagaacttaatcggcacttatatgtgcatctgcggcccaggttaccagcgccgcccagacggcgagggctgcgtcgatgagaacgaatgccagaccaaaccaggaatatgcgaaaacggtcgatgcctgaacaccaggggcagttacacatgtgaatgcaacgatggttttacagcaagtccgaaccaggatgaatgcttggatgtgatactctcgcttttgctcctgtcccccgcttttccctcctgcttcttcagtccaaggacgatagggaagggaaccgctagccagcgctgttataaaacctgcgtgaggagcgccccagcaaccgggaccccctcccccaacaggaacgctgcagtaaccgagggagaagccggagtgccgaccgtgcgttctgccttatctcgaggtctctggctctctcggaatagtgtgccaatggcagaagactcttag

SEQ ID NO: 2867 - DNA, 3450 bp, Artificial Sequence
  derived and/or modified sequence
atgaggagaggccggttgctggaaatagccctgggcttcactgttctgctcgcatcttatacatcccacggtgccgatgcaaatcttgaagcagggaacgtcaaggaaacccgtgcgagccgggccaagcgacggggtggtgggggccacgatgccttgaagggacccaacgtgtgcggctcccggtataatgcatactgttgccctggttggaaaacactgcctgggggcaaccagtgtattgttccgatctgtcggcattcttgtggcgacgggttctgttcaaggccgaacatgtgcacttgccccagtggtcagatcgctccatcctgtggatccagatccatccagcattgtaatatcaggtgcatgaatggaggttcctgcagcgatgatcactgcctttgccagaagggatacatcgggactcattgcggccagcctgtctgtgagagtggctgtctgaacggaggaagatgcgtggctccgaatcgatgcgcctgcacatatggattcactgggccccagtgcgaaagagattacaggactggaccctgctttacggtgatttccaaccagatgtgccagggacagctgtcgggcatagtatgtaccaaaacattatgctgcacatacattaatgaatgcgaaataggagctcacaattgtggcaaacatgctgtatgcaccaacaccgctggctcttttaaatgttcgtgttctcctggatggatcggcgatggaatcaaatgcactgacctagacgaatgttcaaacggcacccacatgtgttctcagcatgcagactgcaagaatacaatgggctcttacagatgcctgtgcaaagaaggatacactggggacggtttcacatgtaccgacttggatgaatgctctgaaaatctgaacctgtgcggcaatggacaatgcctgaatgctcctggcggttacagatgcgaatgtgatatgggctttgtcccttcagccgatggtaaggcctgtgaggacatcgacgagtgctccctgccgaatatctgcgtgttcgggacctgccacaatttacctggcctattccgttgcgagtgtgaaattggatatgagctagatcgttctggaggaaattgtactgacgtgaacgagtgtctggaccccactacctgcataagtgggaattgcgtgaacacaccaggatcatacatttgtgactgcccccctgattttgaacttaaccctactcgcgtcggatgtgtggatacccggtccggcaattgttatctcgacatacgccctagaggcgacaacggtgataccgcctgctctaacgagattggcgtgggagtgtcaaaggcctcctgctgctgttctcttggtaaagcttggggcaccccctgtgagatgtgcccggcagttaacacgtctgaatacaaaattctctgtccggggggggagggttttcgccctaaccctattacggttatcctggaggacatcgatgaatgtcaagaattgcctggactatgtcaaggcggcaaatgtatcaacacctttggctccttccagtgccggtgtcccacaggctattacctgaacgaggacacccgcgtgtgcgacgatgtgaacgagtgcgagacccctgggatttgtggtccaggaacgtgctataatacggtggggaactacacctgtatatgtccacctgattacatgcaggtgaatggaggcaataactgtatggacatgcggcggagcttatgttatcgcaattactatgcggacaaccaaacatgtgacggtgagctgctgtttaacatgaccaagaagatgtgttgctgctcctataacatcggccgcgcatggaacaaaccatgcgagcaatgtccaattccgtccaccgacgaattcgccactttgtgtgggtcccaacggccaggctttgtaatcgacatctacactggcctccccgtggatatcgatgaatgtcgggagatcccaggtgtatgtgagaacggcgtgtgcattaatatggtggggagcttccgctgtgaatgcccagtgggcttcttctacaatgataagcttctcgtgtgtgaagatattgacgagtgtcagaatggtcccgtttgccagagaaacgccgagtgtattaatactgcgggcagctaccggtgcgattgcaagccagggtacagatttaccagcactgggcagtgtaacgacaggaacgagtgccaggaaatccctaacatttgcagtcatggccagtgcatcgataccgtcggatcattttactgtctctgccacactggattcaagaccaatgacgaccaaaccatgtgccttgacattaatgagtgtgaacgtgatgcttgcggtaatggaacttgcagaaacacgatagggagctttaactgcagatgcaaccacgggttcatcttgagccacaacaacgactgcatcgacgttgatgaatgcgcttcaggtaatggcaacctgtgccggaatgggcagtgcattaataccgtgggctccttccaatgtcagtgcaacgaaggctatgaggtcgcacccgacggaagaacatgtgtggacattaacgaatgcctgctggagcctcgtaagtgcgcccccgggacttgtcaaaatctggacggctcatatcgctgtatttgcccaccagggtattcactgcagaatgaaaagtgtgaggacattgacgagtgtgttgaagagcctgaaatatgtgcattgggcacctgctccaatactgaaggatccttcaaatgtctatgcccagaaggtttctccctttctagctcagggaggcggtgccaggatctcaggatgtcttattgttacgcaaagttcgaagggggcaagtgctctagccctaagtctagaaatcattcaaagcaggagtgttgctgcgcgctcaaaggagagggctggggggacccctgcgagctctgccccacagaacccgatgaagccttccgacaaatttgcccttacgggagcggtatcattgtgggtcctgacgactccgcggtcgacatggacgaatgcaaggaacctgatgtgtgtaagcacggccagtgtattaacacagacggatcatacagatgcgaatgtccgtttgggtacatactcgcggggaatgagtgtgtggataccgacgagtgttctgtcggaaacccgtgtgggaatggcacgtgtaagaatgtgattggaggcttcgagtgtacctgcgaggaggggtttgaacctggaccaatgatgacctgcgaagacatcaatgagtgcgctcagaaccccttgctatgtgcgttcaggtgtgtcaacacttatgggtcttatgagtgtaaatgcccagtgggctatgtgctgcgtgaagatcggcgcatgtgtaaggatgaagacgaatgcgaagagggcaagcatgactgtacctag

SEQ ID NO: 2868 - DNA, 8616 bp, Artificial Sequence
  derived and/or modified sequence
atgaggcggggccgcctgctggagatcgccctgggcttcaccgtgctgctggccagctacaccagccatggagcagatgccaacctggaggccggaaatgtgaaggagacccgggccagccgggccaagaggcggggcggcggcggccatgatgccctgaagggccccaacgtgtgtggcagccgctacaatgcctactgctgccccggctggaagaccctgcccggcggcaaccagtgcatcgtgcccatctgccgccacagctgtggagatggcttctgcagccggcccaacatgtgcacctgccccagcggccagatcgcccccagctgtggcagccgcagcatccagcactgcaacatccgctgcatgaatggaggcagctgcagtgatgaccactgcctgtgccagaagggctacatcggcacccactgcggccagcctgtgtgtgagagcggctgcctgaatggaggccgctgtgtggcccccaacagatgtgcctgcacctacggcttcaccggcccccagtgtgagcgggactacagaacaggcccctgcttcaccgtcatcagcaaccagatgtgccagggccagctgagcggcatcgtgtgcaccaagaccctgtgctgtgccaccgtgggccgggcctggggccacccctgtgagatgtgcccagcccagccccacccctgccggcggggcttcatccccaacatcagaactggagcctgccaggatgtggatgagtgccaggccatccctggcctgtgccagggcggcaactgcatcaacacagtgggcagctttgagtgcaagtgcccagctggccacaagctgaatgaggtgtcccagaagtgtgaagatattgatgaatgttccaccatccctggcatctgtgagggcggagaatgtaccaacacagtgagcagctacttctgcaagtgccccccaggcttctacaccagcccagatggcacccgctgcattgatgtgcggcccggctactgctacacagccctgaccaacggccgctgcagcaaccagctgccccagagcatcaccaagatgcagtgctgctgtgatgctggccgctgctggagccctggggtgacagtggcccctgagatgtgccccatccgggccacagaggacttcaacaagctgtgcagcgtgcccatggtgattcctggccggcctgagtacccacctccacccctgggccccatcccccctgtgctgcctgtgcccccaggcttccccccaggcccccagatccctgtgccccggccccctgtggagtacctgtaccccagccgggagcccccccgggtgctgcctgtgaatgtgacagactactgccagctggtgcgctacctgtgccagaatggccgctgcatccccaccccaggcagctgccgctgtgagtgcaacaagggcttccagctggacctgcggggagaatgtattgatgtggatgaatgtgagaagaacccctgtgctggaggagagtgcatcaacaaccagggcagctacacctgccagtgcagagctggctaccagagcaccctgaccaggacagaatgtcgggacattgatgaatgtctgcagaatggccgcatctgcaacaacggccgctgcatcaacacagatggcagcttccactgtgtgtgcaatgccggcttccacgtgaccagagatggcaagaactgtgaggacatggatgaatgttccatccggaacatgtgcctgaatggcatgtgcatcaatgaagatggcagcttcaagtgcatctgcaagccaggcttccagctggccagtgatggccgctactgcaaggacatcaatgaatgtgagaccccaggcatctgcatgaatggccgctgtgtgaacacagatggcagctaccgctgtgagtgcttccctggcctggccgtgggcctggatggccgggtgtgtgtggacacccacatgaggagcacctgctacggcggctacaagaggggccagtgcatcaagcccctgtttggagctgtgaccaagtctgagtgctgctgtgccagcacagaatatgccttcggggagccctgccagccctgcccagcccagaacagcgctgagtaccaggccctgtgcagcagcggccctggcatgaccagcgctggcagtgacatcaatgaatgtgccctggaccctgacatctgccccaacggcatctgtgagaacctgcggggcacctacaagtgcatctgcaacagcggctatgaggtggacagcacaggcaagaactgtgtggacatcaatgaatgtgtgctgaacagcctgctgtgtgacaatggccagtgcaggaacaccccaggcagctttgtgtgcacctgccccaagggcttcatctacaagccagacctgaagacctgtgaggacattgatgaatgtgagagcagcccctgcatcaacggggtgtgcaagaacagccctggcagcttcatctgtgaatgtagcagcgagagcaccctggaccccaccaagaccatctgcatcgagaccatcaagggcacctgctggcagacagtgattgatggccgctgtgagatcaacatcaatggagccaccctgaagagccagtgctgcagcagcctgggcgccgcctggggcagcccctgcaccctgtgccaggtggaccccatctgtgggaagggctacagccgcatcaagggcacccagtgtgaagatattgatgaatgtgaggtgtttcctggggtgtgcaagaatggcctgtgtgtgaacacccggggcagcttcaagtgccagtgccccagcggcatgaccctggatgccaccggccgcatctgcctggacatccggctggagacctgcttcctgcgctatgaagatgaggagtgcaccctgcccatcgccggccgccacaggatggatgcctgctgctgcagcgtgggcgccgcctggggcacagaggagtgtgaagaatgtcccatgaggaacaccccagaatatgaggagctgtgcccccggggccctggctttgccaccaaggagatcaccaacgggaagcccttcttcaaggacatcaatgaatgcaagatgatccccagcctgtgcacccatggaaaatgtagaaacaccatcggcagcttcaagtgccgctgtgacagcggctttgccctggacagcgaggagaggaactgcacagacattgatgaatgtcgcatcagcccagacctgtgtggccggggccagtgtgtgaacacccctggggactttgagtgcaagtgtgatgagggctatgaaagtggcttcatgatgatgaagaactgcatggacattgatgagtgccagagggaccccctgctgtgccggggcggcgtgtgccacaacacagagggcagctaccgctgtgaatgtcctcctggccaccagctgagccccaacatcagcgcctgcatcgacatcaatgaatgtgagctgagcgcccacctgtgccccaacggccgctgtgtgaacctgattggcaagtaccagtgtgcctgcaaccctggctaccacagcaccccagacaggctcttctgtgtggacattgatgagtgcagcatcatgaatggaggctgtgagaccttctgcaccaacagcgagggcagctatgagtgcagctgccagcccggctttgccctgatgccagaccagaggagctgcacagacattgatgaatgtgaggacaaccccaacatctgtgatggcggccagtgcaccaacatccctggagagtaccgctgcctgtgctatgatggcttcatggccagcgaggacatgaagacctgtgtggatgtgaatgaatgtgacctgaaccccaacatctgcctgagcggcacctgtgagaacaccaagggcagcttcatctgccactgtgacatgggctacagcggcaagaagggcaagacaggctgcacagacatcaatgaatgtgagatcggggcccacaactgtgggaagcatgctgtgtgcaccaacacagctggcagcttcaagtgcagctgcagccctggctggattggagatggcatcaagtgcacagacctggatgagtgcagcaatggcacccacatgtgcagccagcacgccgactgcaagaacaccatgggcagctaccgctgcctgtgcaaggagggctacacaggagatggcttcacctgcacagacctggatgaatgttctgagaacctgaacctgtgtggaaatggccagtgcctgaatgcccctgggggctaccgctgtgaatgtgacatgggctttgtgcccagcgcagatggcaaggcctgtgaagatattgatgaatgttccctgcccaacatctgtgtgtttggcacctgccacaacctgcccggcctcttccgctgtgaatgtgagatcggctatgagctggacagaagtggcggcaactgcacagatgtgaatgaatgtctggaccccaccacctgcatcagcggcaactgtgtgaacaccccaggcagctacatctgtgactgccccccagactttgagctgaaccccaccagggtgggctgtgtggacaccaggagcggcaactgctacctggacatccggcccaggggggacaacggggacacagcctgcagcaatgaaattggagtgggcgtgtccaaggccagctgctgctgcagcctgggcaaggcctggggcaccccctgtgagatgtgcccagctgtgaacaccagcgagtacaagatcctgtgccctggaggagagggcttccggcccaaccccatcaccgtcatcctggaggacattgatgagtgccaggagctgcccggcctgtgccagggcggcaagtgcatcaacaccttcggcagcttccagtgccgctgccccaccggctactacctgaatgaagacaccagggtgtgtgatgatgtgaatgaatgtgagaccccaggcatctgtggccctggcacctgctacaacacagtgggcaactacacctgcatctgccccccagactacatgcaggtgaatggaggcaacaactgcatggacatgagaagaagcctgtgctacagaaactactatgctgacaaccagacctgtgatggagagctgctcttcaacatgaccaagaagatgtgctgctgcagctacaacatcggccgggcctggaacaagccctgtgagcagtgccccatccccagcacagatgaatttgccaccctgtgtggcagccagaggcctggctttgtgattgacatctacacaggcctgcctgtggacattgatgaatgtcgggagatccctggggtgtgtgaaaatggagtgtgcatcaacatggtgggcagcttccgctgtgagtgccctgtgggcttcttctacaatgacaagctgctggtgtgtgaagatattgatgagtgccagaatggacctgtgtgccagagaaatgctgagtgcatcaacacagctggcagctaccgctgtgactgcaagccaggctaccgcttcaccagcacaggccagtgcaatgacagaaatgaatgccaggagatccccaacatctgcagccacggccagtgcatcgacacagtgggcagcttctactgcctgtgccacacaggcttcaagaccaatgatgaccagaccatgtgcctggacatcaatgaatgtgaaagagatgcctgtggaaatggcacctgcaggaacaccatcggcagcttcaactgccgctgcaaccacggcttcatcctgagccacaacaatgactgcattgatgtggatgaatgtgccagcggaaatggaaacctgtgcagaaatggccagtgcatcaacacagtgggcagcttccagtgccagtgcaatgaaggctatgaggtggccccagatggccgcacctgtgtggacatcaatgaatgtctgctggagcccaggaaatgtgcccctggcacctgccagaacctggatggcagctaccgctgcatctgccccccaggctacagcctgcagaatgagaagtgtgaggacattgatgaatgtgtggaggagcctgagatctgtgccctgggcacctgcagcaacacagagggcagcttcaagtgcctgtgcccagagggcttcagcctgagcagcagtggaagacgctgccaggacctgaggatgagctactgctacgccaagtttgaaggaggcaagtgcagcagccccaagagcaggaaccacagcaagcaggagtgctgctgtgccctgaagggggagggctggggagacccctgtgagctgtgccccacagagccagatgaggccttccggcagatctgcccctacggcagcggcatcatcgtgggcccagatgacagcgctgtggacatggatgagtgcaaggagccagatgtgtgcaagcacggccagtgcatcaacacagatggcagctaccgctgtgagtgccccttcggctacatcctggccggaaatgaatgtgtggacacagatgaatgttctgtgggcaacccctgtggaaatggcacctgcaagaatgtgattggaggctttgaatgtacctgtgaggagggctttgagcccggccccatgatgacctgtgaggacatcaatgaatgtgcccagaaccccctgctgtgtgccttccgctgtgtgaacacctacggcagctatgaatgtaaatgtcctgtgggctacgtgctgcgggaggacaggaggatgtgcaaggatgaagatgaatgtgaggagggcaagcatgactgcacagagaagcagatggagtgcaagaacctgattggcacctacatgtgcatctgtggccctggctaccagaggaggccagatggagagggctgtgtggatgaaaatgaatgccagaccaagccaggcatctgtgaaaatggccgctgcctgaacacccggggcagctacacctgtgaatgtaatgatggcttcaccgccagccccaaccaggatgagtgcctggacaaccgggagggctactgcttcacagaggtgctgcagaacatgtgccagatcggcagcagcaacagaaatcctgtgaccaagtctgagtgctgctgtgatggcggccggggctggggcccccactgtgagatctgccccttccagggcaccgtggccttcaagaagctgtgcccccacggccggggcttcatgaccaatggagctgacattgatgagtgcaaggtgattcatgatgtgtgcagaaatggagaatgtgtgaatgaccggggcagctaccactgcatctgcaagacaggctacaccccagacatcaccggcaccagctgtgtggacctgaatgaatgcaaccaggcccccaagccctgcaacttcatctgcaagaacacagagggcagctaccagtgcagctgccccaagggctacatcctgcaggaggatggccgcagctgcaaggacctggatgaatgtgccaccaagcagcacaactgccagttcctgtgtgtgaacaccatcggcggcttcacctgcaagtgccccccaggcttcacccagcaccacaccagctgcatcgacaacaatgaatgtaccagtgacatcaacctgtgtggcagcaagggcatctgccagaacaccccaggcagcttcacctgtgagtgccagaggggcttcagcctggaccagacaggcagcagctgtgaagatgtggatgaatgtgagggcaaccaccgctgccagcacggctgccagaacatcattggaggctaccgctgcagctgcccccagggctacctgcagcactaccagtggaaccagtgtgtggatgaaaatgaatgtctgagcgcccacatctgtggcggggccagctgccacaacaccctgggcagctacaagtgcatgtgcccagctggcttccagtatgagcagttcagcggcggctgccaggacatcaatgaatgtggcagcgcccaggccccctgcagctatggctgcagcaacacagagggcggctacctgtgtggctgccccccaggctacttcagaattggccagggccactgtgtgtctggcatgggcatgggccggggcaaccctgagccccctgtgtctggagagatggatgacaacagcctgagccctgaggcctgctatgagtgcaagatcaatggctaccccaagaggggcaggaagaggaggagcaccaatgaaacagatgccagcaacatcgaggaccagagcgagacagaggccaacgtgtccctggcctcctgggatgtggagaagacagccatctttgccttcaacatcagccacgtgagcaacaaggtgcgcatcctggagctgctgcctgccctgaccaccctgaccaaccacaaccgctacctgattgaaagtggaaatgaagatggcttcttcaagatcaaccagaaggagggcatctcctacctgcacttcaccaagaagaagcctgtggccggcacctacagcctgcagatcagcagcacccccctgtacaagaagaaggagctgaaccagctggaggacaagtatgacaaggactacctgtctggagagctgggggacaacctgaagatgaagatccaggtgctgctgcactag

SEQ ID NO: 2869 - DNA, 2958 bp, Artificial Sequence
  derived and/or modified sequence
atgggctttgtgcccagcgcagatggcaaggcctgtgaagatattgatgaatgttccctgcccaacatctgtgtgtttggcacctgccacaacctgcccggcctcttccgctgtgaatgtgagatcggctatgagctggacagaagtggcggcaactgcacagatgtgaatgaatgtctggaccccaccacctgcatcagcggcaactgtgtgaacaccccaggcagctacatctgtgactgccccccagactttgagctgaaccccaccagggtgggctgtgtggacaccaggagcggcaactgctacctggacatccggcccaggggggacaacggggacacagcctgcagcaatgaaattggagtgggcgtgtccaaggccagctgctgctgcagcctgggcaaggcctggggcaccccctgtgagatgtgcccagctgtgaacaccagcgagtacaagatcctgtgccctggaggagagggcttccggcccaaccccatcaccgtcatcctggaggacattgatgagtgccaggagctgcccggcctgtgccagggcggcaagtgcatcaacaccttcggcagcttccagtgccgctgccccaccggctactacctgaatgaagacaccagggtgtgtgatgatgtgaatgaatgtgagaccccaggcatctgtggccctggcacctgctacaacacagtgggcaactacacctgcatctgccccccagactacatgcaggtgaatggaggcaacaactgcatggacatgagaagaagcctgtgctacagaaactactatgctgacaaccagacctgtgatggagagctgctcttcaacatgaccaagaagatgtgctgctgcagctacaacatcggccgggcctggaacaagccctgtgagcagtgccccatccccagcacagatgaatttgccaccctgtgtggcagccagaggcctggctttgtgattgacatctacacaggcctgcctgtggacattgatgaatgtcgggagatccctggggtgtgtgaaaatggagtgtgcatcaacatggtgggcagcttccgctgtgagtgccctgtgggcttcttctacaatgacaagctgctggtgtgtgaagatattgatgagtgccagaatggacctgtgtgccagagaaatgctgagtgcatcaacacagctggcagctaccgctgtgactgcaagccaggctaccgcttcaccagcacaggccagtgcaatgacagaaatgaatgccaggagatccccaacatctgcagccacggccagtgcatcgacacagtgggcagcttctactgcctgtgccacacaggcttcaagaccaatgatgaccagaccatgtgcctggacatcaatgaatgtgaaagagatgcctgtggaaatggcacctgcaggaacaccatcggcagcttcaactgccgctgcaaccacggcttcatcctgagccacaacaatgactgcattgatgtggatgaatgtgccagcggaaatggaaacctgtgcagaaatggccagtgcatcaacacagtgggcagcttccagtgccagtgcaatgaaggctatgaggtggccccagatggccgcacctgtgtggacatcaatgaatgtctgctggagcccaggaaatgtgcccctggcacctgccagaacctggatggcagctaccgctgcatctgccccccaggctacagcctgcagaatgagaagtgtgaggacattgatgaatgtgtggaggagcctgagatctgtgccctgggcacctgcagcaacacagagggcagcttcaagtgcctgtgcccagagggcttcagcctgagcagcagtggaagacgctgccaggacctgaggatgagctactgctacgccaagtttgaaggaggcaagtgcagcagccccaagagcaggaaccacagcaagcaggagtgctgctgtgccctgaagggggagggctggggagacccctgtgagctgtgccccacagagccagatgaggccttccggcagatctgcccctacggcagcggcatcatcgtgggcccagatgacagcgctgtggacatggatgagtgcaaggagccagatgtgtgcaagcacggccagtgcatcaacacagatggcagctaccgctgtgagtgccccttcggctacatcctggccggaaatgaatgtgtggacacagatgaatgttctgtgggcaacccctgtggaaatggcacctgcaagaatgtgattggaggctttgaatgtacctgtgaggagggctttgagcccggccccatgatgacctgtgaggacatcaatgaatgtgcccagaaccccctgctgtgtgccttccgctgtgtgaacacctacggcagctatgaatgtaaatgtcctgtgggctacgtgctgcgggaggacaggaggatgtgcaaggatgaagatgaatgtgaggagggcaagcatgactgcacagagaagcagatggagtgcaagaacctgattggcacctacatgtgcatctgtggccctggctaccagaggaggccagatggagagggctgtgtggatgaaaatgaatgccagaccaagccaggcatctgtgaaaatggccgctgcctgaacacccggggcagctacacctgtgaatgtaatgatggcttcaccgccagccccaaccaggatgagtgcctggatgtgatcctgagcctgctgctgctgagccctgccttccccagctgcttcttcagccccaggaccatcggcaaaggaacagccagccagcgctgctacaagacctgtgtgcgcagcgccccagccaccggcacccccagccccaacagaaatgctgctgtgacagaaggagaggccggcgtgcccaccgtgcgcagcgccctgagccggggcctgtggctgagcaggaacagcgtgcccatggccgaggacagctag

SEQ ID NO: 2870 - DNA, 3450 bp, Artificial Sequence
  derived and/or modified sequence
atgaggcggggccgcctgctggagatcgccctgggcttcaccgtgctgctggccagctacaccagccatggagcagatgccaacctggaggccggaaatgtgaaggagacccgggccagccgggccaagaggcggggcggcggcggccatgatgccctgaagggccccaacgtgtgtggcagccgctacaatgcctactgctgccccggctggaagaccctgcccggcggcaaccagtgcatcgtgcccatctgccgccacagctgtggagatggcttctgcagccggcccaacatgtgcacctgccccagcggccagatcgcccccagctgtggcagccgcagcatccagcactgcaacatccgctgcatgaatggaggcagctgcagtgatgaccactgcctgtgccagaagggctacatcggcacccactgcggccagcctgtgtgtgagagcggctgcctgaatggaggccgctgtgtggcccccaacagatgtgcctgcacctacggcttcaccggcccccagtgtgagcgggactacagaacaggcccctgcttcaccgtcatcagcaaccagatgtgccagggccagctgagcggcatcgtgtgcaccaagaccctgtgctgcacctacatcaatgaatgtgagatcggggcccacaactgtgggaagcatgctgtgtgcaccaacacagctggcagcttcaagtgcagctgcagccctggctggattggagatggcatcaagtgcacagacctggatgagtgcagcaatggcacccacatgtgcagccagcacgccgactgcaagaacaccatgggcagctaccgctgcctgtgcaaggagggctacacaggagatggcttcacctgcacagacctggatgaatgttctgagaacctgaacctgtgtggaaatggccagtgcctgaatgcccctgggggctaccgctgtgaatgtgacatgggctttgtgcccagcgcagatggcaaggcctgtgaagatattgatgaatgttccctgcccaacatctgtgtgtttggcacctgccacaacctgcccggcctcttccgctgtgaatgtgagatcggctatgagctggacagaagtggcggcaactgcacagatgtgaatgaatgtctggaccccaccacctgcatcagcggcaactgtgtgaacaccccaggcagctacatctgtgactgccccccagactttgagctgaaccccaccagggtgggctgtgtggacaccaggagcggcaactgctacctggacatccggcccaggggggacaacggggacacagcctgcagcaatgaaattggagtgggcgtgtccaaggccagctgctgctgcagcctgggcaaggcctggggcaccccctgtgagatgtgcccagctgtgaacaccagcgagtacaagatcctgtgccctggaggagagggcttccggcccaaccccatcaccgtcatcctggaggacattgatgagtgccaggagctgcccggcctgtgccagggcggcaagtgcatcaacaccttcggcagcttccagtgccgctgccccaccggctactacctgaatgaagacaccagggtgtgtgatgatgtgaatgaatgtgagaccccaggcatctgtggccctggcacctgctacaacacagtgggcaactacacctgcatctgccccccagactacatgcaggtgaatggaggcaacaactgcatggacatgagaagaagcctgtgctacagaaactactatgctgacaaccagacctgtgatggagagctgctcttcaacatgaccaagaagatgtgctgctgcagctacaacatcggccgggcctggaacaagccctgtgagcagtgccccatccccagcacagatgaatttgccaccctgtgtggcagccagaggcctggctttgtgattgacatctacacaggcctgcctgtggacattgatgaatgtcgggagatccctggggtgtgtgaaaatggagtgtgcatcaacatggtgggcagcttccgctgtgagtgccctgtgggcttcttctacaatgacaagctgctggtgtgtgaagatattgatgagtgccagaatggacctgtgtgccagagaaatgctgagtgcatcaacacagctggcagctaccgctgtgactgcaagccaggctaccgcttcaccagcacaggccagtgcaatgacagaaatgaatgccaggagatccccaacatctgcagccacggccagtgcatcgacacagtgggcagcttctactgcctgtgccacacaggcttcaagaccaatgatgaccagaccatgtgcctggacatcaatgaatgtgaaagagatgcctgtggaaatggcacctgcaggaacaccatcggcagcttcaactgccgctgcaaccacggcttcatcctgagccacaacaatgactgcattgatgtggatgaatgtgccagcggaaatggaaacctgtgcagaaatggccagtgcatcaacacagtgggcagcttccagtgccagtgcaatgaaggctatgaggtggccccagatggccgcacctgtgtggacatcaatgaatgtctgctggagcccaggaaatgtgcccctggcacctgccagaacctggatggcagctaccgctgcatctgccccccaggctacagcctgcagaatgagaagtgtgaggacattgatgaatgtgtggaggagcctgagatctgtgccctgggcacctgcagcaacacagagggcagcttcaagtgcctgtgcccagagggcttcagcctgagcagcagtggaagacgctgccaggacctgaggatgagctactgctacgccaagtttgaaggaggcaagtgcagcagccccaagagcaggaaccacagcaagcaggagtgctgctgtgccctgaagggggagggctggggagacccctgtgagctgtgccccacagagccagatgaggccttccggcagatctgcccctacggcagcggcatcatcgtgggcccagatgacagcgctgtggacatggatgagtgcaaggagccagatgtgtgcaagcacggccagtgcatcaacacagatggcagctaccgctgtgagtgccccttcggctacatcctggccggaaatgaatgtgtggacacagatgaatgttctgtgggcaacccctgtggaaatggcacctgcaagaatgtgattggaggctttgaatgtacctgtgaggagggctttgagcccggccccatgatgacctgtgaggacatcaatgaatgtgcccagaaccccctgctgtgtgccttccgctgtgtgaacacctacggcagctatgaatgtaaatgtcctgtgggctacgtgctgcgggaggacaggaggatgtgcaaggatgaagatgaatgtgaggagggcaagcatgactgcacctag

SEQ ID NO: 2871 - DNA, 8616 bp, Artificial Sequence
  derived and/or modified sequence
atgcggcggggccggctgctggagatcgccctgggcttcaccgtgctgcttgcgtcatacacaagtcacggcgccgatgctaatctcgaagccggaaacgtcaaagagacgagagcgagtagggctaaacgcagaggagggggcgggcacgatgccctgaagggccctaacgtctgtgggtcccggtataacgcttattgttgccccgggtggaagacccttcccggcgggaaccagtgcatcgtgcccatctgtcgtcactcctgcggtgatggtttctgttctcgtccgaatatgtgtacctgtccctctggacagattgcaccttcatgcgggtcgcgatccatccagcactgcaacattcggtgcatgaacggtggttcttgttctgatgaccactgcctgtgtcagaagggttacatcggcacccactgtggtcagcccgtttgcgagtctggctgcctcaatggtggcagatgcgtggcccctaacaggtgcgcctgcacgtatggtttcaccgggccccaatgtgagcgcgattaccgaactggcccttgctttaccgtcatctccaaccaaatgtgccaagggcagctgtctggcatcgtgtgcacaaagaccttgtgctgcgcaaccgtgggacgtgcttggggtcatccctgcgagatgtgcccagcacaacctcacccttgtcgccgcgggtttattcctaacattcgcactggcgcctgccaagatgtggatgaatgccaggccatccctggcttgtgtcaggggggaaattgcattaacaccgttggttcgttcgaatgcaaatgccccgccggacataagctgaacgaggtgagccagaaatgcgaggatattgacgaatgttcaaccattccgggaatctgtgagggtggcgaatgtacgaacacagtgagttcttacttttgtaaatgccccccagggttttacacgagccctgacggaacaagatgcattgatgtaaggccgggttactgctacacagccctgactaatggccgctgttcgaatcaactcccgcaaagtatcaccaagatgcagtgttgttgtgatgccggtcggtgttggtcgcccggggtgactgtcgctccagaaatgtgtccaattcgggcaactgaagattttaataagctctgttctgtcccgatggtgattccaggtagacctgagtacccacctcctccgctcggccctatcccccccgtgctccctgtgcctccaggtttccctcctggccctcagatccccgtgcccagaccaccggttgaatacttgtatccctcaagagaacctcctagggtgttgccagtgaacgtgaccgactattgccaactcgtgcggtacctctgtcagaatggccgctgtatcccaacacctggttcatgccgctgtgagtgtaataaaggattccaattggatctgagaggcgaatgtattgatgtggatgagtgcgagaaaaacccctgtgccggaggagaatgcattaataaccaagggagctatacctgccagtgcagagccggataccagtccactttgacccggaccgagtgcagggacatagatgagtgcttacagaacggcagaatttgcaataatggcaggtgtatcaatactgacggcagttttcactgtgtctgtaacgcggggtttcatgtgactagggacggcaaaaactgtgaggacatggatgagtgctccatccggaacatgtgcttgaacggaatgtgcattaacgaggatggttcctttaaatgcatctgcaagccaggatttcagctcgcgtcggatggacgatactgtaaggatatcaatgagtgcgaaacacccgggatatgtatgaacgggaggtgcgtcaacactgatggatcgtatcggtgtgagtgtttcccaggactggccgtcgggcttgatggacgggtgtgtgtagacacacacatgcgcagtacttgctacggaggttataagagggggcagtgcataaaaccactgtttggggccgtgactaagtctgagtgctgctgcgcatcaactgagtatgccttcggggagccatgtcagccatgtcccgcccagaattctgccgagtatcaggcactgtgttcttcaggtccaggaatgacatctgctggttcggatatcaacgaatgcgctctggatccagatatttgtcccaatggcatatgtgaaaatctacgggggacatataagtgcatatgtaactctggctacgaagtggatagcacagggaagaattgcgtggacatcaacgagtgtgtgttgaatagcctcctgtgcgacaatgggcagtgcaggaatacacctggcagcttcgtttgtacttgccccaaggggtttatctacaagccggatcttaagacctgcgaggacattgatgagtgtgaaagttcgccatgtattaacggtgtgtgtaaaaacagtccaggcagttttatatgcgagtgttcctctgagtcaacgctggatcccacaaaaactatttgcattgagacgattaaggggacctgttggcagaccgttattgatggcaggtgcgagatcaacattaatggagctacactgaaaagccagtgctgtagtagcctcggagcagcatggggtagcccttgcacgctctgccaggttgatccgatttgtgggaaaggatattcccgtatcaaaggcacccagtgtgaggacattgatgagtgtgaggtgtttcctggggtgtgcaagaatgggttatgtgttaatactagaggcagctttaagtgtcagtgtccttctggcatgaccttggacgctaccggaagaatctgcttggatatcagactcgaaacgtgcttcctgcggtatgaggatgaggagtgcacacttcccattgcaggacgccataggatggacgcttgctgctgctcggtgggcgcggcttggggtaccgaggaatgtgaagaatgccctatgcgaaatacacctgaatatgaggagctgtgcccccgcggcccaggtttcgccaccaaggagatcacaaacggcaagcctttttttaaagatattaatgaatgcaagatgattccgtcgctctgtactcatggaaagtgtcgcaacaccatcggaagcttcaagtgtagatgtgacagcggttttgcacttgactctgaagagcgcaactgtacagacattgatgaatgtcgcataagccccgacttatgtggccgcggccagtgtgtcaatacgcccggggactttgagtgtaagtgcgatgagggttacgagtccggctttatgatgatgaagaactgcatggacattgacgaatgtcaacgggatccacttctctgcagaggcggagtctgtcacaacactgagggctcctatcggtgcgagtgcccgccggggcaccagctgtcccccaacatcagtgcctgcatcgacataaacgagtgtgagttgagcgctcacctatgccccaacggacggtgtgtgaacctgattggaaaatatcaatgcgcatgtaaccccggctatcactcaactccagataggctcttttgtgtggatatagatgagtgctctatcatgaatgggggatgtgaaaccttttgtactaactccgaggggtcttatgaatgtagctgccagccaggctttgccttaatgcccgatcaaagatcttgcaccgatatcgatgaatgcgaggacaaccctaacatttgtgacggagggcagtgcaccaacattcccggagaatatagatgtttgtgttacgacggcttcatggcttccgaagatatgaagacgtgcgttgacgtgaatgagtgcgatcttaatccaaacatctgtctgagcgggacatgcgaaaacacaaaaggaagtttcatatgtcactgcgatatgggatacagtgggaagaaaggcaaaactggctgtacagacatcaatgagtgcgagataggggcacacaactgtggaaagcacgccgtttgcactaatacagctggctcatttaagtgtagctgtagtccagggtggataggggacggaatcaagtgtaccgacctcgatgagtgctccaacggaacgcatatgtgctctcagcacgcggattgtaaaaatactatgggatcctatcgttgtttatgcaaagaaggctataccggagacggtttcacctgcaccgacctcgacgagtgctccgagaacttaaacctctgcgggaatggacagtgtctcaatgctccaggcggttatcggtgtgaatgtgacatgggcttcgtcccttcagccgacggtaaagcgtgcgaggacatcgacgagtgctccctgcccaatatctgtgtgttcggaacgtgccataatttacctgggctcttccgatgcgaatgtgaaataggatatgaactagaccggtccggcggtaattgcactgacgttaacgaatgcctggatcccactacttgtatttccggcaattgcgtgaacactcccggctcctatatatgtgactgcccaccggacttcgagcttaatccaacacgagtcgggtgcgtggacactcgcagcggcaactgttaccttgacatccggcccaggggagataatggggataccgcttgctccaatgagatcggcgtgggcgtgagtaaggcaagctgttgttgctctctgggcaaggcctggggcaccccttgcgaaatgtgccccgcagtgaatacctctgagtacaagatcttgtgccctggcggagagggctttaggcctaacccaataacagttattcttgaggatattgatgaatgccaggagctgcctgggctctgtcagggagggaagtgcatcaacacgttcgggagtttccagtgtcgctgcccaacagggtattatctcaacgaagacaccagggtgtgcgatgatgtgaatgagtgcgaaactcctggcatttgcgggccaggaacatgttacaacaccgtagggaactacacgtgcatttgcccccccgactacatgcaggtcaacgggggcaataactgtatggacatgcggcgctctctgtgctaccggaattactatgctgacaatcagacttgtgacggggaactgctcttcaacatgactaagaaaatgtgttgctgcagctacaacatcggtagggcctggaacaaaccttgcgaacagtgtccaatcccaagcacggatgaattcgctactttgtgtggaagtcaacggcctggcttcgtgatagacatttacaccgggctccctgtggacattgatgaatgtcgcgagatacctggagtctgtgagaacggagtttgcatcaacatggtgggaagctttagatgtgaatgccctgtggggtttttttacaacgataagctgcttgtctgtgaagacattgacgaatgccagaatggtcctgtctgccaaagaaacgctgagtgtattaacaccgcaggttcatataggtgtgactgtaagcctggatatcgattcacctccaccggacaatgcaatgaccgcaatgagtgtcaggaaatccctaacatctgttcccatggccagtgcattgacacagtgggttctttttactgtctgtgtcacaccggcttcaagactaatgatgatcagactatgtgtctggatatcaacgagtgtgagagagacgcttgcggaaatggaacctgtaggaatacaattggcagctttaattgtagatgcaaccatggattcatcttgagtcacaacaatgactgcatcgatgtggacgaatgtgcttccgggaacggtaatctgtgccggaacgggcagtgcatcaatactgtgggctcctttcagtgtcagtgcaatgagggctatgaggtggcacctgacgggcgtacatgtgtggatatcaacgagtgcttgctggagcctcgtaagtgcgcacctggtacctgtcagaatttggatgggagctatagatgcatttgtccgcccggatacagcctccagaacgagaagtgtgaggacatagacgaatgcgtggaagagcccgagatttgtgccctcgggacctgtagtaacaccgagggctcattcaagtgtctatgccccgagggtttcagtctgtccagcagcgggcgccggtgtcaggatttgcggatgagctactgctacgcgaagtttgagggaggaaagtgctcttctcctaagagtcggaatcacagcaagcaggagtgctgctgcgcattgaagggggagggctggggggatccatgtgagctatgccccacggaacctgatgaggccttccgtcagatatgcccctacggatcggggatcattgtggggcctgatgatagcgctgtggacatggacgagtgcaaagagcctgacgtctgtaaacacggccagtgcattaacaccgacggcagctatcgatgcgagtgtccttttggctacatcctcgccggcaatgaatgtgtggacaccgatgaatgctcagttggtaatccctgcggaaatgggacctgcaagaatgtcattggtggtttcgaatgtacttgtgaggaaggctttgaaccagggcctatgatgacctgcgaggatattaacgaatgcgctcagaaccctttgctgtgcgcattccgttgtgttaacacttatggaagctacgagtgcaagtgtccagtcgggtatgtattgcgagaggaccgacgaatgtgcaaggatgaagacgagtgtgaggagggaaagcatgactgtacagaaaaacagatggaatgcaaaaatttaatcggcacttatatgtgcatatgcgggccgggctatcagcgccgtccagatggtgagggatgtgtggacgagaacgaatgccagacaaagcccggtatctgcgaaaacggaagatgcctgaatacacgaggatcctacacatgtgagtgcaacgacggcttcacagcaagtccaaatcaggacgaatgcttggacaatcgtgaagggtactgctttactgaagtgctacagaacatgtgccaaatcgggtcgagtaacaggaaccccgtcaccaaaagcgagtgttgctgcgatggggggagaggatggggtccacactgtgagatctgtcccttccagggtacagtagcgtttaaaaagttgtgccctcacggtagaggatttatgactaatggggccgatatcgatgagtgtaaggtaatccacgacgtgtgtcgaaacggagaatgtgtaaatgatcgcggaagttaccactgcatctgcaaaaccgggtataccccagacatcaccgggactagttgcgtagacttgaatgagtgcaatcaggccccaaaaccatgtaacttcatttgcaaaaacacagaaggaagttaccagtgtagttgccccaaagggtatatactccaggaagatggtcgcagctgtaaagacctcgacgaatgcgctactaaacaacacaattgccagttcctgtgtgttaataccatcgggggttttacttgtaaatgcccccccggctttactcaacatcatactagctgcatagacaacaacgaatgcacgagcgatatcaatctgtgtgggtctaagggcatttgtcaaaacactcccggctccttcacgtgtgagtgccagcggggattttcactagatcagacaggatcaagttgcgaagatgtggatgaatgtgagggaaatcataggtgtcagcacggttgtcagaatattatcggggggtatagatgctcatgtcctcagggatacctgcaacattaccagtggaatcagtgcgtggatgagaatgaatgtctgtctgcgcacatctgtggcggggcatcttgtcacaatactcttggcagttataaatgcatgtgccccgccggttttcaatatgagcagttcagcggaggctgccaggacattaacgaatgcgggagcgctcaagcaccctgttcctatgggtgctccaacaccgaggggggatatctctgtggatgcccacccggatattttagaattggtcaggggcattgcgttagcggtatggggatggggcggggaaaccccgagccgcctgtgtcaggcgaaatggacgacaatagcctctctccagaggcctgctatgaatgtaagattaacggttatcccaagagggggaggaagaggagatcgaccaacgagactgacgcctctaatattgaagatcagagtgagacagaggccaatgtgagtctcgcttcatgggacgtggaaaaaaccgcgattttcgcatttaatatcagccacgtgagtaacaaggtacggatactcgagctactacctgctcttactaccctcacaaatcacaatcgttacctgatcgagtcaggcaatgaagacggattctttaagatcaaccagaaagagggcatctcctatctccattttacgaagaagaagcctgtagccggtacctatagccttcaaatctcctcaactcccctgtacaaaaaaaaggagctgaatcagctcgaagataagtacgacaaggactacctgtccggtgagctgggtgataacctgaagatgaaaattcaggttctgctccactag

SEQ ID NO: 2872 - DNA, 2958 bp, Artificial Sequence
  derived and/or modified sequence
atgggcttcgtgcccagcgccgacggcaaggcctgcgaggacatcgacgagtgctctctgcctaacatctgcgtatttggcacatgccacaacctacccggtctctttcgatgcgaatgcgaaattggctatgagctagataggtccggcggcaattgtactgatgtcaacgaatgtctcgacccaacgacttgtatctccggtaactgcgtgaacactccaggatcctatatttgtgactgtcctcctgatttcgagttgaatccaacccgcgtgggctgtgtagacacccgcagcggcaattgctacctggacatcaggccacggggggacaacggtgatactgcttgtagtaacgaaatcggagtgggcgtgtccaaggcctcatgttgttgctccctggggaaggcttgggggacaccttgcgaaatgtgtccagctgttaatacaagcgagtacaagatcctgtgccccgggggagagggtttccgccccaaccccattaccgtgatccttgaagatatagatgagtgccaggagctcccaggcctgtgtcagggtggcaagtgcatcaacacatttggtagtttccagtgcagatgcccaactgggtattacctgaatgaagatacccgagtctgtgacgatgtgaacgagtgtgaaacgcctggcatttgtggaccaggaacatgttataacacagtcgggaactacacttgtatttgccccccagactacatgcaggttaatggaggtaataactgtatggatatgcgccgcagtctgtgttacagaaactactacgccgataaccagacatgcgacggcgagctgctcttcaacatgaccaagaagatgtgctgctgtagctacaatattggtcgtgcttggaacaagccctgtgaacagtgccctatccccagcaccgacgagtttgccaccttatgtggctctcagcggcccggttttgtgatcgacatctacactgggctgcccgtggacatcgatgagtgtcgggaaattccaggagtgtgcgagaacggtgtgtgtatcaacatggtgggctcatttcggtgtgagtgcccggttggctttttttataacgacaagttacttgtttgtgaagatattgacgagtgccagaatggccccgtatgccagaggaacgccgagtgcattaatactgctggctcttataggtgcgactgtaagcccggttaccgctttacctctacaggacagtgcaacgatcggaatgaatgccaagagatccccaacatttgttcccatgggcagtgtatcgatacggtagggagcttttactgtctctgccacacaggtttcaagaccaacgacgatcagacgatgtgcctggacattaacgaatgtgagcgggatgcgtgcggtaatggcacatgcaggaatactataggatcctttaattgccgctgcaaccacggattcattctctctcataacaatgactgtattgatgtggatgagtgcgcatctggcaacgggaatctgtgtcgcaacggtcaatgcattaataccgttggctccttccagtgtcaatgcaacgaggggtacgaggtggcaccagatgggagaacatgcgtcgacatcaacgagtgcctgcttgaacctcgcaaatgtgccccaggcacctgtcagaatttggacggatcttataggtgcatctgccctccaggctacagtctgcagaatgaaaagtgcgaagacatcgatgaatgcgtcgaggagcctgagatatgcgccctgggcacctgtagtaacaccgaaggttccttcaagtgtttgtgcccggaaggtttcagtctctcttccagcggaaggcggtgccaggatttgcgaatgagctactgttacgctaagttcgagggtggaaagtgcagttcccccaagagcagaaatcactccaagcaggaatgttgctgcgctctgaagggggagggatggggggatccgtgcgaactgtgtccgaccgaacccgatgaagcctttcgccagatttgcccctatggttctggcatcattgtcggccctgatgactccgctgttgatatggatgagtgtaaagaacccgatgtgtgcaagcacggtcagtgtatcaataccgatgggagctaccgttgcgaatgtccgtttggatacatactggcaggcaacgagtgtgttgatactgacgagtgctccgttgggaatccttgcggaaacggaacttgcaaaaacgtcatcgggggctttgaatgcacctgcgaagagggattcgagcccggccccatgatgacttgcgaggatattaatgaatgtgctcagaaccctctcctctgtgcattcagatgcgtgaacacatacgggtcctacgagtgcaaatgccccgtggggtatgtgttgcgagaagaccgccgaatgtgtaaggacgaggatgagtgcgaggaggggaagcatgactgtaccgaaaagcaaatggagtgcaagaacctcatcgggacgtacatgtgcatttgcgggcctggctatcagcgtagaccggatggcgaggggtgcgtggatgaaaacgagtgccagacaaagccaggcatatgcgagaatgggaggtgcctgaatacaagaggtagttacacttgcgagtgtaatgacggtttcaccgcctcgcctaaccaagatgagtgtctggatgttatcctttcccttctcctgttgagtcctgcctttccctcttgcttcttctcacctcgcaccattggaaaaggaactgcatcacaacggtgttataaaacgtgcgtccggtcagcaccagccactggaactccatccccgaatcggaatgccgccgtcacggagggcgaagcgggcgtgccgacagtgaggtccgctctatcccgcggcctgtggcttagtaggaattctgtgccaatggctgaggactcctag

SEQ ID NO: 2873 - DNA, 3450 bp, Artificial Sequence
  derived and/or modified sequence
atgcggcggggccggctgctggagatcgccctgggcttcaccgtgctgttagcctcatatacttcccatggcgcagatgccaatctagaggccggcaatgtgaaggagacgcgggcatcgagagccaaacgcagggggggaggtgggcacgacgcacttaagggccccaatgtttgcgggtccaggtacaacgcctactgttgccccggctggaagacccttcctgggggcaaccagtgcattgtgcccatctgtagacactcctgtggggatggcttctgctcccgacctaacatgtgcacatgcccgtctggtcagatcgcccccagctgcgggtctcgaagtattcagcactgcaatattagatgcatgaacggcggatcttgttctgacgatcactgcctctgtcagaagggctatatcggaacccactgtggccagccagtgtgtgaatccggctgcctgaacgggggccgatgtgtcgctcccaaccgctgcgcatgcacgtatggattcacagggcctcagtgtgagcgagattaccgcaccggtccctgtttcaccgttatctcaaatcagatgtgtcagggccagctgagcggcatcgtctgcaccaagaccctgtgctgcacatacattaacgaatgcgagatcggcgcacataactgtggtaagcatgctgtatgtacgaatactgcaggttcgttcaagtgttcttgcagccctgggtggattggggacgggattaaatgcactgaccttgatgaatgctcaaatggaacccacatgtgctctcagcacgctgactgcaaaaataccatgggatcctacagatgcctgtgcaaggaggggtacacaggggacggatttacctgtactgacttagacgagtgctctgaaaacctcaatctctgtggtaatggtcagtgcctcaacgcccctggcggctacagatgcgaatgtgatatggggtttgtgccatcggccgatgggaaagcctgtgaagacatcgacgagtgctcactaccgaacatctgcgtgtttggcacatgccataacttacctggcctcttccgctgtgagtgcgagatcggctacgaactggaccggtctggaggaaattgcactgacgtcaatgagtgtctggatccgaccacctgtatcagcggaaattgcgtgaatacacctggtagttacatttgcgattgcccccccgactttgaactcaacccaacacgtgtcggatgcgtcgacacccggtcagggaactgctatctggacatacgcccgcgcggggacaatggtgacaccgcttgctcgaacgaaattggggtgggggtgtcaaaggcgtcgtgctgctgcagccttggtaaggcctggggcacgccttgtgagatgtgcccggctgtcaatacctccgaatacaaaattctttgcccggggggagagggctttaggccaaaccctataaccgtcattctggaggatatcgacgagtgtcaagaactgccggggctatgtcagggcgggaagtgtattaacaccttcgggtcattccagtgtagatgtccaaccgggtactacttgaacgaagatacccgggtgtgtgatgatgtgaatgaatgcgaaacccccgggatatgtggccccggcacgtgctataacacggtgggtaattacacttgcatctgccccccagattacatgcaggtgaacggaggcaacaactgtatggacatgcggaggtcattgtgttaccggaattactacgcggataaccagacttgtgatggagaactgctgtttaacatgactaagaagatgtgttgttgctcctacaacatagggagagcgtggaataagccttgtgagcagtgtccgatcccaagcacagatgagttcgcaacactctgtgggagccaaaggcctggattcgtaatcgatatttacactggactgccagtcgacatcgatgagtgtcgcgagatcccgggagtgtgcgagaacggagtgtgcattaatatggtcggctcctttcggtgtgaatgtcccgtggggtttttttataatgataagcttctcgtgtgtgaggatattgatgaatgccagaatggcccggtctgtcaaaggaatgctgagtgtatcaacaccgctggcagctataggtgtgactgcaagcctggatatagattcacaagtacaggccagtgcaacgataggaacgagtgccaggaaattcctaacatatgtagccatgggcagtgtattgatacagtggggagtttttattgcctgtgtcataccggatttaagactaatgatgatcagaccatgtgcctggatatcaatgagtgtgagcgcgacgcttgcggtaacgggacctgtcgtaataccattggcagcttcaactgcagatgtaaccatgggtttattctgagtcacaacaatgactgtatcgacgtggatgagtgcgccagcggcaacgggaatttgtgtagaaacggacaatgcatcaatacggtgggttcctttcaatgtcagtgtaacgaggggtacgaagtagctcccgatggtcggacctgtgttgacatcaatgaatgtttgttggagccccgaaaatgtgcaccgggcacttgccagaacctcgacggcagctacagatgtatttgccctccaggctactctttacagaatgaaaagtgtgaggacatcgacgagtgcgtggaagaacctgaaatctgcgcccttggcacgtgctcaaacaccgagggaagtttcaagtgcttgtgccccgagggatttagcctatcatctagcggtcgtcgatgtcaagacctgcgcatgtcttactgttatgccaaatttgagggcgggaaatgcagcagccctaaaagtaggaatcatagcaagcaggagtgttgctgcgctctgaagggagaagggtggggagacccttgcgagctctgccccacggaacccgatgaggctttcaggcagatctgtccctacggatctggaattatcgtggggcctgacgacagtgccgtggatatggacgagtgcaaagagccggatgtctgtaaacacggtcagtgcatcaatacagatgggagctacaggtgtgagtgcccattcgggtacatcctcgccggcaacgaatgtgtcgatactgacgagtgctccgttggtaatccatgcggaaatggtacgtgtaagaatgtcattggaggttttgagtgtacgtgtgaggaggggttcgaaccagggccaatgatgacctgtgaggatataaatgagtgtgcccagaaccctctgctgtgtgcctttcggtgcgttaacacttacggatcctatgaatgtaaatgccccgttggttatgtgctgagggaagaccggaggatgtgcaaagatgaggacgaatgtgaagaagggaagcatgattgtacatag

SEQ ID NO: 2874 - DNA, 8615 bp, Artificial Sequence
  derived and/or modified sequence
atgcgcagagggaggctgttggaaattgctttagggttcactgtgctgctggcctcttatacgtcccatggcgcagacgcgaatcttgaggccggtaatgttaaagagactagagcttcccgcgctaaacgtcgcggtgggggaggacacgacgcccttaagggacctaacgtgtgtggcagcagatacaatgcttactgctgccctgggtggaagacactgccgggtggcaatcagtgcatcgtccctatttgccgtcacagctgcggcgacggtttttgcagtagaccgaatatgtgcacctgcccctccggacaaatcgctccatcatgtggatcccgcagtatccagcattgtaacatccggtgcatgaacgggggaagctgttctgatgatcactgtttatgtcagaaggggtatatcggaacacactgcggccaacctgtatgtgagtccggctgcctaaacgggggtcggtgcgttgctcctaaccggtgcgcttgcacctatggattcactggtccccagtgcgagcgggactatcgcacaggaccctgtttcaccgttatcagtaaccaaatgtgccaagggcaattaagtggaattgtgtgtaccaagaccctgtgctgcgccaccgtgggtagagcctggggacacccatgtgagatgtgccccgcacagccccatccctgcagaaggggtttcattcctaacatacggactggagcttgccaagatgtcgacgagtgtcaagcaatccccggactgtgccaggggggaaattgtattaacacagtggggagtttcgagtgcaagtgtccggctggccataagttaaatgaggtgtcccagaagtgcgaggatattgatgaatgcagcaccattccaggtatttgtgaggggggtgagtgtaccaacaccgtgagctcatacttttgtaaatgtcccccaggcttttacacaagtcccgatggtaccagatgtatagatgttcgccctgggtattgctacacagcactcaccaacggtagatgtagcaaccagttgccccagagtatcaccaaaatgcagtgctgttgtgacgcgggaaggtgttggtctcccggagtcaccgtggcaccagaaatgtgtcccatccgggcaactgaggattttaataaattgtgttccgtgccaatggtgatcccgggtaggcccgagtatcccccacccccactcggacctattcctccggtgctgcccgttcctccagggtttccccctggacctcagatcccagtgcctcgacctccggtcgaatatctctatccttcacgggagcccccacgggtgctacccgtgaacgtcacagactattgccagctggtcagatacctatgccaaaatggaagatgcatcccgactccaggctcttgtagatgtgagtgcaataaaggctttcaacttgacttgcggggtgagtgtatcgatgtggacgaatgtgagaaaaatccctgcgcagggggtgaatgtattaacaaccagggtagttacacctgtcagtgcagggccggataccagagcaccctgaccaggacagagtgtcgggatatagacgagtgtctacaaaatggccgaatctgcaacaacggaaggtgcattaatactgacgggagctttcactgtgtatgtaatgcagggtttcatgtgacaagggacggaaaaaactgtgaggacatggacgaatgctcaatcaggaatatgtgcctgaatggaatgtgcattaacgaggacggttcctttaaatgcatttgcaagcccggtttccagctggcctctgacggtcgttattgtaaggacatcaatgagtgtgaaactccgggtatttgtatgaacggtcgttgtgtgaataccgacgggtcctatagatgtgagtgttttccaggtctggccgtcggcttggatggcagagtgtgcgtggacacccacatgagatccacatgttacgggggatacaagcggggacaatgtattaaacctctttttggcgcagtgacaaagtcagaatgctgttgtgcaagcactgagtacgcgtttggcgaaccatgccagccatgtccggctcagaattccgcggaataccaggccctgtgcagctccggcccaggaatgaccagtgcaggcagcgatatcaacgaatgcgccctggatcctgacatctgccctaatgggatttgtgagaacctgagaggaacctataagtgcatatgcaactccggttatgaggtagattcgactggaaaaaattgtgtcgatattaacgaatgtgtgctcaacagtttgctgtgtgataatgggcagtgccgcaatactcccggttcctttgtgtgcacatgtcccaagggattcatttataaaccagatctgaagacatgcgaagatattgatgaatgcgaatctagtccatgcatcaacggggtctgcaagaacagtccaggaagtttcatctgcgagtgctcttcagaaagcaccttagatcctacgaagaccatttgcattgagaccattaaggggacatgctggcagactgtcatagatggtcggtgcgagattaacattaacggtgccactctgaagagccagtgctgctcctctctgggcgctgcatggggctcaccatgcacactctgccaggtggatcccatttgtggcaagggctatagccggattaaaggtacccagtgtgaagacatcgatgaatgcgaggtgtttccaggcgtgtgtaaaaatggactgtgtgtaaatacccgtggcagttttaagtgtcaatgcccttcgggcatgacactcgatgccaccgggcgtatttgtctggacattaggttggaaacctgttttttgcgctacgaggatgaagaatgcacgctccccatcgccggacgccacaggatggatgcttgttgctgtagcgtaggagccgcatggggtaccgaggaatgcgaagagtgtccgatgaggaataccccagagtacgaggaactttgcccaagaggcccaggttttgcaacgaaggagatcaccaatggaaaacctttcttcaaagacattaatgaatgcaaaatgatcccgagcctttgtacccacggaaaatgccggaacacaatcgggagcttcaaatgtcggtgcgactccggatttgccctggacagcgaggaaaggaactgcaccgatatcgatgagtgccgcataagcccagatctctgtgggaggggtcaatgtgtgaatactcccggtgatttcgagtgtaaatgcgacgaggggtacgaaagtgggttcatgatgatgaagaactgtatggacattgatgagtgccagcgcgatccgctcttgtgccggggaggggtgtgccacaacaccgagggcagctacaggtgcgagtgtcctccaggtcaccagttgagccctaacatctcagcctgcattgacatcaatgaatgcgaactctctgcacatctgtgtcctaatggccgatgcgtaaacctcattggaaagtatcagtgtgcgtgtaacccaggctatcattcaacccccgatcggctgttctgcgtggacatcgacgagtgtagtattatgaatggcggttgcgaaactttctgtacaaattccgaaggttcttacgaatgttcttgtcagcccggattcgccctgatgcccgatcaacgcagctgtacggatatcgacgagtgcgaggacaatcctaatatttgcgatgggggtcagtgcactaatatcccaggggaatatagatgtctttgctacgacgggtttatggcaagtgaggatatgaaaacctgcgtagatgtgaacgaatgtgacctcaacccaaatatctgcctcagcggaacttgcgagaacacgaaagggtctttcatttgtcactgtgatatgggctactccggcaaaaagggaaagactgggtgcactgacatcaacgaatgcgagattggcgctcacaattgcggtaaacacgcagtctgcaccaatactgcaggcagttttaaatgcagctgttctcccggatggattggcgacggaattaagtgcaccgacctggacgagtgctcaaatggaacccacatgtgtagccagcatgcagactgcaaaaatactatgggatcttatcgatgcctgtgcaaagaaggatacacaggtgacggatttacatgtactgatctggacgagtgttcagagaatttaaatctgtgcggcaatggacaatgcctgaatgctccaggcggatatcgatgcgagtgcgacatgggttttgtgccgagtgcggacggcaaggcttgtgaagatatcgacgagtgcagccttcctaacatctgcgtgtttggaacttgccacaacctccccggactgtttcggtgtgagtgcgaaatcggctacgagctggatagatccggagggaattgtacagacgtgaatgaatgcctagatcccacaacatgcatttcagggaattgcgtaaacacccccggttcttacatatgtgactgcccacctgacttcgagctgaatccaaccagggtggggtgtgtcgatacccgctctggcaactgctatctggacatcaggcctcggggagacaatggagacacagcctgtagcaacgaaatcggcgtgggggtgtctaaagcctcttgttgttgcagcctaggcaaggcctggggtaccccttgtgaaatgtgtccagcggtgaacactagcgaatacaagattctgtgcccgggaggggagggtttcaggccgaatccaattacggtcattcttgaagacatcgacgagtgccaagaactccctggcctatgtcagggaggaaagtgcatcaatactttcgggagtttccagtgtcgatgccctactggttactatctgaatgaagacacaagagtttgtgatgatgttaacgaatgcgagacccccggaatatgtgggcctgggacatgctacaacactgtgggtaattacacctgtatctgcccccctgactacatgcaggtgaacggaggtaataactgcatggacatgagacgcagtctgtgttacaggaactattatgctgataatcagacttgcgacggcgagctcctgtttaacatgactaagaaaatgtgctgttgcagttacaacatcggcagggcctggaacaagccttgcgagcaatgtccaatcccatccacggatgagttcgcaaccctttgtgggtcacagaggcccggttttgttatagacatctacaccgggctccccgttgatattgacgagtgtagggagatccctggagtgtgcgagaatggggtctgcatcaacatggtgggttcttttcggtgcgagtgccctgtcggcttcttctacaacgataaactcttggtgtgtgaagatatagacgagtgccagaacgggccagtgtgtcagaggaatgcagaatgcatcaacaccgccggttcataccggtgcgattgcaaacctgggtaccggttcacttccaccgggcagtgcaacgaccggaacgagtgccaggagatccctaacatttgtagtcacggacaatgtatcgacacagtgggtagcttctattgtttatgtcacacaggattcaaaacaaacgacgaccagaccatgtgtttggacatcaacgagtgcgaacgggatgcttgtggcaatggaacttgtcggaatactatcggatcatttaattgtcgctgcaaccatggcttcatactgtcgcataataacgattgtattgacgtcgatgagtgtgcatccgggaacggaaacctctgtagaaacggacagtgcatcaacactgtgggctcctttcagtgccaatgtaacgaggggtacgaagtggcgcctgacggtagaacttgtgtcgatatcaatgaatgccttctcgagccaaggaagtgtgcccctggaacctgccagaacctcgatggatcctacagatgcatttgtccacccggatatagtctgcagaatgagaaatgtgaggatattgatgaatgtgtggaggaacctgagatctgtgcattgggaacctgcagtaacactgagggttcctttaaatgcctgtgtcccgaaggattcagtctcagcagctctggaagaaggtgccaggatctccggatgtcctactgctacgcaaaatttgagggaggaaaatgtagttcaccaaaaagccggaaccatagtaagcaggagtgctgttgtgcgctgaaaggcgaagggtggggtgacccctgcgaactatgcccaaccgagcccgacgaagcctttcgtcagatatgcccctatgggtctggtataatcgttggcccagatgattctgccgttgatatggatgagtgcaaagagcctgatgtctgtaagcatgggcagtgcattaataccgacggctcatacaggtgtgagtgcccattcggatacattttagccggaaatgagtgcgtcgacaccgacgagtgcagtgtggggaatccttgcgggaacgggacctgcaaaaatgtaattgggggttttgaatgtacatgtgaagagggcttcgagccagggcctatgatgacctgtgaagacatcaatgagtgtgcacagaacccccttctctgcgcattcaggtgtgtgaatacttatggtagctacgaatgcaaatgtccggtaggctatgtgctgcgagaggatcggcgtatgtgcaaggacgaggatgaatgcgaagagggcaaacatgactgtaccgaaaagcaaatggagtgcaagaatctgatcgggacatacatgtgcatctgcggccctggctatcagagaagacccgacggtgaaggctgcgtggatgagaacgaatgtcaaactaagccgggtatctgcgaaaatggcagatgtctgaacacccggggttcatatacttgcgagtgtaatgatgggtttactgccagtcctaatcaggacgaatgcctggataatcgggagggctattgctttaccgaagtgctgcagaacatgtgccagatcggcagttccaacagaaacccggttaccaagtcagagtgctgttgtgacggaggacggggttggggccctcactgtgagatttgtccttttcagggcaccgtcgcttttaaaaagttgtgccctcatgggagaggattcatgacaaatggtgccgacattgatgagtgcaaagtgattcatgatgtgtgccggaatggggagtgtgtgaacgacagaggttcatatcattgcatctgcaaaacaggttacaccccagatattacaggaacatcctgcgtcgatctgaatgaatgtaaccaggcccctaagccgtgcaactttatctgtaagaataccgaaggctcttatcagtgttcatgtcccaaggggtacatactgcaagaggacggacggtcctgtaaggacctagatgaatgtgccactaaacagcacaattgccaatttctgtgcgtgaacacgatcgggggttttacctgcaaatgccctcctgggtttacccagcaccatacctcctgtatcgacaacaatgaatgcacatccgacattaatctgtgtgggtccaaaggcatctgccaaaataccccaggttctttcacatgtgaatgccagaggggcttttctctagatcagactggtagcagttgtgaagatgttgacgagtgcgagggcaaccatagatgtcaacacggctgccagaatattattggtgggtataggtgctcttgtccccagggatatttgcagcactatcagtggaaccaatgcgtggatgaaaacgagtgcctttcagcccacatctgcggcggtgcctcctgccataacactctgggttcttacaaatgcatgtgtcccgctggcttccaatatgaacagttctcagggggatgtcaagacataaacgaatgtggcagcgctcaagcaccatgttcttacggctgttctaacacggaaggtggctatctgtgtgggtgtccccctgggtatttcagaattggccaaggacactgtgtgtctggtatgggcatgggtcggggaaaccctgagccccctgtctctggcgagatggacgacaacagcctctcacctgaggcgtgttatgaatgtaaaattaatggatatcccaaaaggggacgaaagcggcgaagcaccaatgagacagacgccagcaatatcgaggatcagtccgaaaccgaagctaacgtttcccttgccagctgggatgtggaaaaaacagccatctttgcttttaacatctcccatgttagcaataaggtccgcatcttagagcttctccccgctctcacaactctgacaaaccacaatcgctacttaatcgagtctggaaacgaagacgggtttttcaaaattaatcagaaagagggaatcagctacttacactttacaaaaaaaaagcctgtagcaggaacctattcacttcaaatctcgagcactcctctgtataagaagaaagagcttaaccagttagaggataaatatgacaaggactatctgtccggggaattgggggataacctcaagatgaaaatccaggtactactgcacta

SEQ ID NO: 2875 - DNA, 2958 bp, Artificial Sequence
  derived and/or modified sequence
atggggtttgtgcctagcgccgatggcaaggcatgcgaagacattgatgaatgtagtctgcccaacatatgcgtgttcggaacttgtcacaacttgcctggtctatttagatgcgagtgcgagattgggtacgaacttgatcgcagtggaggcaactgtactgacgtgaatgaatgtttagaccctacaacctgcatctcaggaaactgcgtgaacacacccggatcttatatctgcgattgcccgcctgacttcgaacttaaccccacccgcgtgggttgcgtggatactcggtcgggtaattgctatctggacatccgaccgcgtggcgataatggtgacacagcttgctctaacgaaataggcgttggcgtctctaaagctagttgctgttgttccctgggcaaggcatggggcaccccttgcgaaatgtgccctgcagtcaacacctccgagtacaaaattctgtgtcctggtggggaaggattcaggcctaacccgataactgtcattctggaggatattgatgaatgtcaggagctgcctggcctgtgtcagggagggaagtgcatcaatacatttggctccttccaatgtaggtgccctaccggatactacctcaacgaagatacacgcgtgtgcgacgacgtcaatgagtgcgaaaccccaggcatctgcggcccaggcacgtgttataacaccgtgggcaactatacctgtatatgtcctcccgattatatgcaggtcaatgggggaaacaattgcatggatatgcgtcggtcactgtgctatcgcaattactatgctgacaaccagacctgcgacggggaacttctgttcaatatgaccaaaaaaatgtgttgttgcagttacaacataggtagagcctggaacaagccttgtgagcaatgtcccatacctagcacagacgagttcgcgacactttgtggttcacaacgaccaggctttgtaattgatatttacacaggtctgcctgtagatatcgatgaatgccgcgagattccaggcgtatgtgagaatggagtttgtataaatatggtgggatcttttcggtgtgaatgcccagtgggattcttttacaacgacaagctgctggtgtgtgaggatatcgacgaatgccagaacgggcctgtgtgccagagaaacgccgaatgtataaatacggccggatcttaccgctgtgattgcaaaccaggttaccggttcacttccacgggccagtgcaatgatcgcaatgaatgtcaagaaatccctaacatttgttctcacggacagtgcattgatacagtcggctctttctattgtctgtgccatacagggttcaagaccaatgacgaccagactatgtgcctggatattaatgagtgtgagagggacgcctgcggtaatggcacttgccggaataccattggctccttcaattgtaggtgcaaccatggtttcattctctctcacaataatgattgtatagacgtggacgagtgcgcgtccgggaacgggaacctttgtcggaacggccagtgtataaatactgttggaagttttcaatgtcagtgtaacgaaggctacgaggtggctcccgacggacgtacatgcgttgacatcaacgaatgcctcctggagcctagaaagtgtgcccctggcacatgccaaaacctggatggaagctaccgctgcatatgccctccagggtacagtctgcagaacgaaaaatgcgaagatatcgatgaatgcgttgaggagcccgaaatatgcgccctgggtacttgtagcaataccgaggggagtttcaaatgcttatgtccagagggattttcactgtcatcttctggtcgtagatgccaggatcttagaatgtcctattgttacgctaaattcgaaggaggcaaatgctctagtcctaagagcagaaaccatagcaagcaggagtgctgctgcgccctgaaaggggaggggtggggagatccctgcgagctttgcccaacagagcctgacgaagccttcagacaaatctgcccatatggctcaggtattattgttggtccagatgactccgcggtggatatggacgagtgtaaagagcccgacgtttgtaagcatgggcagtgcataaataccgatgggtcataccgctgcgagtgcccctttggctatattcttgcagggaatgagtgtgtcgatactgacgagtgctctgtaggtaacccatgcggcaatgggacctgtaaaaatgtgatcgggggtttcgagtgtacttgtgaggaagggtttgagcccggtccaatgatgacgtgtgaggacatcaacgagtgcgcacaaaaccctctcctatgcgcttttcgctgtgtgaacacgtacggtagctacgagtgcaagtgccctgtaggatatgtcctccgggaggatagaagaatgtgcaaagatgaggacgagtgcgaggagggtaagcacgactgtacggaaaagcaaatggagtgcaagaacctgattggaacttacatgtgcatatgtgggcctggataccagagacgcccagatggagagggttgtgttgatgagaacgagtgtcagaccaagcccggaatctgcgagaatggcagatgtttgaacacccggggatcctacacctgtgagtgtaatgacgggtttacagcctccccgaatcaggatgagtgcctcgacgtgatcctcagcctgctactccttagcccggctttcccctcatgctttttctccccaagaaccatcgggaagggaaccgcctcacagagatgctataaaacatgcgtgcgctcagctcccgcaacaggcacaccatctcccaaccgcaacgctgctgtcacggagggtgaggcgggtgtgccgactgtccgtagtgcacttagtcggggattgtggctttcaaggaattcagtgccaatggccgaggatagttag

SEQ ID NO: 2876 - DNA, 3450 bp, Artificial Sequence
  derived and/or modified sequence
atgaggcgaggacgcctgcttgaaatcgctttaggatttacagtgctgctggcctcctacaccagccatggggcagatgccaacctggaagccggtaatgtcaaagagaccagggctagccgggctaaacgcagaggtggcggagggcacgatgcactcaagggtcccaacgtatgcggctcccgatacaacgcctattgttgccctgggtggaaaacgctccccggtggcaatcagtgcattgtccctatctgtcggcattcctgtggagatggattttgctcgcgccctaacatgtgtacctgtccttccggccagattgcaccaagttgcggatcgaggagcattcagcactgcaatattaggtgtatgaacggagggtcttgttcagatgatcactgtctttgccagaagggatatatcgggacacattgtggtcagccagtatgcgagtccggttgcctcaatggcggaaggtgtgtcgctcctaacaggtgtgcatgtacatacggcttcaccggccctcagtgcgagcgggattaccgtacaggcccttgtttcacggtaattagcaatcaaatgtgccaagggcagctttcaggtattgtctgtacaaagaccctctgttgcacatacattaatgagtgcgaaatcggcgcacataactgtggaaaacacgcagtgtgtactaataccgccggatcattcaagtgcagttgctctccaggctggattggagacggaattaagtgcaccgacttggacgaatgtagtaatgggacacacatgtgctcacaacacgcagattgtaaaaatacaatgggcagctaccggtgtctgtgtaaagaagggtatacaggggatggatttacctgcacagacctcgacgagtgctcagaaaacctgaacctgtgtggtaatgggcaatgcctcaatgcacccggtggctacaggtgcgagtgtgacatgggttttgtccccagtgccgacgggaaggcttgtgaagatatcgatgagtgttccctgccaaatatttgtgtcttcgggacctgtcacaacctaccgggtctgttcaggtgtgaatgcgaaattgggtatgagctggacaggagtggtggcaactgtaccgatgtgaacgagtgcctggatcccaccacatgcatctccgggaactgtgttaacacccccggttcatatatttgcgactgcccacccgattttgagctgaatcccaccagagtgggttgtgtggacactagaagcggcaactgttacttagacataaggcccagaggcgacaacggtgataccgcctgttcaaatgagatcggagtgggagtttccaaggcctcatgttgctgctcattagggaaagcctggggcacaccttgcgagatgtgtcctgcggttaacacgtcagaatacaaaattctgtgccccggaggagaagggttccgcccaaaccctataactgtgatactagaggatattgatgagtgtcaggaactccccggactttgtcagggtggtaaatgcattaatacctttggctcctttcagtgtagatgccctaccggctattatctgaatgaagatactcgtgtgtgcgatgatgtcaatgagtgcgagactcccggaatctgcgggcctggaacctgctataacacagttggaaattatacatgtatctgccccccagattatatgcaggtcaatggcggaaataactgcatggatatgcgcaggagcttgtgctatcggaattattacgcggacaaccagacgtgtgatggcgaactcctgttcaacatgactaaaaagatgtgctgctgttcatacaacataggacgagcatggaataagccctgtgagcagtgcccgattccatctaccgatgagtttgccaccctctgtggcagtcagcgccctggatttgtgatcgatatctatacaggtttgcctgtggatatagacgagtgcagggaaatccctggcgtgtgcgaaaatggtgtgtgcatcaatatggtgggttcctttaggtgtgaatgcccagtcggattcttttataatgacaaacttctggtctgcgaagatatagacgaatgtcaaaacggtcctgtgtgtcaaaggaatgcggagtgtattaatactgctggcagttataggtgcgactgcaagccaggatataggttcacaagcactgggcaatgcaacgataggaacgagtgtcaggagattccgaacatatgttcgcacggtcagtgcatcgataccgttggaagcttctactgcttatgtcatacaggtttcaagacaaacgacgatcagacgatgtgtctggatattaatgagtgtgaaagggatgcttgtggcaatggcacttgccggaacacaatcggttccttcaattgcagatgtaaccacggcttcatattaagtcacaacaacgactgtattgatgtcgatgagtgcgcctccggaaatggtaacctttgcaggaatggccagtgtatcaacaccgtcggtagtttccagtgccagtgtaacgagggatatgaagtagctcccgatggtcgcacatgtgttgacatcaacgagtgtctcctggaacccaggaagtgcgctcccggtacatgtcagaacctcgacggcagctacaggtgcatctgtcctcctgggtatagtttgcagaatgagaagtgtgaggacatcgatgagtgtgtggaggagcccgaaatatgtgctctgggaacgtgctccaacactgaaggctcatttaagtgcctgtgtccagaaggtttctccctttctagttcgggcaggcgctgtcaggacctgaggatgtcttattgttatgccaaattcgagggagggaagtgctcttctccgaaaagccgtaaccactccaagcaggagtgctgctgcgcactcaagggagagggctggggggacccttgcgaattgtgccccacagaaccagacgaggcttttcgccagatttgcccatacggatctggcattattgtgggacctgatgatagtgccgttgacatggatgaatgtaaggaaccggatgtctgcaaacatggacagtgtatcaacacagatggtagctatcggtgcgagtgcccattcggttacatcctggctggcaacgaatgcgtggacacagatgagtgctctgttggcaacccctgtggtaacgggacatgcaagaatgtgatagggggattcgaatgtacgtgtgaggaaggattcgagcctggacctatgatgacttgcgaagatatcaatgagtgtgctcagaaccccctgttgtgcgcctttaggtgcgtgaatacctatgggtcttacgagtgcaaatgtcccgtggggtacgtactgagggaagaccgccgaatgtgcaaagatgaggacgagtgcgaggaaggtaagcatgattgcacttag

SEQ ID NO: 2877 - DNA, 8616 bp, Artificial Sequence
  derived and/or modified sequence
atgagaagaggcagactgctggagatcgccctgggcttcaccgtgctgctggccagctacaccagccacggcgccgacgccaacctggaggccggcaacgtgaaggagaccagagccagcagagccaagagaagaggcggcggcggccacgacgccctgaagggccccaacgtgtgcggcagcagatacaacgcctactgctgccccggctggaagaccctgcccggcggcaaccagtgcatcgtgcccatctgcagacacagctgcggcgacggcttctgcagcagacccaacatgtgcacctgccccagcggccagatcgcccccagctgcggcagcagaagcatccagcactgcaacatcagatgcatgaacggcggcagctgcagcgacgaccactgcctgtgccagaagggctacatcggcacccactgcggccagcccgtgtgcgagagcggctgcctgaacggcggcagatgcgtggcccccaacagatgcgcctgcacctacggcttcaccggcccccagtgcgagagagactacagaaccggcccctgcttcaccgtgatcagcaaccagatgtgccagggccagctgagcggcatcgtgtgcaccaagaccctgtgctgcgccaccgtgggcagagcctggggccacccctgcgagatgtgccccgcccagccccacccctgcagaagaggcttcatccccaacatcagaaccggcgcctgccaggacgtggacgagtgccaggccatccccggcctgtgccagggcggcaactgcatcaacaccgtgggcagcttcgagtgcaagtgccccgccggccacaagctgaacgaggtgagccagaagtgcgaggacatcgacgagtgcagcaccatccccggcatctgcgagggcggcgagtgcaccaacaccgtgagcagctacttctgcaagtgcccccccggcttctacaccagccccgacggcaccagatgcatcgacgtgagacccggctactgctacaccgccctgaccaacggcagatgcagcaaccagctgccccagagcatcaccaagatgcagtgctgctgcgacgccggcagatgctggagccccggcgtgaccgtggcccccgagatgtgccccatcagagccaccgaggacttcaacaagctgtgcagcgtgcccatggtgatccccggcagacccgagtacccccccccccccctgggccccatcccccccgtgctgcccgtgccccccggcttcccccccggcccccagatccccgtgcccagaccccccgtggagtacctgtaccccagcagagagccccccagagtgctgcccgtgaacgtgaccgactactgccagctggtgagatacctgtgccagaacggcagatgcatccccacccccggcagctgcagatgcgagtgcaacaagggcttccagctggacctgagaggcgagtgcatcgacgtggacgagtgcgagaagaacccctgcgccggcggcgagtgcatcaacaaccagggcagctacacctgccagtgcagagccggctaccagagcaccctgaccagaaccgagtgcagagacatcgacgagtgcctgcagaacggcagaatctgcaacaacggcagatgcatcaacaccgacggcagcttccactgcgtgtgcaacgccggcttccacgtgaccagagacggcaagaactgcgaggacatggacgagtgcagcatcagaaacatgtgcctgaacggcatgtgcatcaacgaggacggcagcttcaagtgcatctgcaagcccggcttccagctggccagcgacggcagatactgcaaggacatcaacgagtgcgagacccccggcatctgcatgaacggcagatgcgtgaacaccgacggcagctacagatgcgagtgcttccccggcctggccgtgggcctggacggcagagtgtgcgtggacacccacatgagaagcacctgctacggcggctacaagagaggccagtgcatcaagcccctgttcggcgccgtgaccaagagcgagtgctgctgcgccagcaccgagtacgccttcggcgagccctgccagccctgccccgcccagaacagcgccgagtaccaggccctgtgcagcagcggccccggcatgaccagcgccggcagcgacatcaacgagtgcgccctggaccccgacatctgccccaacggcatctgcgagaacctgagaggcacctacaagtgcatctgcaacagcggctacgaggtggacagcaccggcaagaactgcgtggacatcaacgagtgcgtgctgaacagcctgctgtgcgacaacggccagtgcagaaacacccccggcagcttcgtgtgcacctgccccaagggcttcatctacaagcccgacctgaagacctgcgaggacatcgacgagtgcgagagcagcccctgcatcaacggcgtgtgcaagaacagccccggcagcttcatctgcgagtgcagcagcgagagcaccctggaccccaccaagaccatctgcatcgagaccatcaagggcacctgctggcagaccgtgatcgacggcagatgcgagatcaacatcaacggcgccaccctgaagagccagtgctgcagcagcctgggcgccgcctggggcagcccctgcaccctgtgccaggtggaccccatctgcggcaagggctacagcagaatcaagggcacccagtgcgaggacatcgacgagtgcgaggtgttccccggcgtgtgcaagaacggcctgtgcgtgaacaccagaggcagcttcaagtgccagtgccccagcggcatgaccctggacgccaccggcagaatctgcctggacatcagactggagacctgcttcctgagatacgaggacgaggagtgcaccctgcccatcgccggcagacacagaatggacgcctgctgctgcagcgtgggcgccgcctggggcaccgaggagtgcgaggagtgccccatgagaaacacccccgagtacgaggagctgtgccccagaggccccggcttcgccaccaaggagatcaccaacggcaagcccttcttcaaggacatcaacgagtgcaagatgatccccagcctgtgcacccacggcaagtgcagaaacaccatcggcagcttcaagtgcagatgcgacagcggcttcgccctggacagcgaggagagaaactgcaccgacatcgacgagtgcagaatcagccccgacctgtgcggcagaggccagtgcgtgaacacccccggcgacttcgagtgcaagtgcgacgagggctacgagagcggcttcatgatgatgaagaactgcatggacatcgacgagtgccagagagaccccctgctgtgcagaggcggcgtgtgccacaacaccgagggcagctacagatgcgagtgcccccccggccaccagctgagccccaacatcagcgcctgcatcgacatcaacgagtgcgagctgagcgcccacctgtgccccaacggcagatgcgtgaacctgatcggcaagtaccagtgcgcctgcaaccccggctaccacagcacccccgacagactgttctgcgtggacatcgacgagtgcagcatcatgaacggcggctgcgagaccttctgcaccaacagcgagggcagctacgagtgcagctgccagcccggcttcgccctgatgcccgaccagagaagctgcaccgacatcgacgagtgcgaggacaaccccaacatctgcgacggcggccagtgcaccaacatccccggcgagtacagatgcctgtgctacgacggcttcatggccagcgaggacatgaagacctgcgtggacgtgaacgagtgcgacctgaaccccaacatctgcctgagcggcacctgcgagaacaccaagggcagcttcatctgccactgcgacatgggctacagcggcaagaagggcaagaccggctgcaccgacatcaacgagtgcgagatcggcgcccacaactgcggcaagcacgccgtgtgcaccaacaccgccggcagcttcaagtgcagctgcagccccggctggatcggcgacggcatcaagtgcaccgacctggacgagtgcagcaacggcacccacatgtgcagccagcacgccgactgcaagaacaccatgggcagctacagatgcctgtgcaaggagggctacaccggcgacggcttcacctgcaccgacctggacgagtgcagcgagaacctgaacctgtgcggcaacggccagtgcctgaacgcccccggcggctacagatgcgagtgcgacatgggcttcgtgcccagcgccgacggcaaggcctgcgaggacatcgacgagtgcagcctgcccaacatctgcgtgttcggcacctgccacaacctgcccggcctgttcagatgcgagtgcgagatcggctacgagctggacagaagcggcggcaactgcaccgacgtgaacgagtgcctggaccccaccacctgcatcagcggcaactgcgtgaacacccccggcagctacatctgcgactgcccccccgacttcgagctgaaccccaccagagtgggctgcgtggacaccagaagcggcaactgctacctggacatcagacccagaggcgacaacggcgacaccgcctgcagcaacgagatcggcgtgggcgtgagcaaggccagctgctgctgcagcctgggcaaggcctggggcaccccctgcgagatgtgccccgccgtgaacaccagcgagtacaagatcctgtgccccggcggcgagggcttcagacccaaccccatcaccgtgatcctggaggacatcgacgagtgccaggagctgcccggcctgtgccagggcggcaagtgcatcaacaccttcggcagcttccagtgcagatgccccaccggctactacctgaacgaggacaccagagtgtgcgacgacgtgaacgagtgcgagacccccggcatctgcggccccggcacctgctacaacaccgtgggcaactacacctgcatctgcccccccgactacatgcaggtgaacggcggcaacaactgcatggacatgagaagaagcctgtgctacagaaactactacgccgacaaccagacctgcgacggcgagctgctgttcaacatgaccaagaagatgtgctgctgcagctacaacatcggcagagcctggaacaagccctgcgagcagtgccccatccccagcaccgacgagttcgccaccctgtgcggcagccagagacccggcttcgtgatcgacatctacaccggcctgcccgtggacatcgacgagtgcagagagatccccggcgtgtgcgagaacggcgtgtgcatcaacatggtgggcagcttcagatgcgagtgccccgtgggcttcttctacaacgacaagctgctggtgtgcgaggacatcgacgagtgccagaacggccccgtgtgccagagaaacgccgagtgcatcaacaccgccggcagctacagatgcgactgcaagcccggctacagattcaccagcaccggccagtgcaacgacagaaacgagtgccaggagatccccaacatctgcagccacggccagtgcatcgacaccgtgggcagcttctactgcctgtgccacaccggcttcaagaccaacgacgaccagaccatgtgcctggacatcaacgagtgcgagagagacgcctgcggcaacggcacctgcagaaacaccatcggcagcttcaactgcagatgcaaccacggcttcatcctgagccacaacaacgactgcatcgacgtggacgagtgcgccagcggcaacggcaacctgtgcagaaacggccagtgcatcaacaccgtgggcagcttccagtgccagtgcaacgagggctacgaggtggcccccgacggcagaacctgcgtggacatcaacgagtgcctgctggagcccagaaagtgcgcccccggcacctgccagaacctggacggcagctacagatgcatctgcccccccggctacagcctgcagaacgagaagtgcgaggacatcgacgagtgcgtggaggagcccgagatctgcgccctgggcacctgcagcaacaccgagggcagcttcaagtgcctgtgccccgagggcttcagcctgagcagcagcggcagaagatgccaggacctgagaatgagctactgctacgccaagttcgagggcggcaagtgcagcagccccaagagcagaaaccacagcaagcaggagtgctgctgcgccctgaagggcgagggctggggcgacccctgcgagctgtgccccaccgagcccgacgaggccttcagacagatctgcccctacggcagcggcatcatcgtgggccccgacgacagcgccgtggacatggacgagtgcaaggagcccgacgtgtgcaagcacggccagtgcatcaacaccgacggcagctacagatgcgagtgccccttcggctacatcctggccggcaacgagtgcgtggacaccgacgagtgcagcgtgggcaacccctgcggcaacggcacctgcaagaacgtgatcggcggcttcgagtgcacctgcgaggagggcttcgagcccggccccatgatgacctgcgaggacatcaacgagtgcgcccagaaccccctgctgtgcgccttcagatgcgtgaacacctacggcagctacgagtgcaagtgccccgtgggctacgtgctgagagaggacagaagaatgtgcaaggacgaggacgagtgcgaggagggcaagcacgactgcaccgagaagcagatggagtgcaagaacctgatcggcacctacatgtgcatctgcggccccggctaccagagaagacccgacggcgagggctgcgtggacgagaacgagtgccagaccaagcccggcatctgcgagaacggcagatgcctgaacaccagaggcagctacacctgcgagtgcaacgacggcttcaccgccagccccaaccaggacgagtgcctggacaacagagagggctactgcttcaccgaggtgctgcagaacatgtgccagatcggcagcagcaacagaaaccccgtgaccaagagcgagtgctgctgcgacggcggcagaggctggggcccccactgcgagatctgccccttccagggcaccgtggccttcaagaagctgtgcccccacggcagaggcttcatgaccaacggcgccgacatcgacgagtgcaaggtgatccacgacgtgtgcagaaacggcgagtgcgtgaacgacagaggcagctaccactgcatctgcaagaccggctacacccccgacatcaccggcaccagctgcgtggacctgaacgagtgcaaccaggcccccaagccctgcaacttcatctgcaagaacaccgagggcagctaccagtgcagctgccccaagggctacatcctgcaggaggacggcagaagctgcaaggacctggacgagtgcgccaccaagcagcacaactgccagttcctgtgcgtgaacaccatcggcggcttcacctgcaagtgcccccccggcttcacccagcaccacaccagctgcatcgacaacaacgagtgcaccagcgacatcaacctgtgcggcagcaagggcatctgccagaacacccccggcagcttcacctgcgagtgccagagaggcttcagcctggaccagaccggcagcagctgcgaggacgtggacgagtgcgagggcaaccacagatgccagcacggctgccagaacatcatcggcggctacagatgcagctgcccccagggctacctgcagcactaccagtggaaccagtgcgtggacgagaacgagtgcctgagcgcccacatctgcggcggcgccagctgccacaacaccctgggcagctacaagtgcatgtgccccgccggcttccagtacgagcagttcagcggcggctgccaggacatcaacgagtgcggcagcgcccaggccccctgcagctacggctgcagcaacaccgagggcggctacctgtgcggctgcccccccggctacttcagaatcggccagggccactgcgtgagcggcatgggcatgggcagaggcaaccccgagccccccgtgagcggcgagatggacgacaacagcctgagccccgaggcctgctacgagtgcaagatcaacggctaccccaagagaggcagaaagagaagaagcaccaacgagaccgacgccagcaacatcgaggaccagagcgagaccgaggccaacgtgagcctggccagctgggacgtggagaagaccgccatcttcgccttcaacatcagccacgtgagcaacaaggtgagaatcctggagctgctgcccgccctgaccaccctgaccaaccacaacagatacctgatcgagagcggcaacgaggacggcttcttcaagatcaaccagaaggagggcatcagctacctgcacttcaccaagaagaagcccgtggccggcacctacagcctgcagatcagcagcacccccctgtacaagaagaaggagctgaaccagctggaggacaagtacgacaaggactacctgagcggcgagctgggcgacaacctgaagatgaagatccaggtgctgctgcactag

SEQ ID NO: 2878 - DNA, 2958 bp, Artificial Sequence
  derived and/or modified sequence
atgggcttcgtgcccagcgccgacggcaaggcctgcgaggacatcgacgagtgcagcctgcccaacatctgcgtgttcggcacctgccacaacctgcccggcctgttcagatgcgagtgcgagatcggctacgagctggacagaagcggcggcaactgcaccgacgtgaacgagtgcctggaccccaccacctgcatcagcggcaactgcgtgaacacccccggcagctacatctgcgactgcccccccgacttcgagctgaaccccaccagagtgggctgcgtggacaccagaagcggcaactgctacctggacatcagacccagaggcgacaacggcgacaccgcctgcagcaacgagatcggcgtgggcgtgagcaaggccagctgctgctgcagcctgggcaaggcctggggcaccccctgcgagatgtgccccgccgtgaacaccagcgagtacaagatcctgtgccccggcggcgagggcttcagacccaaccccatcaccgtgatcctggaggacatcgacgagtgccaggagctgcccggcctgtgccagggcggcaagtgcatcaacaccttcggcagcttccagtgcagatgccccaccggctactacctgaacgaggacaccagagtgtgcgacgacgtgaacgagtgcgagacccccggcatctgcggccccggcacctgctacaacaccgtgggcaactacacctgcatctgcccccccgactacatgcaggtgaacggcggcaacaactgcatggacatgagaagaagcctgtgctacagaaactactacgccgacaaccagacctgcgacggcgagctgctgttcaacatgaccaagaagatgtgctgctgcagctacaacatcggcagagcctggaacaagccctgcgagcagtgccccatccccagcaccgacgagttcgccaccctgtgcggcagccagagacccggcttcgtgatcgacatctacaccggcctgcccgtggacatcgacgagtgcagagagatccccggcgtgtgcgagaacggcgtgtgcatcaacatggtgggcagcttcagatgcgagtgccccgtgggcttcttctacaacgacaagctgctggtgtgcgaggacatcgacgagtgccagaacggccccgtgtgccagagaaacgccgagtgcatcaacaccgccggcagctacagatgcgactgcaagcccggctacagattcaccagcaccggccagtgcaacgacagaaacgagtgccaggagatccccaacatctgcagccacggccagtgcatcgacaccgtgggcagcttctactgcctgtgccacaccggcttcaagaccaacgacgaccagaccatgtgcctggacatcaacgagtgcgagagagacgcctgcggcaacggcacctgcagaaacaccatcggcagcttcaactgcagatgcaaccacggcttcatcctgagccacaacaacgactgcatcgacgtggacgagtgcgccagcggcaacggcaacctgtgcagaaacggccagtgcatcaacaccgtgggcagcttccagtgccagtgcaacgagggctacgaggtggcccccgacggcagaacctgcgtggacatcaacgagtgcctgctggagcccagaaagtgcgcccccggcacctgccagaacctggacggcagctacagatgcatctgcccccccggctacagcctgcagaacgagaagtgcgaggacatcgacgagtgcgtggaggagcccgagatctgcgccctgggcacctgcagcaacaccgagggcagcttcaagtgcctgtgccccgagggcttcagcctgagcagcagcggcagaagatgccaggacctgagaatgagctactgctacgccaagttcgagggcggcaagtgcagcagccccaagagcagaaaccacagcaagcaggagtgctgctgcgccctgaagggcgagggctggggcgacccctgcgagctgtgccccaccgagcccgacgaggccttcagacagatctgcccctacggcagcggcatcatcgtgggccccgacgacagcgccgtggacatggacgagtgcaaggagcccgacgtgtgcaagcacggccagtgcatcaacaccgacggcagctacagatgcgagtgccccttcggctacatcctggccggcaacgagtgcgtggacaccgacgagtgcagcgtgggcaacccctgcggcaacggcacctgcaagaacgtgatcggcggcttcgagtgcacctgcgaggagggcttcgagcccggccccatgatgacctgcgaggacatcaacgagtgcgcccagaaccccctgctgtgcgccttcagatgcgtgaacacctacggcagctacgagtgcaagtgccccgtgggctacgtgctgagagaggacagaagaatgtgcaaggacgaggacgagtgcgaggagggcaagcacgactgcaccgagaagcagatggagtgcaagaacctgatcggcacctacatgtgcatctgcggccccggctaccagagaagacccgacggcgagggctgcgtggacgagaacgagtgccagaccaagcccggcatctgcgagaacggcagatgcctgaacaccagaggcagctacacctgcgagtgcaacgacggcttcaccgccagccccaaccaggacgagtgcctggacgtgatcctgagcctgctgctgctgagccccgccttccccagctgcttcttcagccccagaaccatcggcaagggcaccgccagccagagatgctacaagacctgcgtgagaagcgcccccgccaccggcacccccagccccaacagaaacgccgccgtgaccgagggcgaggccggcgtgcccaccgtgagaagcgccctgagcagaggcctgtggctgagcagaaacagcgtgcccatggccgaggacagctag

SEQ ID NO: 2879 - DNA, 3450 bp, Artificial Sequence
  derived and/or modified sequence
atgagaagaggcagactgctggagatcgccctgggcttcaccgtgctgctggccagctacaccagccacggcgccgacgccaacctggaggccggcaacgtgaaggagaccagagccagcagagccaagagaagaggcggcggcggccacgacgccctgaagggccccaacgtgtgcggcagcagatacaacgcctactgctgccccggctggaagaccctgcccggcggcaaccagtgcatcgtgcccatctgcagacacagctgcggcgacggcttctgcagcagacccaacatgtgcacctgccccagcggccagatcgcccccagctgcggcagcagaagcatccagcactgcaacatcagatgcatgaacggcggcagctgcagcgacgaccactgcctgtgccagaagggctacatcggcacccactgcggccagcccgtgtgcgagagcggctgcctgaacggcggcagatgcgtggcccccaacagatgcgcctgcacctacggcttcaccggcccccagtgcgagagagactacagaaccggcccctgcttcaccgtgatcagcaaccagatgtgccagggccagctgagcggcatcgtgtgcaccaagaccctgtgctgcacctacatcaacgagtgcgagatcggcgcccacaactgcggcaagcacgccgtgtgcaccaacaccgccggcagcttcaagtgcagctgcagccccggctggatcggcgacggcatcaagtgcaccgacctggacgagtgcagcaacggcacccacatgtgcagccagcacgccgactgcaagaacaccatgggcagctacagatgcctgtgcaaggagggctacaccggcgacggcttcacctgcaccgacctggacgagtgcagcgagaacctgaacctgtgcggcaacggccagtgcctgaacgcccccggcggctacagatgcgagtgcgacatgggcttcgtgcccagcgccgacggcaaggcctgcgaggacatcgacgagtgcagcctgcccaacatctgcgtgttcggcacctgccacaacctgcccggcctgttcagatgcgagtgcgagatcggctacgagctggacagaagcggcggcaactgcaccgacgtgaacgagtgcctggaccccaccacctgcatcagcggcaactgcgtgaacacccccggcagctacatctgcgactgcccccccgacttcgagctgaaccccaccagagtgggctgcgtggacaccagaagcggcaactgctacctggacatcagacccagaggcgacaacggcgacaccgcctgcagcaacgagatcggcgtgggcgtgagcaaggccagctgctgctgcagcctgggcaaggcctggggcaccccctgcgagatgtgccccgccgtgaacaccagcgagtacaagatcctgtgccccggcggcgagggcttcagacccaaccccatcaccgtgatcctggaggacatcgacgagtgccaggagctgcccggcctgtgccagggcggcaagtgcatcaacaccttcggcagcttccagtgcagatgccccaccggctactacctgaacgaggacaccagagtgtgcgacgacgtgaacgagtgcgagacccccggcatctgcggccccggcacctgctacaacaccgtgggcaactacacctgcatctgcccccccgactacatgcaggtgaacggcggcaacaactgcatggacatgagaagaagcctgtgctacagaaactactacgccgacaaccagacctgcgacggcgagctgctgttcaacatgaccaagaagatgtgctgctgcagctacaacatcggcagagcctggaacaagccctgcgagcagtgccccatccccagcaccgacgagttcgccaccctgtgcggcagccagagacccggcttcgtgatcgacatctacaccggcctgcccgtggacatcgacgagtgcagagagatccccggcgtgtgcgagaacggcgtgtgcatcaacatggtgggcagcttcagatgcgagtgccccgtgggcttcttctacaacgacaagctgctggtgtgcgaggacatcgacgagtgccagaacggccccgtgtgccagagaaacgccgagtgcatcaacaccgccggcagctacagatgcgactgcaagcccggctacagattcaccagcaccggccagtgcaacgacagaaacgagtgccaggagatccccaacatctgcagccacggccagtgcatcgacaccgtgggcagcttctactgcctgtgccacaccggcttcaagaccaacgacgaccagaccatgtgcctggacatcaacgagtgcgagagagacgcctgcggcaacggcacctgcagaaacaccatcggcagcttcaactgcagatgcaaccacggcttcatcctgagccacaacaacgactgcatcgacgtggacgagtgcgccagcggcaacggcaacctgtgcagaaacggccagtgcatcaacaccgtgggcagcttccagtgccagtgcaacgagggctacgaggtggcccccgacggcagaacctgcgtggacatcaacgagtgcctgctggagcccagaaagtgcgcccccggcacctgccagaacctggacggcagctacagatgcatctgcccccccggctacagcctgcagaacgagaagtgcgaggacatcgacgagtgcgtggaggagcccgagatctgcgccctgggcacctgcagcaacaccgagggcagcttcaagtgcctgtgccccgagggcttcagcctgagcagcagcggcagaagatgccaggacctgagaatgagctactgctacgccaagttcgagggcggcaagtgcagcagccccaagagcagaaaccacagcaagcaggagtgctgctgcgccctgaagggcgagggctggggcgacccctgcgagctgtgccccaccgagcccgacgaggccttcagacagatctgcccctacggcagcggcatcatcgtgggccccgacgacagcgccgtggacatggacgagtgcaaggagcccgacgtgtgcaagcacggccagtgcatcaacaccgacggcagctacagatgcgagtgccccttcggctacatcctggccggcaacgagtgcgtggacaccgacgagtgcagcgtgggcaacccctgcggcaacggcacctgcaagaacgtgatcggcggcttcgagtgcacctgcgaggagggcttcgagcccggccccatgatgacctgcgaggacatcaacgagtgcgcccagaaccccctgctgtgcgccttcagatgcgtgaacacctacggcagctacgagtgcaagtgccccgtgggctacgtgctgagagaggacagaagaatgtgcaaggacgaggacgagtgcgaggagggcaagcacgactgcacctag

SEQ ID NO: 2880 - protein, 423 aa, Artificial Sequence
  derived and/or modified sequence
MRSLGANMAAALRAAGVLLRDPLASSSWRVCQPWRWKSGAAAAAVTTETAQHAQGAKPQVQPQKRKPKTGILMLNMGGPETLGDVHDFLLRLFLDRDLMTLPIQNKLAPFIAKRRTPKIQEQYRRIGGGSPIKIWTSKQGEGMVKLLDELSPNTAPHKYYIGFRYVHPLTEEAIEEMERDGLERAIAFTQYPQYSCSTTGSSLNAIYRYYNQVGRKPTMKWSTIDRWPTHHLLIQCFADHILKELDHFPLEKRSEVVILFSAHSLPMSVVNRGDPYPQEVSATVQKVMERLEYCNPYRLVWQSKVGPMPWLGPQTDESIKGLCERGRKNILLVPIAFTSDHIETLYELDIEYSQVLAKECGVENIRRAESLNGNPLFSKALADLVHSHIQSNELCSKQLTLSCPLCVNPVCRETKSFFTSQQL

SEQ ID NO: 2881 - DNA, 3853 bp, Artificial Sequence
  derived and/or modified sequence
cggcagcgaatgagcgggcgcgccgggagggcgcgaggtcagggggctggggacgcgcgtggggatcgctacccggctcggccactgctgggcggacacctgggcgcgccgccgcgggaggagcccggactcgggccgaggctgcccaggcaatgcgttcactcggcgcaaacatggctgcggccctgcgcgccgcgggcgtcctgctccgcgatccgctggcatccagcagctggagggtctgtcagccatggaggtggaagtcaggtgcagctgcagcggccgtcaccacagaaacagcccagcatgcccagggtgcaaaacctcaagttcaaccgcagaagaggaagccgaaaactggaatattaatgctaaacatgggaggccctgaaactcttggagatgttcacgacttccttctgagactcttcttggaccgagacctcatgacacttcctattcagaataagctggcaccattcatcgccaaacgccgaacccccaagattcaagagcagtaccgcaggattggaggcggatcccccatcaagatatggacttccaagcagggagagggcatggtgaagctgctggatgaattgtcccccaacacagcccctcacaaatactatattggatttcggtacgtccatcctttaacagaagaagcaattgaagagatggagagagatggcctagaaagggctattgctttcacacagtatccacagtacagctgctccaccacaggcagcagcttaaatgccatttacagatactataatcaagtgggacggaagcccacgatgaagtggagcactattgacaggtggcccacacatcacctcctcatccagtgctttgcagatcatattctaaaggaactggaccattttccacttgagaagagaagcgaggtggtcattctgttttctgctcactcactgcccatgtctgtggtcaacagaggcgacccatatcctcaggaggtaagcgccactgtccaaaaagtcatggaaaggctggagtactgcaacccctaccgactggtgtggcaatccaaggttggtccaatgccctggttgggtcctcaaacagacgaatctatcaaagggctttgtgagagggggaggaagaatatcctcttggttccgatagcatttaccagtgaccatattgaaacgctgtatgagctggacatcgagtactctcaagttttagccaaggagtgtggagttgaaaacatcagaagagctgagtctcttaatggaaatccattgttctctaaggccctggccgacttggtgcattcacacatccagtcaaacgagctgtgttccaagcagctgaccctgagctgtccgctctgtgtcaatcctgtctgcagggagactaaatccttcttcaccagccagcagctgtgacccccgccggtggaccccgtggcgttaggcaaatgcccaacctccagatacctccgatgtggagagggtgttatttagagatcaaggaaggaagtcatccttccttgatatatatacagcctttgggtacaaattgtgtggtttcttgaggattggactcttgatggatttctatttttatataactatacagtaagcatttgtattttctctctctaggtataagttactagtttggaatgtccatcaggacctttaataaatgagttaaaaatttgtcttatgagacacacctatttaagtacagattttggctttattgcccaaaaccctcctgaaagggtacggagagtcccctctgtgggctggcagtgtgaatgagatctgtttagtctcgtgcatatagttgctgttttttaaatgaacacagttgagtatttgaagtgaatttgaaaaagaaatgttacttaatctttccctaagcccatgggttacagaatgctagggaggcaatttggttacctgcaatggctgcttttgccagcgaggccaccattcattggtcatcttggtatttgtgtgtgaatctcactttcctcaatgtaaaaaggaatcaagtatggatttcagaggtgctcttagattccccatacacccaagggtaataaacgtgtacaagtacagtgttcatgatacgtgccttggtgggagtccgtggtgccacagggaaggggctcccactgcttctggtctccagggacagtgctgctggaaaggctagtgatgagcttcaccctggagctcctcccgggaccttgcaagcctctccatccagcatcttctctatcttagttgaatgccttctttctgaacatttgttttaagaattattttataaagtcaacaatactttgcttgaattctttcttaatttacgattttttattataaaaatgtatagtgatacaatgggacatgtgaagaatacagaaaagtaaccactttaatgcaataactgttatcataatattgtatttcgtggtagtcctttcctgtagatatttttaatgccatttaatgccattgtcaccttggatttatgagtgaaaagtgtttctaaaaatatagaaataatgtcagatcagagtctgatcttctatgtttgtatttaaatggattaaaagatccccggtggttccatgaagaatttgtaaagatcactttctctttcctccaagccctgaaactttgttcttcaaaagagcgtttctttttttttttttttttagccagtttataaagtggaagtattaggagattcataaatcttctatattgagaattggctatgttaataaatattacaacatcattaaggttttagctaagtttgattcatgctgtctgttaaatcaaaactgatctaaatcagaattattaaatgtgaggagcttttttaatacaggaaaagaaacatgtcatccacttgagttaatagttttcctacgttgatgacagccctcatgagtagcatccacatttttaaaatttcaaattggtttttctactagtagattgtgtttctagagaaagatacaaggcataggtgattgtttaggattttcctctagcctttgccattacctttttggggatgaggttcacagtagactttgagtgaccgtcccaccgtgaagtgaattctctgagctggtggtgtggtgctggaaggaaggttatttttggagccactctctccccttaaggatatttcccaagggcctgcttcaattctttgatgactttagaggtgaaaaaatatttttatggagatgatgcagaaaactccaattcaggagcccttgcgagtatatctgaagcacttatttgctaaggaaacctgaattgatagcagtactgtgctgtctggaataatgtccttgatactgagttgggaccagactggcttttatagtgacaggcaaagaggaatttattgagatcactgctcatggcatttgttgctgtaagaagtgttgcctttgattgttactaaccacggatgggtaacggtcatacattaggctagtgtttggtaggacaaaatctttttagagctttgagaattgtcatcctgttggtcaactttgaaatacaaatgtttgccctggtaattagcaatgaactgctggcagtttcttcagctgtgtatatacggatctggcttttaattgatgaatcaacttctacagaaacttttgcagggacagtgttgatgaggcagtttagcttgccagggtgatgataaagcccaggtccctgcatgtatagtgctcttctaaagaatatgcattcttgaactacttaactttttaaaaatcacaataaatttttgcactcaaaatttgcttcgtatcaggagaaatgaa

SEQ ID NO: 2882 - DNA, 1272 bp, Artificial Sequence
  derived and/or modified sequence
atgcggtcactgggtgccaatatggccgccgcactcagagccgccggcgtgctgctccgggaccctctagcttcttctagctggcgagtctgtcaaccctggaggtggaagtccggtgccgctgcagcagccgtgacaactgaaaccgctcagcacgcccagggagcaaagccgcaggtccagcctcaaaagagaaagccgaagaccgggattctcatgctaaatatgggcggacctgagaccttgggagacgtgcacgactttctacttcggctgtttctggatcgggacctgatgacccttcccattcagaacaagctcgccccgttcatcgcaaagaggcggactccgaagatccaagaacagtaccggagaattggcggggggtccccaattaagatttggacctccaaacagggagaaggaatggtgaaactgctggatgagctctctcctaacacagcaccccataagtattatattggtttcaggtacgttcatcccctgaccgaagaggccattgaggaaatggaaagggatggcctggagagagcaatcgcgttcacccagtaccctcagtatagttgcagtactaccgggagtagcctgaatgcgatctaccgttattacaatcaggtcgggaggaaaccgacaatgaagtggtccacaatcgaccgctggccaacgcaccatttgctcatccagtgtttcgctgaccatattctgaaagagctggaccactttcctctggagaaacgctccgaggttgtcatcctgttttctgcgcacagcctaccaatgtccgtggttaacaggggggatccgtacccccaggaggtcagtgccacagttcagaaggtgatggaacgcctggaatactgcaatccgtacaggctggtctggcagtccaaggtgggacccatgccctggctgggcccacagacagacgaaagtataaaggggctatgcgaacgcggccggaaaaacatcctgctcgtgcctatagccttcacgtctgaccatattgagacactatatgagctcgatatcgagtactcacaggtcttagcgaaggagtgcggggtcgagaatatccgtcgtgcagaatctttgaacggcaaccccctgttttcaaaagctcttgctgacctggttcattcacacattcagtcaaacgaactgtgtagcaagcagctgaccctgtcatgtcccttgtgtgtcaatcccgtttgtcgggagacaaagtccttcttcaccagtcagcagttgtag

SEQ ID NO: 2883 - DNA, 1272 bp, Artificial Sequence
  derived and/or modified sequence
atgaggagcctgggcgccaacatggccgccgccctgcgggctgctggggtgctgctgcgggaccccctggccagcagctcctggagggtgtgccagccctggcgctggaagagcggggctgctgctgctgctgtgaccacagaaacagcccagcacgcccagggcgccaagccccaggtgcagccccagaagaggaagcccaagacaggcatcctgatgctgaacatgggcggccctgagaccctgggagatgtgcatgacttcctgctgcggctcttcctggaccgggacctgatgaccctgcccatccagaacaagctggcccccttcatcgccaagaggaggacccccaagatccaggagcagtaccgccgcatcggcggcggcagccccatcaagatctggaccagcaagcagggcgagggcatggtgaagctgctggatgagctgagccccaacacagccccccacaagtactacatcggcttccgctacgtgcaccccctgacagaggaggccatcgaggagatggagagagatggcctggagcgggccatcgccttcacccagtacccccagtacagctgcagcaccaccggcagcagcctgaatgccatctaccgctactacaaccaggtgggcaggaagcccaccatgaagtggagcaccatcgaccgctggcccacccaccacctgctgatccagtgctttgctgaccacatcctgaaggagctggaccacttccccctggagaagaggtctgaggtggtgatcctcttcagcgcccacagcctgcccatgtctgtggtgaacagaggagacccctacccccaggaggtgtctgccaccgtgcagaaggtgatggagcggctggagtactgcaacccctaccgcctggtgtggcagagcaaggtgggccccatgccctggctgggcccccagacagatgagagcatcaagggcctgtgtgagcggggcaggaagaacatcctgctggtgcccatcgccttcaccagtgaccacatcgagaccctgtatgagctggacatcgagtacagccaggtgctggccaaggaatgtggggtggagaacatccggcgggcagagagcctgaatggaaaccccctcttcagcaaggccctggccgacctggtgcacagccacatccagagcaatgagctgtgcagcaagcagctgaccctgagctgccccctgtgtgtgaaccctgtgtgccgggagaccaagagcttcttcaccagccagcagctgtag

SEQ ID NO: 2884 - DNA, 1272 bp, Artificial Sequence
  derived and/or modified sequence
atgcggagcctgggcgccaacatggccgccgccctgcgggccgccggtgtcctcctcagagatcccctggctagctcgagctggcgggtgtgtcagccctggcggtggaagtcgggcgccgcggccgccgctgttaccacagagacagcgcaacatgcccagggcgcaaaacctcaggtgcagccgcagaaacggaagcctaaaactggaatattgatgctgaacatgggtgggcccgagactctgggagacgttcatgatttcttgcttcgcctgtttttggaccgcgacctcatgactctgcccattcagaacaagcttgccccgttcatagccaagcggcgcacccccaaaatccaggagcagtacaggagaattggcgggggcagccccataaaaatttggacttcaaaacaaggggaaggtatggtaaagctattggatgagctgtcccccaacacagcaccccacaaatactacatcgggttccgttacgtacatcccctgacagaggaagccatcgaggagatggagagagatgggctcgagcgtgcgattgcgtttacacagtatccacaatacagttgctcgactaccggaagctctctgaacgccatttacaggtactacaaccaggtaggacgcaagcccactatgaagtggagtacaattgatcgttggcctacgcaccacctgctgatccaatgcttcgctgaccatattttaaaggaactcgatcatttccctcttgaaaaacggagcgaggtggtcattctgttcagcgcccacagcctcccaatgagcgttgttaatagaggagacccttacccccaggaagtgtccgccacagttcagaaagtcatggagcggttagagtactgtaacccctatcgcctggtgtggcagtctaaagtgggccccatgccctggctaggaccgcagactgacgaaagtataaaagggttgtgcgaacggggtagaaagaatatcctccttgtgccaatcgcatttacaagcgatcacattgaaacattgtacgagctagacatcgagtatagccaagttcttgccaaggagtgcggtgtggaaaacattcgaagagcggagtcactcaatggcaaccccttgttttctaaagcactggctgacctggtccatagtcacattcagagcaacgaactttgtagcaaacagctcactctgagttgtccactttgtgtgaatccagtgtgcagagaaaccaagtctttcttcactagccagcagctctag

SEQ ID NO: 2885 - DNA, 1272 bp, Artificial Sequence
  derived and/or modified sequence
atgagatccctcggtgctaacatggccgctgcattgcgcgctgctggtgttctactgcgagatcctctggctagctctagttggagggtgtgccagccttggcggtggaagagcggtgctgctgccgcagccgtcaccaccgagactgcacagcatgctcaaggcgcaaaacctcaggtgcagccgcagaagcgaaagcctaaaaccgggatactcatgctcaatatgggagggccagaaacactcggagatgttcatgactttcttctgcgtctttttctcgatagggacttaatgaccttacccatccaaaataagctggcaccatttatcgcaaaacggcgaacccccaaaattcaggagcaatatagacggataggcggtggatctccaatcaagatttggacctctaaacagggggagggaatggtgaaactgcttgacgagctttctcctaacacagcaccccacaaatactacattggctttcgctatgtgcaccccttgaccgaagaagccatcgaggaaatggaacgggatggacttgagagagcaatcgccttcacacaataccctcagtacagttgcagcaccacaggtagtagcctgaacgcaatctataggtactataatcaggtcggacgcaagcccacaatgaagtggagcaccattgacaggtggcccacacaccacttgctcattcagtgtttcgccgaccacatccttaaggagctggatcactttcccctggaaaagaggagcgaagtcgtcattctattctccgctcactccttacccatgagtgtcgttaaccgtggagatccctacccccaagaggttagtgccacagtgcagaaggtaatggagcgtttggaatactgcaatccttaccgattggtgtggcaaagtaaggtgggacctatgccatggctgggtcctcaaaccgacgagtctattaagggtctgtgcgagaggggcagaaaaaacattctgttggttccgatagccttcacctccgaccatattgaaacactgtatgaactggacattgaatacagccaagtcttggcaaaggaatgcggcgttgagaacatcagacgggcagaaagcctgaacgggaaccctctcttttcgaaggcacttgcagacttagtgcacagccatattcaaagcaatgagctctgcagcaaacagctcaccctgtcatgtcctctgtgcgtgaaccctgtttgccgagagacaaagtcttttttcacctctcagcagctctag

SEQ ID NO: 2886 - DNA, 1272 bp, Artificial Sequence
  derived and/or modified sequence
atgagaagcctgggcgccaacatggccgccgccctgagagccgccggcgtgctgctgagagaccccctggccagcagcagctggagagtgtgccagccctggagatggaagagcggcgccgccgccgccgccgtgaccaccgagaccgcccagcacgcccagggcgccaagccccaggtgcagccccagaagagaaagcccaagaccggcatcctgatgctgaacatgggcggccccgagaccctgggcgacgtgcacgacttcctgctgagactgttcctggacagagacctgatgaccctgcccatccagaacaagctggcccccttcatcgccaagagaagaacccccaagatccaggagcagtacagaagaatcggcggcggcagccccatcaagatctggaccagcaagcagggcgagggcatggtgaagctgctggacgagctgagccccaacaccgccccccacaagtactacatcggcttcagatacgtgcaccccctgaccgaggaggccatcgaggagatggagagagacggcctggagagagccatcgccttcacccagtacccccagtacagctgcagcaccaccggcagcagcctgaacgccatctacagatactacaaccaggtgggcagaaagcccaccatgaagtggagcaccatcgacagatggcccacccaccacctgctgatccagtgcttcgccgaccacatcctgaaggagctggaccacttccccctggagaagagaagcgaggtggtgatcctgttcagcgcccacagcctgcccatgagcgtggtgaacagaggcgacccctacccccaggaggtgagcgccaccgtgcagaaggtgatggagagactggagtactgcaacccctacagactggtgtggcagagcaaggtgggccccatgccctggctgggcccccagaccgacgagagcatcaagggcctgtgcgagagaggcagaaagaacatcctgctggtgcccatcgccttcaccagcgaccacatcgagaccctgtacgagctggacatcgagtacagccaggtgctggccaaggagtgcggcgtggagaacatcagaagagccgagagcctgaacggcaaccccctgttcagcaaggccctggccgacctggtgcacagccacatccagagcaacgagctgtgcagcaagcagctgaccctgagctgccccctgtgcgtgaaccccgtgtgcagagagaccaagagcttcttcaccagccagcagctgtag

SEQ ID NO: 2887 - protein, 821 aa, Artificial Sequence
  derived and/or modified sequence
MVSWGRFICLVVVTMATLSLARPSFSLVEDTTLEPEEPPTKYQISQPEVYVAAPGESLEVRCLLKDAAVISWTKDGVHLGPNNRTVLIGEYLQIKGATPRDSGLYACTASRTVDSETWYFMVNVTDAISSGDDEDDTDGAEDFVSENSNNKRAPYWTNTEKMEKRLHAVPAANTVKFRCPAGGNPMPTMRWLKNGKEFKQEHRIGGYKVRNQHWSLIMESVVPSDKGNYTCVVENEYGSINHTYHLDVVERSPHRPILQAGLPANASTVVGGDVEFVCKVYSDAQPHIQWIKHVEKNGSKYGPDGLPYLKVLKAAGVNTTDKEIEVLYIRNVTFEDAGEYTCLAGNSIGISFHSAWLTVLPAPGREKEITASPDYLEIAIYCIGVFLIACMVVTVILCRMKNTTKKPDFSSQPAVHKLTKRIPLRRQVTVSAESSSSMNSNTPLVRITTRLSSTADTPMLAGVSEYELPEDPKWEFPRDKLTLGKPLGEGCFGQVVMAEAVGIDKDKPKEAVTVAVKMLKDDATEKDLSDLVSEMEMMKMIGKHKNIINLLGACTQDGPLYVIVEYASKGNLREYLRARRPPGMEYSYDINRVPEEQMTFKDLVSCTYQLARGMEYLASQKCIHRDLAARNVLVTENNVMKIADFGLARDINNIDYYKKTTNGRLPVKWMAPEALFDRVYTHQSDVWSFGVLMWEIFTLGGSPYPGIPVEELFKLLKEGHRMDKPANCTNELYMMMRDCWHAVPSQRPTFKQLVEDLDRILTLTTNEEYLDLSQPLEQYSPSYPDTRSSCSSGDDSVFSPDPMPYEPCLPQYPHINGSVKT

SEQ ID NO: 2888 - DNA, 2466 bp, Artificial Sequence
  derived and/or modified sequence
atggtgtcctgggggaggttcatctgcctggtagtagtgaccatggcaactctgagccttgccagaccatcattctccctagtagaggacactaccttggagcctgaggaaccacctaccaaatatcagatttcgcaacccgaagtctatgttgcagctccaggagaaagcttggaggtccgatgtttgcttaaggacgcagccgtgattagctggaccaaggacggtgtgcatctcggtccaaacaaccgcacagtattaattggcgagtacctgcaaataaagggagccacaccccgagacagcggcctgtacgcatgcactgcgtccagaactgttgacagcgagacctggtacttcatggtgaacgtgacggacgcaatcagttcaggtgatgatgaagacgacactgatggcgccgaagactttgttagcgaaaatagcaacaacaaaagggccccatattggactaatacagagaagatggaaaagagacttcacgctgtgcccgcagccaataccgtcaagtttcgttgcccagcagggggtaaccccatgcctactatgcgctggctcaaaaatggaaaagagttcaagcaggagcataggataggtggctacaaggtgcgcaaccagcactggtctctgataatggagagcgtggtaccctctgataagggcaactacacttgtgtcgtcgaaaatgagtatgggagtatcaatcacacatatcatctagatgtggttgagcgtagtccgcatcgccccatccttcaagccgggctcccagcaaatgcatctacagtggtggggggtgacgtcgagttcgtgtgtaaggtgtattcagacgcccagccacacatccagtggatcaaacatgtggagaagaacggcagtaagtacggaccagatgggctcccgtacctcaaggtgctgaaggccgctggggtcaacacaacagacaaagagatagaagtactgtatattagaaatgtcacatttgaagacgcaggcgagtacacctgcctggccggcaacagcattggaatctcgttccactctgcgtggctcaccgtccttcccgctccaggccgggagaaggaaattaccgcttctcccgactatctcgaaatcgccatatattgtattggtgtgttcctgatcgcctgcatggtggtgacagtcatcctgtgcagaatgaagaataccaccaaaaaaccagatttcagcagccagcccgcagttcacaagcttaccaagcggatacctttgcgccgccaagtgaccgtttcagctgaatccagcagctccatgaactctaatacaccattagtgcgaataactacaagactctcttccactgcagatacacccatgttagcgggcgtctcggaatacgagctgccggaggatcctaagtgggagttcccacgcgataaactgacgttaggtaagccactcggggagggatgcttcggtcaggtggtgatggctgaggctgtcggcatcgacaaagacaagcccaaagaggccgtgacagtggccgtaaagatgctcaaagatgatgccactgagaaggacctgagtgaccttgtctcggagatggagatgatgaagatgattgggaaacacaaaaatatcatcaatcttctgggagcgtgtacacaggacggacccctgtacgtaatagtggagtacgccagcaaaggcaacctgcgggagtaccttcgtgcccggaggcctcccggcatggagtattcgtacgatatcaacagggtgcctgaggagcaaatgacttttaaagacctcgtctcctgtacttaccagctggccaggggtatggagtacctcgcctcccaaaaatgtatacacagggacctggcggcgagaaatgtgctggtcacagagaataacgttatgaaaattgcggactttggactggctcgggatattaataacattgattattacaaaaagacaacaaacggaaggcttcccgtaaagtggatggctcctgaggcactgttcgaccgggtgtacacccaccagtccgatgtgtggtcgtttggggttctgatgtgggagatcttcaccctgggcggttccccctatcccggaattcctgtggaggagctgttcaaactactaaaagaaggacacagaatggacaagccagccaattgcaccaatgagctgtatatgatgatgcgcgactgttggcacgctgttccatcccagagaccgacgtttaaacaattggtggaagacctggaccggatcctgactctcacaaccaatgaagagtacctggatctgtctcagccgcttgagcagtattctccaagctaccctgatacccggagtagctgttcttcaggtgatgactccgtcttttctccagaccccatgccctacgagccatgtctgcctcaatacccccatatcaatggctcagtcaagacttag

SEQ ID NO: 2889 - DNA, 2466 bp, Artificial Sequence
  derived and/or modified sequence
atggtgtcctggggccgcttcatctgcctggtggtggtgaccatggccaccctgagcctggcccggcccagcttcagcctggtggaggacaccaccctggagcctgaggagccccccaccaagtaccagatcagccagcctgaggtgtatgtggccgcccctggagagagcctggaggtgcgctgcctgctgaaggatgctgctgtgatctcctggaccaaggatggagtgcacctgggccccaacaacagaacagtgctgattggagagtacctgcagatcaagggggccaccccccgggacagcggcctgtatgcctgcacagccagcaggacagtggacagcgagacctggtacttcatggtgaatgtgacagatgccatcagcagtggagatgatgaagatgacacagatggagcagaagattttgtgtctgagaacagcaacaacaagagggccccctactggaccaacacagagaagatggagaagaggctgcatgctgtgcctgctgccaacacagtgaagttccgctgcccagctgggggcaaccccatgcccaccatgcgctggctgaagaatggcaaggagttcaagcaggagcaccgcatcggcggctacaaggtgaggaaccagcactggagcctcatcatggagagcgtggtgcccagcgacaagggcaactacacctgtgtggtggagaatgaatatggcagcatcaaccacacctaccacctggatgtggtggagaggagcccccaccggcccatcctgcaggccggcctgcctgccaatgccagcacagtggtgggcggagatgtggagtttgtgtgcaaggtgtacagtgatgcccagccccacatccagtggatcaagcacgtggagaagaatggcagcaaatatggcccagatggcctgccctacctgaaggtgctgaaggctgctggggtgaacaccacagacaaggagattgaggtgctgtacatcagaaatgtgacctttgaagatgctggggagtacacctgcctggccggcaacagcatcggcatctccttccacagcgcctggctgactgtgctgcctgcccctggccgggagaaggagatcacagccagcccagactacctggagatcgccatctactgcattggagtcttcctgattgcctgcatggtggtgaccgtcatcctgtgcaggatgaagaacaccaccaagaagccagacttcagcagccagcctgctgtgcacaagctgaccaagaggatccccctgcggcggcaggtgacagtgtctgctgagagcagcagctccatgaacagcaacacccccctggtgcgcatcaccacccggctgagcagcacagctgacacccccatgctggccggcgtgtctgaatatgagctgcctgaggaccccaagtgggagttcccccgggacaagctgaccctgggcaagcccctgggggagggctgcttcggccaggtggtgatggccgaggccgtgggcatcgacaaggacaagcccaaggaggccgtgacagtggccgtgaagatgctgaaggatgatgccacagagaaggacctgagtgacctggtgtctgagatggagatgatgaagatgattggcaagcacaagaacatcatcaacctgctgggcgcctgcacccaggacggccccctgtatgtgattgtggagtatgccagcaaaggaaacctgcgggagtacctgcgggcccggcggcccccaggcatggagtacagctatgacatcaacagagtgcctgaggagcagatgaccttcaaggacctggtgtcctgcacctaccagctggcccggggcatggagtacctggccagccagaagtgcatccaccgggacctggccgccagaaatgtgctggtgacagagaacaacgtgatgaagattgctgactttggcctggcccgggacatcaacaacatcgactactacaagaagaccaccaacggccgcctgcctgtgaagtggatggcccctgaggccctgtttgacagagtgtacacccaccagagtgatgtgtggagctttggagtgctgatgtgggagatcttcaccctgggcggcagcccctacccaggcatccctgtggaggagctgttcaagctgctgaaggagggccacaggatggacaagccagccaactgcaccaatgagctgtacatgatgatgagggactgctggcatgctgtgcccagccagaggcccaccttcaagcagctggtggaggacctggaccgcatcctgaccctgaccaccaatgaggagtacctggacctgagccagcccctggagcagtacagccccagctacccagacaccaggagcagctgcagcagtggagatgacagcgtcttctccccagaccccatgccctatgagccctgcctgccccagtacccccacatcaatggatctgtgaagacctag

SEQ ID NO: 2890 - DNA, 2466 bp, Artificial Sequence
  derived and/or modified sequence
atggtgagctggggccggttcatctgcctggtggtggtgaccatggccacactgtctcttgcgaggcctagttttagcctggtcgaggatacgaccctagaaccggaagaacctcctaccaaataccaaatcagccagccagaggtgtatgtggctgccccaggagagtcattggaggtgcgatgcttgttgaaagacgccgccgtgattagctggaccaaggatggagttcatttgggcccgaataataggaccgtgctaatcggcgagtatctacagatcaagggggctaccccccgcgattccgggctgtacgcctgcacagcgtctaggactgtcgactcagaaacgtggtatttcatggttaacgttacagacgcaatctcctctggcgacgacgaggatgataccgatggcgctgaagactttgtgtccgaaaactccaataataaaagggctccatattggacaaatactgaaaaaatggagaaacggctccatgccgtgccagctgccaacaccgtaaagtttcggtgccccgccggagggaatccaatgcctacaatgcgttggctgaaaaatgggaaggaattcaaacaagagcataggatcggaggatataaggtccggaatcagcattggagcctgatcatggaatcagttgttcctagtgataagggcaattacacatgtgtcgtggagaatgaatacggatccatcaaccacacgtaccacctagacgtggtcgaacgaagtcctcataggcccatccttcaggcgggcctcccggcaaatgccagtaccgtggtagggggtgatgtggagttcgtttgtaaggtatattcagacgcacagccccacatccagtggatcaagcacgtagaaaagaacgggagcaagtacggcccagacggtttaccttacctgaaggtcctaaaggctgcaggggtgaacaccaccgataaagagatcgaggtgctgtacatccgcaacgttaccttcgaggatgcaggcgagtatacttgcttagcaggcaactcgatcggcatcagctttcattctgcctggctgacagtgcttcctgctcccggaagggagaaggagattaccgcctcgccagactatcttgaaatcgctatatattgtataggggtcttcctgatcgcctgcatggtcgttacagttatcctgtgtcgcatgaagaacaccacgaaaaagcccgattttagctcgcaaccggcagtacacaagctcaccaaaagaatccccttgaggaggcaagttacagtgagcgctgaaagtagctcctctatgaattcaaacacaccccttgtgcggatcactactaggctttcctccacagctgatactcctatgctggccggagtctccgagtatgagctgcccgaagaccctaaatgggagttccctcgggacaaactgactcttggcaagccactgggagaggggtgttttggccaggtggtgatggcagaagctgtgggtattgataaggataaacccaaggaggccgtgacagtagcagtcaagatgctcaaagatgatgctaccgaaaaagacctgagcgatctagtctcagagatggagatgatgaagatgattggcaaacacaagaatattataaacctcctgggggcgtgcacacaagacggccccctctacgtcattgtcgagtatgcctcaaagggaaacctgcgagagtacctcagggctcgacggcctcctggcatggagtactcttatgacataaaccgcgttcccgaggaacagatgactttcaaagacctggtgtcctgtacctaccagctggcccgaggtatggagtacctcgcgtcacagaagtgtatacacagagacttagccgccagaaatgttttagtgacggagaataacgtaatgaaaatagctgattttggtctcgcccgagatatcaataacatcgactactacaagaagactaccaacggtcgcctgcccgtgaaatggatggcgccagaagcgctcttcgaccgagtatacacccatcagtccgatgtctggagcttcggcgtcctaatgtgggaaatcttcaccttgggaggcagtccttacccaggcatacccgtcgaagagctgttcaagctgctgaaagaagggcaccgtatggacaagccagccaattgtacaaatgagctttacatgatgatgcgcgactgctggcacgcggtaccgtctcagaggccaacattcaagcagctcgtcgaggatcttgatagaattctcactttgactaccaatgaggagtatcttgatctgtcacagcctctggagcaatattccccttcataccccgacactcgcagcagctgctcaagtggtgacgacagtgtcttctctcctgacccaatgccatacgagccttgcctgccccaatacccccatattaatggttctgtcaagacttag

SEQ ID NO: 2891 - DNA, 2466 bp, Artificial Sequence
  derived and/or modified sequence
atggtttcgtggggtaggttcatctgtctggtggtggttaccatggccacactcagcctggccaggccttccttctccttggtagaagataccactcttgagcctgaagagccacccaccaagtatcagatttcacagccggaagtttatgtggcagcgccaggggaaagccttgaggtacgttgcttgcttaaagacgccgctgttatctcctggacgaaggacggcgtacacctcggacccaacaataggacggtactgatcggggagtatctgcaaattaagggagcgactccaagggacagcgggctctatgcgtgtacagctagcagaactgtggactccgaaacttggtacttcatggtgaacgtgactgacgcgattagttctggagatgacgaggacgataccgatggtgcagaagacttcgtgtcagagaattctaataataagagagccccatactggaccaacacagaaaaaatggagaagagattgcatgccgtcccagcagcaaacaccgttaagtttagatgcccagcaggcggaaacccaatgcccacgatgaggtggctaaaaaatggcaaggagtttaaacaggaacataggataggcggatacaaggtgcgcaatcagcattggagccttatcatggagtctgttgtaccatctgacaaaggcaactacacttgcgtggttgagaatgaatatggatcaatcaaccacacctatcatctggacgtcgtggaaaggtcccctcatcgacctattctgcaggccggtctccccgctaatgctagtactgtggtaggtggcgacgttgaatttgtgtgtaaagtctactcagatgctcagcctcatatccagtggattaaacacgttgaaaagaacggatcaaagtacgggccagacgggctcccgtatctcaaggtgttgaaggccgcaggagtgaacacaacagacaaagaaattgaggtactttacattagaaacgtcacatttgaggatgctggggaatacacatgtcttgccggaaatagcatcggtatcagctttcactctgcatggctcaccgtgctgccggcaccagggagggagaaggaaatcactgccagccccgactacctggagatcgccatatactgtatcggggtatttctgatagcctgcatggtggtgactgtgatcttatgtagaatgaagaacacaacgaagaagccagatttttctagccagcctgcagtccataaattaacgaagcgtattcctcttcgcagacaagtcaccgtgagcgcagagagttcatcttcgatgaactctaatacgcctctggtccgcataacaacccggcttagcagcacagcggacacgcccatgctagccggagtgagcgagtacgagttgccggaagatcccaaatgggagtttcccagggacaagttgaccctggggaagcctctaggagagggatgttttggccaggtggtaatggctgaggcagttggcattgacaaagacaagcccaaagaggccgtcaccgtggctgtaaagatgcttaaagatgacgctacagagaaagatttgtcagacctggtgagcgagatggagatgatgaagatgatcggcaagcataaaaatatcattaacctactaggggcttgcacccaggatgggccactgtacgtgatcgtggaatacgcgtctaagggaaacctgcgggagtacctccgtgcacgcaggccaccgggtatggagtattcttatgatataaaccgggtgcccgaagaacagatgacttttaaggacctcgtttcttgtacatatcagctggccagaggaatggaatacctggcaagtcagaagtgtatccatagggacctcgccgctcggaacgtcttggtgacagagaacaatgtgatgaaaatagccgatttcgggctcgcacgagatatcaacaatatcgactactacaaaaagacaactaacgggaggctgcctgtgaagtggatggccccagaagcactttttgatagggtgtatacacatcagagcgatgtctggtcattcggcgtactcatgtgggaaatttttactctgggaggcagcccataccctgggattccagtcgaggagcttttcaaacttctgaaggagggccatcggatggacaagccggctaactgcaccaatgaattatacatgatgatgagggattgctggcacgcagttccatcacaaagacccacttttaagcaactcgttgaggatctggataggatcctcaccctcactactaacgaagagtacttggacttatcccagcccctggaacaatatagcccttcctaccccgatactcggagttcctgtagcagtggggatgattcagttttttccccagatcccatgccctatgagccatgcttaccacaatacccccacatcaatggcagcgtgaaaacctag

SEQ ID NO: 2892 - DNA, 2466 bp, Artificial Sequence
  derived and/or modified sequence
atggtgagctggggcagattcatctgcctggtggtggtgaccatggccaccctgagcctggccagacccagcttcagcctggtggaggacaccaccctggagcccgaggagccccccaccaagtaccagatcagccagcccgaggtgtacgtggccgcccccggcgagagcctggaggtgagatgcctgctgaaggacgccgccgtgatcagctggaccaaggacggcgtgcacctgggccccaacaacagaaccgtgctgatcggcgagtacctgcagatcaagggcgccacccccagagacagcggcctgtacgcctgcaccgccagcagaaccgtggacagcgagacctggtacttcatggtgaacgtgaccgacgccatcagcagcggcgacgacgaggacgacaccgacggcgccgaggacttcgtgagcgagaacagcaacaacaagagagccccctactggaccaacaccgagaagatggagaagagactgcacgccgtgcccgccgccaacaccgtgaagttcagatgccccgccggcggcaaccccatgcccaccatgagatggctgaagaacggcaaggagttcaagcaggagcacagaatcggcggctacaaggtgagaaaccagcactggagcctgatcatggagagcgtggtgcccagcgacaagggcaactacacctgcgtggtggagaacgagtacggcagcatcaaccacacctaccacctggacgtggtggagagaagcccccacagacccatcctgcaggccggcctgcccgccaacgccagcaccgtggtgggcggcgacgtggagttcgtgtgcaaggtgtacagcgacgcccagccccacatccagtggatcaagcacgtggagaagaacggcagcaagtacggccccgacggcctgccctacctgaaggtgctgaaggccgccggcgtgaacaccaccgacaaggagatcgaggtgctgtacatcagaaacgtgaccttcgaggacgccggcgagtacacctgcctggccggcaacagcatcggcatcagcttccacagcgcctggctgaccgtgctgcccgcccccggcagagagaaggagatcaccgccagccccgactacctggagatcgccatctactgcatcggcgtgttcctgatcgcctgcatggtggtgaccgtgatcctgtgcagaatgaagaacaccaccaagaagcccgacttcagcagccagcccgccgtgcacaagctgaccaagagaatccccctgagaagacaggtgaccgtgagcgccgagagcagcagcagcatgaacagcaacacccccctggtgagaatcaccaccagactgagcagcaccgccgacacccccatgctggccggcgtgagcgagtacgagctgcccgaggaccccaagtgggagttccccagagacaagctgaccctgggcaagcccctgggcgagggctgcttcggccaggtggtgatggccgaggccgtgggcatcgacaaggacaagcccaaggaggccgtgaccgtggccgtgaagatgctgaaggacgacgccaccgagaaggacctgagcgacctggtgagcgagatggagatgatgaagatgatcggcaagcacaagaacatcatcaacctgctgggcgcctgcacccaggacggccccctgtacgtgatcgtggagtacgccagcaagggcaacctgagagagtacctgagagccagaagaccccccggcatggagtacagctacgacatcaacagagtgcccgaggagcagatgaccttcaaggacctggtgagctgcacctaccagctggccagaggcatggagtacctggccagccagaagtgcatccacagagacctggccgccagaaacgtgctggtgaccgagaacaacgtgatgaagatcgccgacttcggcctggccagagacatcaacaacatcgactactacaagaagaccaccaacggcagactgcccgtgaagtggatggcccccgaggccctgttcgacagagtgtacacccaccagagcgacgtgtggagcttcggcgtgctgatgtgggagatcttcaccctgggcggcagcccctaccccggcatccccgtggaggagctgttcaagctgctgaaggagggccacagaatggacaagcccgccaactgcaccaacgagctgtacatgatgatgagagactgctggcacgccgtgcccagccagagacccaccttcaagcagctggtggaggacctggacagaatcctgaccctgaccaccaacgaggagtacctggacctgagccagcccctggagcagtacagccccagctaccccgacaccagaagcagctgcagcagcggcgacgacagcgtgttcagccccgaccccatgccctacgagccctgcctgccccagtacccccacatcaacggcagcgtgaagacctag

SEQ ID NO: 2893 - protein, 806 aa, Artificial Sequence
  derived and/or modified sequence
MGAPACALALCVAVAIVAGASSESLGTEQRVVGRAAEVPGPEPGQQEQLVFGSGDAVELSCPPPGGGPMGPTVWVKDGTGLVPSERVLVGPQRLQVLNASHEDSGAYSCRQRLTQRVLCHFSVRVTDAPSSGDDEDGEDEAEDTGVDTGAPYWTRPERMDKKLLAVPAANTVRFRCPAAGNPTPSISWLKNGREFRGEHRIGGIKLRHQQWSLVMESVVPSDRGNYTCVVENKFGSIRQTYTLDVLERSPHRPILQAGLPANQTAVLGSDVEFHCKVYSDAQPHIQWLKHVEVNGSKVGPDGTPYVTVLKTAGANTTDKELEVLSLHNVTFEDAGEYTCLAGNSIGFSHHSAWLVVLPAEEELVEADEAGSVYAGILSYGVGFFLFILVVAAVTLCRLRSPPKKGLGSPTVHKISRFPLKRQVSLESNASMSSNTPLVRIARLSSGEGPTLANVSELELPADPKWELSRARLTLGKPLGEGCFGQVVMAEAIGIDKDRAAKPVTVAVKMLKDDATDKDLSDLVSEMEMMKMIGKHKNIINLLGACTQGGPLYVLVEYAAKGNLREFLRARRPPGLDYSFDTCKPPEEQLTFKDLVSCAYQVARGMEYLASQKCIHRDLAARNVLVTEDNVMKIADFGLARDVHNLDYYKKTTNGRLPVKWMAPEALFDRVYTHQSDVWSFGVLLWEIFTLGGSPYPGIPVEELFKLLKEGHRMDKPANCTHDLYMIMRECWHAAPSQRPTFKQLVEDLDRVLTVTSTDEYLDLSAPFEQYSPGGQDTPSSSSSGDDSVFAHDLLPPAPPSSGGSRT

SEQ ID NO: 2894 - DNA, 2421 bp, Artificial Sequence
  derived and/or modified sequence
atgggcgcccccgcctgcgccctggccctgtgcgtggccgtggccatcgtggccggcgccagcagcgagagcctgggcaccgagcagagagtggtgggcagagccgccgaggtgcccggccccgagcccggccagcaggagcagctggtgttcggcagcggcgacgccgtggagctgagctgccccccccccggcggcggccccatgggccccaccgtgtgggtgaaggacggcaccggcctggtgcccagcgagagagtgctggtgggcccccagagactgcaggtgctgaacgccagccacgaggacagcggcgcctacagctgcagacagagactgacccagagagtgctgtgccacttcagcgtgagagtgaccgacgcccccagcagcggcgacgacgaggacggcgaggacgaggccgaggacaccggcgtggacaccggcgccccctactggaccagacccgagagaatggacaagaagctgctggccgtgcccgccgccaacaccgtgagattcagatgccccgccgccggcaaccccacccccagcatcagctggctgaagaacggcagagagttcagaggcgagcacagaatcggcggcatcaagctgagacaccagcagtggagcctggtgatggagagcgtggtgcccagcgacagaggcaactacacctgcgtggtggagaacaagttcggcagcatcagacagacctacaccctggacgtgctggagagaagcccccacagacccatcctgcaggccggcctgcccgccaaccagaccgccgtgctgggcagcgacgtggagttccactgcaaggtgtacagcgacgcccagccccacatccagtggctgaagcacgtggaggtgaacggcagcaaggtgggccccgacggcaccccctacgtgaccgtgctgaagaccgccggcgccaacaccaccgacaaggagctggaggtgctgagcctgcacaacgtgaccttcgaggacgccggcgagtacacctgcctggccggcaacagcatcggcttcagccaccacagcgcctggctggtggtgctgcccgccgaggaggagctggtggaggccgacgaggccggcagcgtgtacgccggcatcctgagctacggcgtgggcttcttcctgttcatcctggtggtggccgccgtgaccctgtgcagactgagaagcccccccaagaagggcctgggcagccccaccgtgcacaagatcagcagattccccctgaagagacaggtgagcctggagagcaacgccagcatgagcagcaacacccccctggtgagaatcgccagactgagcagcggcgagggccccaccctggccaacgtgagcgagctggagctgcccgccgaccccaagtgggagctgagcagagccagactgaccctgggcaagcccctgggcgagggctgcttcggccaggtggtgatggccgaggccatcggcatcgacaaggacagagccgccaagcccgtgaccgtggccgtgaagatgctgaaggacgacgccaccgacaaggacctgagcgacctggtgagcgagatggagatgatgaagatgatcggcaagcacaagaacatcatcaacctgctgggcgcctgcacccagggcggccccctgtacgtgctggtggagtacgccgccaagggcaacctgagagagttcctgagagccagaagaccccccggcctggactacagcttcgacacctgcaagccccccgaggagcagctgaccttcaaggacctggtgagctgcgcctaccaggtggccagaggcatggagtacctggccagccagaagtgcatccacagagacctggccgccagaaacgtgctggtgaccgaggacaacgtgatgaagatcgccgacttcggcctggccagagacgtgcacaacctggactactacaagaagaccaccaacggcagactgcccgtgaagtggatggcccccgaggccctgttcgacagagtgtacacccaccagagcgacgtgtggagcttcggcgtgctgctgtgggagatcttcaccctgggcggcagcccctaccccggcatccccgtggaggagctgttcaagctgctgaaggagggccacagaatggacaagcccgccaactgcacccacgacctgtacatgatcatgagagagtgctggcacgccgcccccagccagagacccaccttcaagcagctggtggaggacctggacagagtgctgaccgtgaccagcaccgacgagtacctggacctgagcgcccccttcgagcagtacagccccggcggccaggacacccccagcagcagcagcagcggcgacgacagcgtgttcgcccacgacctgctgccccccgccccccccagcagcggcggcagcagaacctag

SEQ ID NO: 2895 - DNA, 2421 bp, Artificial Sequence
  derived and/or modified sequence
atgggcgcacctgcctgtgccctggcactgtgtgtggcagtggctatcgtggcaggcgcgtcttctgagtcactgggcaccgaacaacgggtcgttggtagggccgcggaggtcccaggccccgagccaggacagcaggagcagttggtttttggttcaggcgatgcggtggaactgagctgtccaccacctggaggtggccctatgggtccaaccgtatgggtcaaggatggcacgggcctggtgcccagcgaaagggtcctggtaggaccacagcgtctgcaggtacttaatgcttctcacgaagacagtggggcttactcttgccgccaacggctgactcagcgtgttctgtgccacttttccgtccgagtaactgacgctcctagctcaggagatgatgaggacggcgaggacgaagctgaagacactggcgtcgataccggcgccccttattggacacggcctgaacgcatggataagaaattactggcggtgcctgccgcaaataccgtcagattcagatgtccagccgccggtaaccctactcccagcatttcctggctcaagaacgggcgagaatttcggggcgaacacaggattggtggcataaaactccgccaccagcaatggtcattggtgatggagtctgttgtgccctcagaccggggcaactacacctgcgtggtcgagaacaaattcggatccattcgccagacatacacgctagacgtcctggaaagatcccctcacaggccaatcctgcaggcaggactgcccgccaaccaaacagcagtgcttggatccgatgtcgaatttcattgtaaggtgtacagcgacgcacagccacacatacagtggctgaagcacgtcgaggtgaacgggagtaaggtcggccccgatggtactccgtacgtcaccgtgcttaagacagccggcgcaaataccacagataaagaactggaagtgttgtccctgcataacgtgacttttgaggacgcaggagagtacacttgcctggctggcaacagcataggcttcagtcatcattcagcttggttagtagtgttgccagctgaggaggaactggtagaagctgatgaagcggggtccgtttacgcagggatcttaagttacggcgtggggttcttcctgtttattttggtggttgctgctgtgaccctgtgtagattacggtcacccccaaaaaaagggctggggagtcccactgtgcacaagatctcccgcttcccacttaagaggcaagtgtccctcgaaagcaatgcttcgatgtcttctaacacccccttggttaggatcgctcgtctaagcagtggcgagggtccaacactcgcgaacgtgtcagagttggaactgccggcggaccctaaatgggaactgtctagagcccggctgacgcttggaaagcccttaggcgagggatgcttcggccaggttgtaatggctgaagctatcggtattgataaggacagggccgcaaagccagtgaccgtcgctgttaagatgctgaaagatgacgcaacagataaggatctgtccgacctggtttcagagatggagatgatgaaaatgattggcaagcacaaaaatattatcaatttgctgggcgcatgtacccaagggggccccctatacgtgcttgtggaatacgcagcaaaaggaaaccttcgcgagttcctgagagcacgacgaccaccagggctcgattacagcttcgacacttgcaaacctccggaggaacaactgacatttaaagatctggtcagctgtgcgtaccaggtggcccgtggtatggagtatctggcttcacagaaatgcattcatagggatctagccgcccgcaatgtgctggtgaccgaggacaacgtcatgaagatcgctgacttcggcctggcgagggatgttcataatctggactactataagaagaccacaaatggacggctaccagtgaagtggatggcgcccgaggccctgttcgatcgagtttacacacaccagtcggacgtctggtccttcggggtcctcctctgggagatctttacactgggcgggtctccttacccaggaattcccgttgaagagttatttaagctcctgaaggagggccaccgcatggataaacctgcgaattgcactcatgacctgtacatgatcatgcgcgaatgttggcacgccgccccctcccagagacctacgtttaaacaactcgtcgaagatctagaccgcgtcctcacagtcacttctactgacgagtaccttgatctcagcgcccccttcgagcaatactcacctggcggccaggacacgcctagctccagttcaagcggcgacgattccgtgttcgcccatgatctactgcccccagctccccctagcagcggcggttctaggacatag

SEQ ID NO: 2896 - DNA, 2421 bp, Artificial Sequence
  derived and/or modified sequence
atgggggcccccgcctgtgctctggctttgtgcgtcgctgtggctattgtcgctggcgcttcttctgaatccctgggcactgaacagcgggttgtcggacgggccgccgaggtacccgggcccgagcccggacagcaggagcagctggtgtttggatctggggacgcggtggaactaagctgcccaccccccgggggcggaccaatgggaccaactgtgtgggtgaaggatggtacaggcctggttccaagtgaaagagtgctggtgggcccacagagactgcaagttcttaacgcttcgcacgaggacagtggggcctacagctgcagacaacgactcacccagagggtgctctgccatttcagcgtgcgagtgacagatgctccgtcaagcggcgacgatgaagacggtgaagacgaggctgaagataccggtgtggacactggggcaccttactggaccaggcccgaacgaatggacaagaagcttcttgctgtacccgcagccaacacagtccggtttaggtgccctgcggcggggaaccccacgcctagcatatcatggctgaagaacgggagagaattcaggggcgagcatcgaattggtggaattaagctgcgtcaccagcagtggtctcttgtaatggaatcagtggttccgtcagatcgagggaattatacctgcgtcgtcgaaaacaaattcggatccattcggcagacttatactctggacgtgctggagcgcagcccgcatagacccattttgcaggctggcttacccgcgaaccagacggctgtccttgggtcagatgtggagtttcattgcaaggtgtactcagacgcccagccacatatccagtggctcaagcacgttgaggtgaacggtagcaaagtaggccccgatggaaccccttatgtgactgtcctgaagactgcaggagcaaataccaccgataaggaattggaagtactgtcccttcacaacgtaacctttgaggatgcgggtgaatatacttgcctcgcagggaacagtataggcttcagtcaccactctgcttggctggtggtgttgcccgccgaagaggaactggtggaagctgacgaggctggcagtgtctacgctgggatcctctcttacggcgtcggcttcttcctgttcatcttagtcgtcgcagccgttactctgtgcagactaaggagcccgcccaagaagggactgggctcccccactgttcacaaaatatccagatttccactgaagcgacaggtttcattggagagtaatgcaagcatgtcatccaacaccccactggtgagaatcgcccggctatcatcaggagagggtccaaccttggcaaatgtgagtgaactagaactacctgccgaccctaagtgggagctctcccgcgcgagactgaccctgggtaaacctcttggcgaagggtgcttcggccaggtggtgatggccgaagctattggaattgataaagatagggcagccaaaccagtaaccgttgccgtaaaaatgttgaaggacgacgcaaccgataaggatctcagtgacctggtctccgaaatggagatgatgaagatgattggcaaacataagaacatcatcaacttgttgggggcatgcacccaggggggccccctgtatgttttagtggagtacgcggctaaagggaatttgagggagttcctccgtgcccgtagaccacccggactggattactccttcgacacatgtaaacccccagaagagcagcttacttttaaagatctggtgtcatgcgcctatcaggttgccagaggaatggagtatctggcctcacagaagtgcattcatagggacttggctgcccgcaatgtcctggtaacagaagacaatgtcatgaagatagctgatttcgggctggcccgagatgtgcacaatctggattattacaagaaaacaactaatgggcggcttccagtgaagtggatggcgccagaggccctgttcgacagagtctacacgcatcaatctgatgtctggtccttcggcgtcctgctgtgggagatcttcaccctgggggggtctccgtatccggggattccggtggaggagctattcaaacttttaaaggagggacaccggatggataaaccagccaattgtacccacgatctctatatgatcatgcgcgagtgttggcatgcagcccccagtcagcgacccacgtttaagcagctggtggaagacttagatagggtgctgaccgttacctcaactgatgaatacttagacctgagtgcaccatttgaacaatactcaccaggtggtcaggataccccaagttcttcttcaagcggagatgatagcgtcttcgcccacgacctgctgccaccggctccaccttcgagtggaggctctcgtacttag

SEQ ID NO: 2897 - DNA, 4132 bp, Artificial Sequence
  derived and/or modified sequence
tctcccgagcggcgcccgcctcccgccggtgcccgcgccgggccgtggggggcagcatgcccgcgcgcgctgcctgaggacgccgcggcccccgcccccgccatgggcgcccctgcctgcgccctcgcgctctgcgtggccgtggccatcgtggccggcgcctcctcggagtccttggggacggagcagcgcgtcgtggggcgagcggcagaagtcccgggcccagagcccggccagcaggagcagttggtcttcggcagcggggatgctgtggagctgagctgtcccccgcccgggggtggtcccatggggcccactgtctgggtcaaggatggcacagggctggtgccctcggagcgtgtcctggtggggccccagcggctgcaggtgctgaatgcctcccacgaggactccggggcctacagctgccggcagcggctcacgcagcgcgtactgtgccacttcagtgtgcgggtgacagacgctccatcctcgggagatgacgaagacggggaggacgaggctgaggacacaggtgtggacacaggggccccttactggacacggcccgagcggatggacaagaagctgctggccgtgccggccgccaacaccgtccgcttccgctgcccagccgctggcaaccccactccctccatctcctggctgaagaacggcagggagttccgcggcgagcaccgcattggaggcatcaagctgcggcatcagcagtggagcctggtcatggaaagcgtggtgccctcggaccgcggcaactacacctgcgtcgtggagaacaagtttggcagcatccggcagacgtacacgctggacgtgctggagcgctccccgcaccggcccatcctgcaggcggggctgccggccaaccagacggcggtgctgggcagcgacgtggagttccactgcaaggtgtacagtgacgcacagccccacatccagtggctcaagcacgtggaggtgaatggcagcaaggtgggcccggacggcacaccctacgttaccgtgctcaagacggcgggcgctaacaccaccgacaaggagctagaggttctctccttgcacaacgtcacctttgaggacgccggggagtacacctgcctggcgggcaattctattgggttttctcatcactctgcgtggctggtggtgctgccagccgaggaggagctggtggaggctgacgaggcgggcagtgtgtatgcaggcatcctcagctacggggtgggcttcttcctgttcatcctggtggtggcggctgtgacgctctgccgcctgcgcagcccccccaagaaaggcctgggctcccccaccgtgcacaagatctcccgcttcccgctcaagcgacaggtgtccctggagtccaacgcgtccatgagctccaacacaccactggtgcgcatcgcaaggctgtcctcaggggagggccccacgctggccaatgtctccgagctcgagctgcctgccgaccccaaatgggagctgtctcgggcccggctgaccctgggcaagccccttggggagggctgcttcggccaggtggtcatggcggaggccatcggcattgacaaggaccgggccgccaagcctgtcaccgtagccgtgaagatgctgaaagacgatgccactgacaaggacctgtcggacctggtgtctgagatggagatgatgaagatgatcgggaaacacaaaaacatcatcaacctgctgggcgcctgcacgcagggcgggcccctgtacgtgctggtggagtacgcggccaagggtaacctgcgggagtttctgcgggcgcggcggcccccgggcctggactactccttcgacacctgcaagccgcccgaggagcagctcaccttcaaggacctggtgtcctgtgcctaccaggtggcccggggcatggagtacttggcctcccagaagtgcatccacagggacctggctgcccgcaatgtgctggtgaccgaggacaacgtgatgaagatcgcagacttcgggctggcccgggacgtgcacaacctcgactactacaagaagacgaccaacggccggctgcccgtgaagtggatggcgcctgaggccttgtttgaccgagtctacactcaccagagtgacgtctggtcctttggggtcctgctctgggagatcttcacgctggggggctccccgtaccccggcatccctgtggaggagctcttcaagctgctgaaggagggccaccgcatggacaagcccgccaactgcacacacgacctgtacatgatcatgcgggagtgctggcatgccgcgccctcccagaggcccaccttcaagcagctggtggaggacctggaccgtgtccttaccgtgacgtccaccgacgagtacctggacctgtcggcgcctttcgagcagtactccccgggtggccaggacacccccagctccagctcctcaggggacgactccgtgtttgcccacgacctgctgcccccggccccacccagcagtgggggctcgcggacgtgaagggccactggtccccaacaatgtgaggggtccctagcagcccaccctgctgctggtgcacagccactccccggcatgagactcagtgcagatggagagacagctacacagagctttggtctgtgtgtgtgtgtgtgcgtgtgtgtgtgtgtgtgtgcacatccgcgtgtgcctgtgtgcgtgcgcatcttgcctccaggtgcagaggtaccctgggtgtccccgctgctgtgcaacggtctcctgactggtgctgcagcaccgaggggcctttgttctggggggacccagtgcagaatgtaagtgggcccacccggtgggacccccgtggggcagggagctgggcccgacatggctccggcctctgcctttgcaccacgggacatcacagggtgggcctcggcccctcccacacccaaagctgagcctgcagggaagccccacatgtccagcaccttgtgcctggggtgttagtggcaccgcctccccacctccaggctttcccacttcccaccctgcccctcagagactgaaattacgggtacctgaagatgggagcctttaccttttatgcaaaaggtttattccggaaactagtgtacatttctataaatagatgctgtgtatatggtatatatacatatatatatataacatatatggaagaggaaaaggctggtacaacggaggcctgcgaccctgggggcacaggaggcaggcatggccctgggcggggcgtgggggggcgtggagggaggccccagggggtctcacccatgcaagcagaggaccagggccttttctggcaccgcagttttgttttaaaactggacctgtatatttgtaaagctatttatgggcccctggcactcttgttcccacaccccaacacttccagcatttagctggccacatggcggagagttttaatttttaacttattgacaaccgagaaggtttatcccgccgatagagggacggccaagaatgtacgtccagcctgccccggagctggaggatcccctccaagcctaaaaggttgttaatagttggaggtgattccagtgaagatattttatttcctttgtcctttttcaggagaattagatttctataggatttttctttaggagatttattttttggacttcaaagcaagctggtattttcatacaaattcttctaattgctgtgtgtcccaggcagggagacggtttccagggaggggccggccctgtgtgcaggttccgatgttattagatgttacaagtttatatatatctatatatataatttattgagtttttacaagatgtatttgttgtagacttaacacttcttacgcaatgcttctagagttttatagcctggactgctacctttcaaagcttggagggaagccgtgaattcagttggttcgttctgtactgttactgggccctgagtctgggcagctgtcccttgcttgcctgcagggccatggctcagggtggtctcttcttggggcccagtgcatggtggccagaggtgtcacccaaaccggcaggtgcgattttgttaacccagcgacgaactttccgaaaaataaagacacctggttgctaacctg

SEQ ID NO: 2898 - DNA, 4287 bp, Artificial Sequence
  derived and/or modified sequence
gtcgcgggcagctggcgccgcgcggtcctgctctgccggtcgcacggacgcaccggcgggccgccggccggagggacggggcgggagctgggcccgcggacagcgagccggagcgggagccgcgcgtagcgagccgggctccggcgctcgccagtctcccgagcggcgcccgcctcccgccggtgcccgcgccgggccgtggggggcagcatgcccgcgcgcgctgcctgaggacgccgcggcccccgcccccgccatgggcgcccctgcctgcgccctcgcgctctgcgtggccgtggccatcgtggccggcgcctcctcggagtccttggggacggagcagcgcgtcgtggggcgagcggcagaagtcccgggcccagagcccggccagcaggagcagttggtcttcggcagcggggatgctgtggagctgagctgtcccccgcccgggggtggtcccatggggcccactgtctgggtcaaggatggcacagggctggtgccctcggagcgtgtcctggtggggccccagcggctgcaggtgctgaatgcctcccacgaggactccggggcctacagctgccggcagcggctcacgcagcgcgtactgtgccacttcagtgtgcgggtgacagacgctccatcctcgggagatgacgaagacggggaggacgaggctgaggacacaggtgtggacacaggggccccttactggacacggcccgagcggatggacaagaagctgctggccgtgccggccgccaacaccgtccgcttccgctgcccagccgctggcaaccccactccctccatctcctggctgaagaacggcagggagttccgcggcgagcaccgcattggaggcatcaagctgcggcatcagcagtggagcctggtcatggaaagcgtggtgccctcggaccgcggcaactacacctgcgtcgtggagaacaagtttggcagcatccggcagacgtacacgctggacgtgctggagcgctccccgcaccggcccatcctgcaggcggggctgccggccaaccagacggcggtgctgggcagcgacgtggagttccactgcaaggtgtacagtgacgcacagccccacatccagtggctcaagcacgtggaggtgaatggcagcaaggtgggcccggacggcacaccctacgttaccgtgctcaagacggcgggcgctaacaccaccgacaaggagctagaggttctctccttgcacaacgtcacctttgaggacgccggggagtacacctgcctggcgggcaattctattgggttttctcatcactctgcgtggctggtggtgctgccagccgaggaggagctggtggaggctgacgaggcgggcagtgtgtatgcaggcatcctcagctacggggtgggcttcttcctgttcatcctggtggtggcggctgtgacgctctgccgcctgcgcagcccccccaagaaaggcctgggctcccccaccgtgcacaagatctcccgcttcccgctcaagcgacaggtgtccctggagtccaacgcgtccatgagctccaacacaccactggtgcgcatcgcaaggctgtcctcaggggagggccccacgctggccaatgtctccgagctcgagctgcctgccgaccccaaatgggagctgtctcgggcccggctgaccctgggcaagccccttggggagggctgcttcggccaggtggtcatggcggaggccatcggcattgacaaggaccgggccgccaagcctgtcaccgtagccgtgaagatgctgaaagacgatgccactgacaaggacctgtcggacctggtgtctgagatggagatgatgaagatgatcgggaaacacaaaaacatcatcaacctgctgggcgcctgcacgcagggcgggcccctgtacgtgctggtggagtacgcggccaagggtaacctgcgggagtttctgcgggcgcggcggcccccgggcctggactactccttcgacacctgcaagccgcccgaggagcagctcaccttcaaggacctggtgtcctgtgcctaccaggtggcccggggcatggagtacttggcctcccagaagtgcatccacagggacctggctgcccgcaatgtgctggtgaccgaggacaacgtgatgaagatcgcagacttcgggctggcccgggacgtgcacaacctcgactactacaagaagacgaccaacggccggctgcccgtgaagtggatggcgcctgaggccttgtttgaccgagtctacactcaccagagtgacgtctggtcctttggggtcctgctctgggagatcttcacgctggggggctccccgtaccccggcatccctgtggaggagctcttcaagctgctgaaggagggccaccgcatggacaagcccgccaactgcacacacgacctgtacatgatcatgcgggagtgctggcatgccgcgccctcccagaggcccaccttcaagcagctggtggaggacctggaccgtgtccttaccgtgacgtccaccgacgagtacctggacctgtcggcgcctttcgagcagtactccccgggtggccaggacacccccagctccagctcctcaggggacgactccgtgtttgcccacgacctgctgcccccggccccacccagcagtgggggctcgcggacgtgaagggccactggtccccaacaatgtgaggggtccctagcagcccaccctgctgctggtgcacagccactccccggcatgagactcagtgcagatggagagacagctacacagagctttggtctgtgtgtgtgtgtgtgcgtgtgtgtgtgtgtgtgtgcacatccgcgtgtgcctgtgtgcgtgcgcatcttgcctccaggtgcagaggtaccctgggtgtccccgctgctgtgcaacggtctcctgactggtgctgcagcaccgaggggcctttgttctggggggacccagtgcagaatgtaagtgggcccacccggtgggacccccgtggggcagggagctgggcccgacatggctccggcctctgcctttgcaccacgggacatcacagggtgggcctcggcccctcccacacccaaagctgagcctgcagggaagccccacatgtccagcaccttgtgcctggggtgttagtggcaccgcctccccacctccaggctttcccacttcccaccctgcccctcagagactgaaattacgggtacctgaagatgggagcctttaccttttatgcaaaaggtttattccggaaactagtgtacatttctataaatagatgctgtgtatatggtatatatacatatatatatataacatatatggaagaggaaaaggctggtacaacggaggcctgcgaccctgggggcacaggaggcaggcatggccctgggcggggcgtgggggggcgtggagggaggccccagggggtctcacccatgcaagcagaggaccagggccttttctggcaccgcagttttgttttaaaactggacctgtatatttgtaaagctatttatgggcccctggcactcttgttcccacaccccaacacttccagcatttagctggccacatggcggagagttttaatttttaacttattgacaaccgagaaggtttatcccgccgatagagggacggccaagaatgtacgtccagcctgccccggagctggaggatcccctccaagcctaaaaggttgttaatagttggaggtgattccagtgaagatattttatttcctttgtcctttttcaggagaattagatttctataggatttttctttaggagatttattttttggacttcaaagcaagctggtattttcatacaaattcttctaattgctgtgtgtcccaggcagggagacggtttccagggaggggccggccctgtgtgcaggttccgatgttattagatgttacaagtttatatatatctatatatataatttattgagtttttacaagatgtatttgttgtagacttaacacttcttacgcaatgcttctagagttttatagcctggactgctacctttcaaagcttggagggaagccgtgaattcagttggttcgttctgtactgttactgggccctgagtctgggcagctgtcccttgcttgcctgcagggccatggctcagggtggtctcttcttggggcccagtgcatggtggccagaggtgtcacccaaaccggcaggtgcgattttgttaacccagcgacgaactttccgaaaaataaagacacctggttgctaacctgg

SEQ ID NO: 2899 - DNA, 2421 bp, Artificial Sequence
  derived and/or modified sequence
atgggcgccccagcctgtgccctggccctgtgtgtggccgtggccatcgtggccggggccagcagcgagagcctgggcacagagcagagggtggtgggccgggctgctgaggtgcccggccctgagcccggccagcaggagcagctggtgtttggaagtggagatgctgtggagctgagctgccccccacctgggggcggccccatgggccccaccgtgtgggtgaaggatggcaccggcctggtgcccagcgagcgggtgctggtgggcccccagaggctgcaggtgctgaatgccagccatgaggacagcggggcctacagctgccggcagaggctgacccagagggtgctgtgccacttctctgtgcgggtgacagatgcccccagcagtggagatgatgaagatggagaagatgaagctgaggacaccggggtggacaccggggccccctactggaccaggcctgagaggatggacaagaagctgctggccgtgcctgctgccaacacagtgcgcttccgctgcccagctgctggcaaccccacccccagcatctcctggctgaagaatggccgggagttccggggggagcacagaattggaggcatcaagctgcggcaccagcagtggagcctggtgatggagagcgtggtgcccagcgaccggggcaactacacctgtgtggtggagaacaagtttggcagcatccggcagacctacaccctggatgtgctggagaggagcccccaccggcccatcctgcaggccggcctgcctgccaaccagacagctgtgctgggcagtgatgtggagttccactgcaaggtgtacagtgatgcccagccccacatccagtggctgaagcacgtggaggtgaatggcagcaaggtgggcccagatggcaccccctacgtgacagtgctgaagacagctggggccaacaccacagacaaggagctggaggtgctgagcctgcacaacgtgacctttgaagatgctggggagtacacctgcctggccggcaacagcatcggcttcagccaccacagcgcctggctggtggtgctgcctgctgaggaggagctggtggaggctgatgaagctggctctgtgtatgccggcatcctgtcctatggagtgggcttcttcctgttcatcctggtggtggccgctgtgaccctgtgccgcctgcggagcccccccaagaagggcctgggcagccccaccgtgcacaagatcagccgcttccccctgaagaggcaggtgtccctggagagcaatgcctccatgagcagcaacacccccctggtgcgcatcgcccggctgagcagtggagagggccccaccctggccaacgtgtctgagctggagctgcctgctgaccccaagtgggagctgagccgggcccggctgaccctgggcaagcccctgggggagggctgcttcggccaggtggtgatggccgaggccatcggcatcgacaaggacagagctgccaagcctgtgacagtggccgtgaagatgctgaaggatgatgccacagacaaggacctgagtgacctggtgtctgagatggagatgatgaagatgattggcaagcacaagaacatcatcaacctgctgggcgcctgcacccagggcggccccctgtatgtgctggtggagtatgctgccaagggcaacctgcgggagttcctgcgggcccggcggcccccaggcctggactacagctttgacacctgcaagcccccagaggagcagctgaccttcaaggacctggtgtcctgtgcctaccaggtggcccggggcatggagtacctggccagccagaagtgcatccaccgggacctggccgccagaaatgtgctggtgacagaagataatgtgatgaagattgctgactttggcctggccagagatgtgcacaacctggactactacaagaagaccaccaacggccgcctgcctgtgaagtggatggcccctgaggccctgtttgacagagtgtacacccaccagagtgatgtgtggagctttggagtgctgctgtgggagatcttcaccctgggcggcagcccctacccaggcatccctgtggaggagctgttcaagctgctgaaggagggccacaggatggacaagccagccaactgcacccatgacctgtacatgatcatgagggagtgctggcatgctgcccccagccagaggcccaccttcaagcagctggtggaggacctggacagagtgctgactgtgaccagcacagatgagtacctggacctgagcgccccctttgagcagtacagccctgggggccaggacacccccagcagcagcagcagtggagatgattctgtgtttgcccatgacctgctgcccccagccccacccagcagcggcggcagcaggacatag

SEQ ID NO: 2900 - DNA, 2421 bp, Artificial Sequence
  derived and/or modified sequence
atgggcgcccccgcctgcgccctggccctgtgcgtggccgtggccattgtggcaggagcttcctccgagtctctcgggactgaacagcgcgtagtgggccgagccgctgaggttcctggtccagaacccggtcagcaggaacagctggtgtttggcagtggcgacgctgtcgagctgtcttgtccaccgcccggaggcgggcccatggggccaaccgtttgggtgaaggacggaactggcctcgtccctagcgagcgagtactggtgggaccccagcggctccaagtcctgaatgcctcacatgaggactccggcgcttattcctgccggcagagactcacacaacgggtcctgtgccacttcagcgtgcgcgtaactgatgcccccagcagtggcgatgacgaggatggggaggacgaagccgaagatactggcgtggatacgggggctccgtactggacaaggccggagcgcatggacaagaagctactggcggtgcccgctgctaacaccgtccggttccgctgtcctgctgcgggaaacccgacacctagcatcagttggctgaagaatggccgcgaattccggggcgaacacagaatagggggcataaaactgcgccaccagcagtggtccctcgtgatggaatcagtagtgcccagtgatcgcggcaactacacctgcgtggtcgagaacaagttcggaagcattcggcagacatataccctcgatgtacttgaaaggtccccccacaggcctatcctccaggcgggattgccagcaaatcagaccgcggtgctcggatctgatgtggagtttcattgtaaagtgtatagcgacgcgcagccacatatacagtggctcaagcatgtggaagtgaacggtagtaaggtgggcccagatgggacaccctacgtcacggtgctgaaaacggcaggtgcaaacacgactgataaagagctggaggtattatcactgcacaacgtaactttcgaagacgctggcgagtacacatgcctggcgggcaattccatcggattttcccaccactcagcttggctggtggttctcccggcagaagaggagcttgtggaggcggatgaagccggctcggtttatgctggcatactgtcatacggcgttggctttttcctgttcattctggtagtagccgctgtcactttgtgtaggttgagatcaccccctaaaaaaggcttagggtctccaactgtccacaagatttcccgcttccctttgaaaagacaggttagccttgaatctaacgcctcaatgagctccaacactcccctggtgcggattgcccgcttgtcgagcggcgaaggtcctactcttgcgaatgtgagcgagctagagctgcccgcagacccaaagtgggagttatcccgagctaggctgacgctgggcaaaccgctgggagagggctgtttcgggcaggtggtcatggccgaagcaataggcatcgacaaagaccgcgccgccaagcccgtgacggtagcagttaagatgctcaaggatgatgccacggacaaggacttgagtgatctggtgtccgaaatggaaatgatgaagatgatcgggaaacacaaaaacatcattaatctgctgggggcctgtacacagggaggtccgctgtacgtcctcgtagagtatgccgcaaaaggcaatctacgcgagtttctccgcgcccgtcgaccccccgggcttgattactcatttgatacatgtaaaccaccagaggaacagctcacattcaaggacttggtaagttgcgcataccaggtggccaggggcatggaatatcttgctagtcaaaaatgtattcatcgtgacttggccgctcggaacgtactggtcacagaagacaacgtgatgaagatagccgactttgggctcgcccgtgatgtgcacaatttagactattacaaaaaaacaaccaatggtcggcttccggttaagtggatggccccggaggctctatttgatcgcgtgtacacccatcagagtgacgtgtggtctttcggcgttctcctgtgggagattttcactctgggaggctctccgtatccaggcatccctgttgaggagctgttcaaacttctcaaggaggggcaccgaatggacaagcccgccaactgcacacatgatctttacatgataatgcgggagtgctggcacgcagctccgtcacaacggcccacttttaagcagctcgtagaggatttggaccgagtgcttacggttacctcaaccgacgagtacttagacctttccgctccatttgagcagtattctcccggaggacaagacaccccatcttcatcctctagtggagacgattccgtctttgcgcatgacctgctgcccccggccccccccagtagcggcggctccagaacgtag

SEQ ID NO: 2901 - DNA, 2421 bp, Artificial Sequence
  derived and/or modified sequence
atgggcgcccccgcctgcgccctggccctgtgcgtggccgtggccattgtggccggcgcttcctccgaatcactggggaccgagcagcgcgtggtcggtcgagctgcggaggtgcccggacctgagcccggacaacaggagcagcttgtgtttggctctggcgacgcagttgagcttagctgccctcctccaggtggcggacccatgggccctactgtgtgggtgaaggatggcaccggtctggtaccctcagagcgcgtcctcgtaggcccgcaacgcctacaggtgctgaacgcatcacatgaggatagtggagcctattcttgtcgacaaagactgacccagagagtgctctgccacttcagtgtcagggtgaccgatgctccaagcagtggcgatgacgaagacggagaagacgaagccgaggacaccggcgtcgatacaggcgctccctactggactagacctgaaagaatggataagaagctgttggctgtgccagcggccaataccgtgcgctttcgatgtcctgccgcgggaaatccaacccccagcatctcttggcttaaaaacgggagagagtttcggggggagcataggattggcgggattaagcttcgacaccagcagtggtccttggtaatggagtccgtggtcccaagcgaccgggggaattatacatgtgtggtcgagaacaagtttgggagcatccggcagacatacacactggacgtgctggaaagatccccccacaggccaattttgcaggccggcctaccggcaaatcagaccgcggtcttaggaagtgatgtggaatttcactgcaaggtctactcggacgcgcagccacacattcagtggctgaagcatgtagaggtcaatggatccaaggtcggcccagatggtacgccctacgtgaccgttctcaagacggctggtgccaatacgaccgacaaggaactggaggttctgtcactccacaatgtgacattcgaagatgcaggagaatatacgtgccttgctggcaattccatcggcttttcgcatcactctgcctggcttgtcgtccttcctgccgaagaggaactcgtcgaagccgatgaggccggcagcgtttacgctggcatactaagttatggagtcggtttcttcctgtttattcttgtggtggcagctgtgaccctatgtcggctacgaagcccccccaagaagggcttggggtctccaaccgttcacaagatttctagattcccactcaaacgccaggtctctctggaaagcaacgcttcaatgagctcaaatactccgttggttcgtatcgcccgccttagttcaggggaaggaccgaccctcgccaacgttagtgaactggaattgccggcagatccaaaatgggaactgagccgagcccggcttacactcggcaaaccactaggggagggctgcttcggtcaggtggtgatggctgaggcgatcgggatcgataaggatagggcagcaaagccggtcaccgtagccgtcaagatgctgaaagacgacgccaccgacaaggatctgagtgatctcgttagtgagatggaaatgatgaaaatgatcggcaagcacaagaacatcatcaatctgctgggggcatgtacgcagggaggccctttgtatgtgctggtagaatacgcagcaaaggggaacttacgcgagttcctgagagcaagacgccccccaggccttgactactccttcgatacttgcaagccgccagaggagcagctgacatttaaggacctggtaagttgcgcctaccaggtggccaggggcatggaatacctcgcctcacaaaagtgtatccaccgcgacctggctgctaggaatgtgctggtaaccgaagataatgtgatgaaaatcgccgattttggcctggctcgtgatgtgcacaacctggattactacaaaaaaactaccaacgggagactgccagtcaagtggatggcccctgaagctctgttcgaccgggtgtacactcaccagagcgatgtttggtcttttggcgtgctcctgtgggaaatctttacactcggcggttctccatatcctggcattcccgtggaagagctctttaagctgctcaaagagggacatcgcatggacaaacccgccaactgcacccacgacctatatatgatcatgcgggagtgctggcatgccgctccctcgcagcgcccgaccttcaaacagctggtcgaggacctggaccgggtcctgacggtgacttccactgacgagtatctcgacctatctgcacccttcgagcagtactcacctggcggccaggacacaccctcttcatcttcatcgggcgacgattccgtattcgcccacgacttacttccacccgctccacctagctctggaggaagtcggacctag

SEQ ID NO: 2902 - DNA, 2421 bp, Artificial Sequence
  derived and/or modified sequence
atgggtgctccagcctgcgctctggccctctgtgtggccgtggccatagtggccggagccagcagcgagtcattgggtaccgagcaaagggtggtcggtcgagcagcagaagtcccagggccagagcctggacaacaagaacagctcgtctttggtagcggtgatgccgttgagctctcctgcccacccccaggcggtggtcctatgggcccaacggtatgggtaaaagacggcacgggcctcgtgccctccgagcgagtacttgtcgggccacagagactccaggtactcaacgcctcgcatgaggatagtggcgcttactcatgccggcagcgcctgacccagagggtgctgtgccacttctccgtgagagtgactgatgcaccaagcagtggggatgatgaagacggcgaagatgaggcagaagacaccggggtggacactggtgctccctattggactcgccctgaaaggatggacaagaagctgctggcagttcccgcagctaacaccgtgcggtttagatgccctgctgccggtaatcctacaccctccattagctggctcaagaacgggagggaattcagaggggaacatcggattggcggaattaaactcagacatcagcagtggtcgctggtaatggaaagtgtagtgccttctgataggggcaattatacctgtgtggtcgagaacaaattcggctccatcaggcaaacgtacactttggatgtgcttgaacgctctccacaccggcctatcctgcaggccggactgccagctaaccaaacagctgtcctggggagcgatgttgaatttcattgcaaggtgtactcagatgcgcagcctcatatacaatggctaaagcatgtggaggtcaatggttccaaggtgggtccggacggaactccatatgtgacagtcttgaaaactgcaggagctaacactactgacaaagagctggaagtactgagtctgcacaacgtgaccttcgaggatgctggggaatacacgtgcctagcagggaattctattggctttagccatcatagcgcgtggttagtagtcctcccagcagaggaagagctggtggaggccgacgaggctggcagcgtttacgccggaatcttgtcctatggagtcggttttttcttattcatactggtagtggccgctgttactctttgcagattaaggtctcccccaaaaaagggactcgggagccccactgtgcataagatatccaggttccctcttaagcggcaggtatcattggagtctaacgcgagcatgagttcaaacacacctctggtccgcattgcaaggttgagttcaggagagggccctactctggcaaacgtgtctgaactggagctccccgcagacccaaagtgggagctgtctcgggctcgcctcacattgggcaagcctctgggtgaaggctgctttgggcaagtagtgatggctgaggccattgggatcgacaaggacagggctgccaagcctgtgaccgtagcagtgaaaatgttaaaggacgacgcaacagataaggatctgtcagatctggtgtctgagatggaaatgatgaaaatgatcggaaaacacaagaatataatcaatctcctcggcgcttgcacacagggtggcccactctatgtcctggtcgaatacgcagctaagggcaacctgagggagttccttagagctcggcgtcctcctggactcgactattccttcgatacttgtaagcccccagaagagcagcttacttttaaggatctggtgtcctgtgcttaccaggtcgccagagggatggagtatctggccagccagaagtgcattcatcgggacttggcggcacgaaacgtcttggtgaccgaggataacgttatgaagatagcagactttggacttgcccgagatgtacacaatctggattattacaaaaagactaccaatggtaggcttcccgttaaatggatggccccagaagccttattcgatcgggtgtacacacaccagtctgacgtttggtcttttggtgtgcttctttgggagatattcactcttgggggaagcccatacccgggaattcctgtggaagaactgtttaagttacttaaggagggccatagaatggacaaaccagctaactgtacccacgatctgtatatgatcatgcgggaatgttggcatgctgccccttcacagcggcctacattcaagcagctcgtggaggacctcgatagggtcctgactgttacctcaactgacgagtacctggacttgagcgctccctttgaacagtatagtccgggagggcaggacacaccttcgtcaagcagcagcggggatgattccgtgtttgcacatgacctgctacccccagcccctccctccagcggtggtagtcgtacatag

SEQ ID NO: 2903 - DNA, 2421 bp, Artificial Sequence
  derived and/or modified sequence
atgggcgctcccgcatgtgcgctggctctgtgtgtggctgtagcaatagtggccggtgccagttcggagagcctgggcactgaacagcgggtggtggggagggctgcagaagtgccaggtccagagcccggtcagcaagagcagttagtcttcggaagtggtgacgccgtcgaactgagttgtccccctcctggaggtggacctatgggccctacggtttgggtgaaggatggaacaggcctagtgccttcagaacgtgtgctggtcggcccacagcgcctgcaagtcttgaacgccagtcacgaggattcaggcgcttacagctgtagacagaggcttactcaacgtgtgctgtgtcacttttccgtccgagtcacagacgctccctctagcggggacgacgaagatggggaagacgaggctgaggacactggcgtggacactggggctccttactggactaggcccgagcgaatggataaaaaactactcgctgtgcctgcggctaataccgtccgtttccgctgcccagccgctggaaaccctacaccttccatctcctggctcaagaatggacgcgaattcagaggtgagcatcggatcggtggaattaagctcagacatcaacagtggtctctagttatggaatctgtggtccccagcgaccgtggaaactacacttgcgtcgtggagaataagttcgggtcaattcgacagacttatacactcgacgtgctggagaggtcccctcacagacccatactacaggccggactaccagcaaatcagacagctgttcttggttctgacgttgaattccactgcaaagtctattcagatgcacagccacacattcagtggctgaaacatgtagaggtgaatggcagtaaagtggggccagatggtactccatacgtgaccgtgctcaaaacggcaggtgcaaacactaccgataaagaactggaagtcctctcgttgcacaacgtcaccttcgaggacgccggagagtatacttgcctcgccggtaacagcatcggtttctctcatcacagtgcctggctggtcgttctgcctgctgaggaggagctggtggaggcagacgaggccggatccgtgtatgccggtatcctctcttacggggtaggcttttttttattcattctcgtggtggccgctgtgaccctgtgtcggttgcgatctcctccgaaaaaggggttgggtagcccaactgtgcacaagatcagccggttccctcttaaaaggcaggtatcactggagtcaaacgccagcatgtcctcaaacacgccccttgttcgcatcgcacggttgtcatctggcgaaggaccgactttagctaatgtcagcgagctggagcttcccgcagacccgaaatgggagctttctcgagcccgtcttacgctggggaaacctcttggagagggatgtttcggccaagtcgtaatggcggaggcaatcggcatcgataaggatcgagctgcgaaacccgtcaccgtagcagtaaaaatgcttaaagatgacgcaacagataaagacctcagcgacctggtctcagaaatggaaatgatgaaaatgataggcaagcataagaacataatcaacctcctgggagcctgtactcaggggggtcctctctatgtactcgttgaatatgcggcaaaaggaaatctgcgagaattccttcgggcaaggcggcctccagggctggattattccttcgatacatgtaaaccgccagaggaacagctgacattcaaggatttagtgtcctgtgcataccaggtggcacgtggaatggagtatctggccagccaaaaatgcattcatcgggatctggccgctagaaacgtcctcgtgaccgaagacaacgtcatgaagatcgcggacttcggtttggcccgtgatgtccacaatctggattactacaaaaagacaactaacgggaggcttcccgtgaaatggatggcgcctgaagctctgttcgacagggtctatacccatcagagtgacgtatggtctttcggagtgctgctttgggagatctttaccctcggcggaagcccttatcccggtattcccgttgaagagctttttaaactgctcaaggaagggcatcggatggacaagccagcaaactgcactcacgacctgtatatgatcatgcgagaatgctggcacgctgctccaagccagagaccaaccttcaagcagttggtcgaagacctggaccgagtgctcaccgtgacatcaaccgacgagtaccttgatctttccgcgcctttcgaacagtattctcccggaggccaggataccccctcctcttcttcatcgggagatgactccgtcttcgcccacgatctgctgccgccagctcctccatcttccggcggatcccgaacctag

SEQ ID NO: 2904 - protein, 510 aa, Artificial Sequence
  derived and/or modified sequence
MYRALRLLARSRPLVRAPAAALASAPGLGGAAVPSFWPPNAARMASQNSFRIEYDTFGELKVPNDKYYGAQTVRSTMNFKIGGVTERMPTPVIKAFGILKRAAAEVNQDYGLDPKIANAIMKAADEVAEGKLNDHFPLVVWQTGSGTQTNMNVNEVISNRAIEMLGGELGSKIPVHPNDHVNKSQSSNDTFPTAMHIAAAIEVHEVLLPGLQKLHDALDAKSKEFAQIIKIGRTHTQDAVPLTLGQEFSGYVQQVKYAMTRIKAAMPRIYELAAGGTAVGTGLNTRIGFAEKVAAKVAALTGLPFVTAPNKFEALAAHDALVELSGAMNTTACSLMKIANDIRFLGSGPRSGLGELILPENEPGSSIMPGKVNPTQCEAMTMVAAQVMGNHVAVTVGGSNGHFELNVFKPMMIKNVLHSARLLGDASVSFTENCVVGIQANTERINKLMNESLMLVTALNPHIGYDKAAKIAKTAHKNGSTLKETAIELGYLTAEQFDEWVKPKDMLGPK

SEQ ID NO: 2905 - DNA, 1533 bp, Artificial Sequence
  derived and/or modified sequence
atgtacagagccctgagactgctggccagaagcagacccctggtgagagcccccgccgccgccctggccagcgcccccggcctgggcggcgccgccgtgcccagcttctggccccccaacgccgccagaatggccagccagaacagcttcagaatcgagtacgacaccttcggcgagctgaaggtgcccaacgacaagtactacggcgcccagaccgtgagaagcaccatgaacttcaagatcggcggcgtgaccgagagaatgcccacccccgtgatcaaggccttcggcatcctgaagagagccgccgccgaggtgaaccaggactacggcctggaccccaagatcgccaacgccatcatgaaggccgccgacgaggtggccgagggcaagctgaacgaccacttccccctggtggtgtggcagaccggcagcggcacccagaccaacatgaacgtgaacgaggtgatcagcaacagagccatcgagatgctgggcggcgagctgggcagcaagatccccgtgcaccccaacgaccacgtgaacaagagccagagcagcaacgacaccttccccaccgccatgcacatcgccgccgccatcgaggtgcacgaggtgctgctgcccggcctgcagaagctgcacgacgccctggacgccaagagcaaggagttcgcccagatcatcaagatcggcagaacccacacccaggacgccgtgcccctgaccctgggccaggagttcagcggctacgtgcagcaggtgaagtacgccatgaccagaatcaaggccgccatgcccagaatctacgagctggccgccggcggcaccgccgtgggcaccggcctgaacaccagaatcggcttcgccgagaaggtggccgccaaggtggccgccctgaccggcctgcccttcgtgaccgcccccaacaagttcgaggccctggccgcccacgacgccctggtggagctgagcggcgccatgaacaccaccgcctgcagcctgatgaagatcgccaacgacatcagattcctgggcagcggccccagaagcggcctgggcgagctgatcctgcccgagaacgagcccggcagcagcatcatgcccggcaaggtgaaccccacccagtgcgaggccatgaccatggtggccgcccaggtgatgggcaaccacgtggccgtgaccgtgggcggcagcaacggccacttcgagctgaacgtgttcaagcccatgatgatcaagaacgtgctgcacagcgccagactgctgggcgacgccagcgtgagcttcaccgagaactgcgtggtgggcatccaggccaacaccgagagaatcaacaagctgatgaacgagagcctgatgctggtgaccgccctgaacccccacatcggctacgacaaggccgccaagatcgccaagaccgcccacaagaacggcagcaccctgaaggagaccgccatcgagctgggctacctgaccgccgagcagttcgacgagtgggtgaagcccaaggacatgctgggccccaagtag

SEQ ID NO: 2906 - DNA, 1533 bp, Artificial Sequence
  derived and/or modified sequence
atgtatcgagcacttaggctgctggcccgctctcgccccttggtgcgggcccctgccgcagccctggcatccgctccagggctaggcggcgccgctgtcccaagtttctggccaccaaacgcagctcgaatggccagtcaaaactctttccggatcgagtacgacactttcggagaactgaaagttcctaacgataagtactatggggcccagacagtcaggtctacaatgaattttaaaattgggggtgttaccgagagaatgccgacccccgttattaaggcctttggcatcctcaagagagctgctgccgaggtgaatcaggattacgggctcgatcccaaaattgctaacgcaattatgaaggctgccgatgaagtcgcagaaggcaaacttaatgaccactttcccttggtggtctggcaaacaggctcaggcacacaaactaacatgaacgtgaacgaagtaatcagcaaccgggccatagagatgttaggcggcgaacttgggtcgaagattccagtccaccccaacgaccacgtgaataaatcccagtccagtaacgatacgttccctacagctatgcatatagcggccgcgattgaggtgcatgaggtgttgctccctggcctacaaaaactccacgatgccctggacgctaaaagcaaagagttcgcacagatcattaagatcggcagaacacatacgcaggacgccgtgcctctaacactcgggcaggagttctcgggttacgttcagcaggtgaagtacgccatgacaagaattaaggctgccatgcctaggatttacgaactggccgccggggggacagccgtgggaactggacttaatactagaataggcttcgccgaaaaagttgcagctaaggtggccgcgctgactggcctccccttcgtgacagccccaaataaattcgaagcactggccgcgcacgacgccctcgtcgaactctcaggggccatgaatacgactgcctgctctttgatgaagatcgccaacgacataagattcttggggtccggacctcgttctggcttaggggagctgatcctgccggagaatgaacctggtagctcgataatgccaggaaaggtcaatcctacgcagtgcgaggccatgacaatggttgccgctcaggtgatgggaaaccatgtggccgtcactgtggggggaagcaatggtcattttgagttgaatgtctttaaacctatgatgataaagaacgtgttacattctgcccggcttctgggagacgcatcggtgtcttttaccgaaaattgtgttgtaggcatccaggcaaacaccgaaaggataaacaaactgatgaacgagagcctcatgctggtaaccgcactgaacccccatataggctacgacaaggctgccaaaatcgcaaaaactgctcacaaaaacggaagcacacttaaagaaactgccattgagctcggatatctgacagccgagcagttcgacgagtgggtcaagcctaaggacatgctggggccaaagtag

SEQ ID NO: 2907 - DNA, 1797 bp, Artificial Sequence
  derived and/or modified sequence
acagccgcccagaaattctacccaagctccctcagcaccatgtaccgagcacttcggctcctcgcgcgctcgcgtcccctcgtgcgggctccagccgcagccttagcttcggctcccggcttgggtggcgcggccgtgccctcgttttggcctccgaacgcggctcgaatggcaagccaaaattccttccggatagaatatgatacctttggtgaactaaaggtgccaaatgataagtattatggcgcccagaccgtgagatctacgatgaactttaagattggaggtgtgacagaacgcatgccaaccccagttattaaagcttttggcatcttgaagcgagcggccgctgaagtaaaccaggattatggtcttgatccaaagattgctaatgcaataatgaaggcagcagatgaggtagctgaaggtaaattaaatgatcattttcctctcgtggtatggcagactggatcaggaactcagacaaatatgaatgtaaatgaagtcattagcaatagagcaattgaaatgttaggaggtgaacttggcagcaagatacctgtgcatcccaacgatcatgttaataaaagccagagctcaaatgatacttttcccacagcaatgcacattgctgctgcaatagaagttcatgaagtactgttaccaggactacagaagttacatgatgctcttgatgcaaaatccaaagagtttgcacagatcatcaagattggacgtactcatactcaggatgctgttccacttactcttgggcaggaatttagtggttatgttcaacaagtaaaatatgcaatgacaagaataaaagctgccatgccaagaatctatgagctcgcagctggaggcactgctgttggtacaggtttaaatactagaattggctttgcagaaaaggttgctgcaaaagtggctgcacttacaggcttgccttttgtcactgctccgaataaatttgaagctctggctgctcatgacgctctggttgagctcagtggagccatgaacactactgcctgcagtctgatgaagatagcaaatgatattcgatttttgggttctggtcctcggtcaggtctgggagaattgatcttgcctgaaaatgaaccaggaagcagtatcatgccaggcaaggtgaaccctactcagtgtgaagcaatgaccatggttgcagcccaagtcatggggaaccatgttgctgtcactgtcggaggcagcaatggacattttgagttgaatgttttcaagccaatgatgattaaaaatgtgttacactcagccaggctgctgggggatgcttcagtttcctttacagaaaactgcgtggtgggaatccaggccaatacagaaaggatcaacaagctgatgaatgagtctctaatgttggtgacagctctcaatcctcatatagggtatgacaaggcagcaaagattgctaagacagcacacaaaaatggatcaaccttaaaggaaactgctatcgaacttggctatctcacagcagagcagtttgacgaatgggtaaaacctaaggacatgctgggtccaaagtgatttacataaatttataatgaaaataaacatgtataaaatttaaaaaaacagactcccatttcttaaaaacggataagtttgaaaggaaactgctattgaacttaagcatctctagcagagcaatttgatcagtatataaaaccctaggatgtgctaggtctaagatggattaaacaagtataaaataaaatacatttataaaataaaaaggaaaacagacttaaa

SEQ ID NO: 2908 - DNA, 1533 bp, Artificial Sequence
  derived and/or modified sequence
atgtaccgggccctgcggctgctggcccggagccggcccctggtgcgggccccagctgctgccctggccagcgcccctggcctgggcggcgctgctgtgcccagcttctggcccccaaatgctgccaggatggccagccagaacagcttccgcatcgagtatgacacctttggagagctgaaggtgcccaatgacaagtactacggggcccagacagtgcgcagcaccatgaacttcaagattggaggagtgacagagaggatgcccacccctgtgatcaaggccttcggcatcctgaagagagctgctgctgaggtgaaccaggactatggcctggaccccaagatcgccaatgccatcatgaaggccgcagatgaggtggccgagggcaagctgaatgaccacttccccctggtggtgtggcagacaggcagcggcacccagaccaacatgaatgtgaatgaggtgatcagcaacagagccatcgagatgctgggcggggagctgggcagcaagatccctgtgcaccccaatgaccacgtgaacaagagccagagcagcaatgacaccttccccacagccatgcacatcgctgctgccatcgaggtgcatgaggtgctgctgcccggcctgcagaagctgcatgatgccctggatgccaagagcaaggagtttgcccagatcatcaagattggaagaacccacacccaggatgctgtgcccctgaccctgggccaggagttcagcggctacgtgcagcaggtgaagtatgccatgacccgcatcaaggccgccatgccccgcatctatgagctggccgccggcggcacagctgtgggcaccggcctgaacaccagaattggatttgctgagaaggtggccgccaaggtggccgccctgaccggcctgccctttgtgacagcccccaacaagtttgaggccctggccgcccatgatgccctggtggagctgagcggggccatgaacaccacagcctgcagcctgatgaagatcgccaatgacatccgcttcctgggcagcggccccaggagcggcctgggggagctgatcctgcctgaaaatgaacctggcagcagcatcatgcctgggaaggtgaaccccacccagtgtgaggccatgaccatggtggccgcccaggtgatgggcaaccacgtggccgtgacagtgggcggcagcaatggccactttgagctgaatgtgttcaagcccatgatgatcaagaatgtgctgcacagcgcccggctgctgggagatgcctctgtgtccttcacagagaactgtgtggtgggcatccaggccaacacagagcgcatcaacaagctgatgaatgaaagcctgatgctggtgacagccctgaacccccacatcggctatgacaaggccgccaagatcgccaagacagcccacaagaatggcagcaccctgaaggagacagccatcgagctgggctacctgacagctgagcagtttgatgagtgggtgaagcccaaggacatgctgggccccaagtag

SEQ ID NO: 2909 - DNA, 1533 bp, Artificial Sequence
  derived and/or modified sequence
atgtaccgggccctgcggctgctggcccggagccggcccctggtgagggcccctgccgcagccctggcctcagcccctgggctgggtggcgccgccgtcccctctttttggcctccaaacgcagcgaggatggcatctcaaaacagcttccgcattgagtatgatacattcggggaattgaaagtgcccaatgataagtactacggggcgcagacggtgcgcagcacaatgaactttaagatcggcggggtcacagaacgcatgccaacacccgtgatcaaagcctttggaatcttgaaaagggccgctgccgaggtgaatcaagattacggacttgatccaaagatagcaaatgccataatgaaagctgccgatgaagtagccgaaggtaagctgaatgatcatttccccctcgttgtctggcaaactggatccggaacccaaactaacatgaacgttaatgaggtgatcagcaatagagccatcgaaatgttaggcggagaacttgggtcaaaaatccccgtgcatccaaacgatcacgtgaacaagtcccagagctctaacgacacatttcctaccgctatgcatatcgctgccgctattgaggtgcacgaagtgctgctccctgggttgcaaaagcttcacgacgctttggatgcaaaaagcaaggaattcgcccagatcataaaaatcggcaggacccatacacaggatgcagtccccctgaccctcgggcaagagtttagcggatatgttcagcaggtcaagtatgcaatgactcgcatcaaggcagccatgccaaggatctatgagttggcagctggcggaaccgccgttggcactggattgaacactaggatcggctttgccgagaaggtggccgcaaaggtcgccgcattaacaggactgcctttcgtgacagcacccaacaaattcgaagctctggctgctcatgacgccttagtcgaactgtctggcgcaatgaataccaccgcctgttctcttatgaagatcgcaaatgacatcaggtttctcggcagcggccccagatctggactgggcgagctcattctccctgagaacgaacctggcagtagtatcatgcctggcaaggttaaccccacacagtgtgaggcaatgaccatggttgcggcccaagtgatgggaaatcacgtggccgttaccgttggtgggagcaacggtcacttcgaactgaacgttttcaagccaatgatgatcaagaacgttctccactcggccagacttctcggggacgcaagcgtgtctttcaccgagaattgcgtggtgggcattcaagccaatacggagaggattaataaactgatgaacgagtcacttatgctggtgacagctcttaacccgcatatcggttacgacaaagccgccaagattgccaagaccgcacataagaatggatctacgctcaaagagactgctattgaactcggctacttgaccgccgaacagttcgatgaatgggtgaaaccaaaggatatgctgggaccaaagtag

SEQ ID NO: 2910 - DNA, 1533 bp, Artificial Sequence
  derived and/or modified sequence
atgtaccgcgcactccggttgctggccagatccagacccttggtgcgtgcccctgctgccgctcttgcttccgccccagggcttggtggtgctgctgtgcccagcttctggcctcccaatgcagccagaatggcaagtcaaaactctttcaggatagagtatgacacctttggggagctcaaggttccaaatgacaaatattatggtgcacagaccgttcgcagcactatgaattttaagattggtggggtaacggagagaatgcccacgcccgtcatcaaggccttcggaatcctgaagagagccgcagccgaagtgaatcaagactatggacttgaccccaagattgccaatgccatcatgaaggccgctgacgaagttgcggagggaaaactcaacgaccacttcccactggtggtgtggcaaacaggaagcgggactcagactaatatgaatgtgaacgaggtcatctcgaatcgcgcaattgagatgttggggggtgaactggggtccaaaatcccagtgcaccccaacgatcacgtgaacaagtctcaaagtagcaatgacaccttcccaaccgccatgcacatcgctgccgctatcgaagtgcatgaggtgttgctgccaggtctccagaagttacacgatgccttagacgctaaatccaaggagtttgcccaaattatcaagatcgggaggactcacactcaggacgcagtgcccttgacactggggcaggagttctccggctatgtccagcaggtgaagtatgccatgactcgcatcaaggccgctatgccacggatctatgaactagccgcaggcggtacagccgtgggaactggcttgaacacccggattggctttgccgagaaggtcgccgctaaagtggcagctcttaccggactgccttttgtgacagccccaaataagttcgaagcactcgccgctcatgatgcccttgtagagttatcgggcgcaatgaataccacagcttgttcactgatgaaaatcgccaacgacatccgctttctagggagcggtcctcgcagtggcctgggagagctgatcttgcccgaaaatgagccaggttcttcgatcatgcctggaaaggttaatcccacacaatgcgaagccatgaccatggtggccgcacaagtaatgggcaatcacgtggctgtgacagtgggtggctctaacgggcatttcgaactgaatgtttttaaacccatgatgatcaaaaacgtactgcactcagcgaggctgctgggtgacgcatctgtgtcattcactgagaactgcgtggtgggaatccaggccaataccgaacgaattaacaaactcatgaacgaatcactcatgctggtgactgctctaaatcctcacatcggctacgataaggcagccaaaattgccaaaacagcccataaaaacggatcaaccctgaaggagaccgcaatcgagttgggttatctcacggcggagcagtttgatgaatgggtgaagcccaaagacatgctcggccctaagtag

SEQ ID NO: 2911 - protein, 210 aa, Artificial Sequence
  derived and/or modified sequence
MWTLGRRAVAGLLASPSPAQAQTLTRVPRPAELAPLCGRRGLRTDIDATCTPRRASSNQRGLNQIWNVKKQSVYLMNLRKSGTLGHPGSLDETTYERLAEETLDSLAEFFEDLADKPYTFEDYDVSFGSGVLTVKLGGDLGTYVINKQTPNKQIWLSSPSSGPKRYDWTGKNWVYSHDGVSLHELLAAELTKALKTKLDLSSLAYSGKDA

SEQ ID NO: 2912 - DNA, 2608 bp, Artificial Sequence
  derived and/or modified sequence
tttacagggcttaactcattttatccttaccacaatcctatgaagtaggaacttttataaaacgcattttataaacaaggcacagagaggttaattaacttgccctctggtcacacagctaggaagtgggcagagtacagatttacacaaggcatccgtctcctggccccacatacccaactgctgtaaacccataccggcggccaagcagcctcaatttgtgcatgcacccacttcccagcaagacagcagctcccaagttcctcctgtttagaattttagaagcggcgggccaccaggctgcagtctcccttgggtcaggggtcctggttgcactccgtgctttgcacaaagcaggctctccatttttgttaaatgcacgaatagtgctaagctgggaagttcttcctgaggtctaacctctagctgctcccccacagaagagtgcctgcggccagtggccaccaggggtcgccgcagcacccagcgctggagggcggagcgggcggcagacccggagcagcatgtggactctcgggcgccgcgcagtagccggcctcctggcgtcacccagcccagcccaggcccagaccctcacccgggtcccgcggccggcagagttggccccactctgcggccgccgtggcctgcgcaccgacatcgatgcgacctgcacgccccgccgcgcaagttcgaaccaacgtggcctcaaccagatttggaatgtcaaaaagcagagtgtctatttgatgaatttgaggaaatctggaactttgggccacccaggctctctagatgagaccacctatgaaagactagcagaggaaacgctggactctttagcagagttttttgaagaccttgcagacaagccatacacgtttgaggactatgatgtctcctttgggagtggtgtcttaactgtcaaactgggtggagatctaggaacctatgtgatcaacaagcagacgccaaacaagcaaatctggctatcttctccatccagtggacctaagcgttatgactggactgggaaaaactgggtgtactcccacgacggcgtgtccctccatgagctgctggccgcagagctcactaaagccttaaaaaccaaactggacttgtcttccttggcctattccggaaaagatgcttgatgcccagccccgttttaaggacattaaaagctatcaggccaagaccccagcttcattatgcagctgaggtctgttttttgttgttgttgttgtttattttttttattcctgcttttgaggacagttgggctatgtgtcacagctctgtagaaagaatgtgttgcctcctaccttgcccccaagttctgatttttaatttctatggaagattttttggattgtcggatttcctccctcacatgataccccttatcttttataatgtcttatgcctatacctgaatataacaacctttaaaaaagcaaaataataagaaggaaaaattccaggagggaaaatgaattgtcttcactcttcattctttgaaggatttactgcaagaagtacatgaagagcagctggtcaacctgctcactgttctatctccaaatgagacacattaaagggtagcctacaaatgttttcaggcttctttcaaagtgtaagcacttctgagctctttagcattgaagtgtcgaaagcaactcacacgggaagatcatttcttatttgtgctctgtgactgccaaggtgtggcctgcactgggttgtccagggagacctagtgctgtttctcccacatattcacatacgtgtctgtgtgtatatatattttttcaatttaaaggttagtatggaatcagctgctacaagaatgcaaaaaatcttccaaagacaagaaaagaggaaaaaaagccgttttcatgagctgagtgatgtagcgtaacaaacaaaatcatggagctgaggaggtgccttgtaaacatgaaggggcagataaaggaaggagatactcatgttgataaagagagccctggtcctagacatagttcagccacaaagtagttgtccctttgtggacaagtttcccaaattccctggacctctgcttccccatctgttaaatgagagaatagagtatggttgattcccagcattcagtggtcctgtcaagcaacctaacaggctagttctaattccctattgggtagatgaggggatgacaaagaacagtttttaagctatataggaaacattgttattggtgttgccctatcgtgatttcagttgaattcatgtgaaaataatagccatccttggcctggcgcggtggctcacacctgtaatcccagcacttttggaggccaaggtgggtggatcacctgaggtcaggagttcaagaccagcctggccaacatgatgaaaccccgtctctactaaaaatacaaaaaattagccgggcatgatggcaggtgcctgtaatcccagctacttgggaggctgaagcggaagaatcgcttgaacccagaggtggaggttgcagtgagccgagatcgtgccattgcactgtaacctgggtgactgagcaaaactctgtctcaaaataataataacaatataataataataa

SEQ ID NO: 2913 - DNA, 633 bp, Artificial Sequence
  derived and/or modified sequence
atgtggaccctgggtcgtcgcgctgtcgccgggctcttggcctccccctcccccgcgcaggcccagaccttgactagagtccctcgcccagcggagcttgcacccctgtgtgggcggcgtggcctgcggacggatatagacgccacctgtacacccaggcgtgccagttctaatcagaggggccttaaccagatttggaacgtgaagaagcagtcagtgtacttgatgaaccttagaaagagtggtacactcggacaccccggatcgttagacgagacaacatacgagaggttggctgaagaaactcttgactctcttgcagaattctttgaagacctggcagacaagccatacactttcgaagactatgatgtgtcttttggaagcggagtgctaactgtcaagctggggggcgacctgggaacctatgtaattaataaacagaccccgaacaaacaaatctggctgagcagtccgtcatccggacccaagcgatacgactggactgggaagaactgggtctacagccacgacggcgtgtccctgcatgagcttcttgccgccgagcttacgaaggcactaaagactaagcttgacctgtcatcgttagcatattctggtaaagacgcctag

SEQ ID NO: 2914 - DNA, 633 bp, Artificial Sequence
  derived and/or modified sequence
atgtggaccctgggccggcgggctgtggccggcctgctggccagccccagccctgcccaggcccagaccctgaccagggtgcccaggcctgctgagctggcccccctgtgtggcagaagaggcctgaggacagacattgatgccacctgcaccccaagaagagccagcagcaaccagaggggcctgaaccagatctggaatgtgaagaagcagagcgtgtacctgatgaacctgaggaagagcggcaccctgggccaccctggcagcctggatgagaccacctatgagcggctggccgaggagaccctggacagcctggccgagttctttgaggacctggccgacaagccctacacctttgaagattatgatgtgtcctttggaagtggagtgctgactgtgaagctgggcggggacctgggcacctacgtgatcaacaagcagacccccaacaagcagatctggctgagcagccccagcagcggccccaagagatatgactggacaggcaagaactgggtgtacagccatgatggagtgtccctgcacgagctgctggccgctgagctgaccaaggccctgaagaccaagctggacctgagcagcctggcctacagcggcaaggatgcctag

SEQ ID NO: 2915 - DNA, 633 bp, Artificial Sequence
  derived and/or modified sequence
atgtggaccctgggccggcgggccgtggccggcctgctggccagccctagccccgcacaagcacaaaccctgactcgggtgcctaggccggccgaacttgcgccattgtgcggcagacgagggctgagaaccgacatagatgccacctgtacaccacgccgagcttccagcaatcagagagggctcaatcagatctggaatgtcaagaagcagagtgtgtacctcatgaatctccgtaaaagcgggacactgggacatcctgggtcactcgatgagacgacctacgagagattagcagaagagaccctggatagcctggccgaattctttgaggatctcgcagataaaccttatacgttcgaggattacgatgtgtcattcggctctggggttctaacagtgaagctaggaggtgacctgggcacctacgtaatcaataaacagacacccaacaaacagatttggctgtcctctccttctagcggacctaagcgatatgattggaccggcaagaattgggtttactctcatgatggcgtgtctctgcatgaactactggctgccgaattaaccaaggcattaaaaactaaactcgatctgtcgtccttagcatacagcgggaaagatgcttag

SEQ ID NO: 2916 - DNA, 633 bp, Artificial Sequence
  derived and/or modified sequence
atgtggactttagggagaagagcagtggccggtctgctcgcgagcccaagcccggctcaggcgcagaccttgacgcgcgttcctcgacctgccgagctcgcaccactttgcggaagacgcggtctgcgaaccgacattgacgctacgtgcacccccagaagggcgagtagcaatcagcggggactcaaccagatctggaatgttaagaaacagagcgtgtatctgatgaatctcagaaagagcggtacactggggcatccgggatccctggatgaaacaacatacgagcgcctggcagaagagaccttggattcactggccgaatttttcgaggacctcgccgacaagccatataccttcgaggactatgatgtctcctttggctccggagtgttgacagttaaattggggggagacttgggaacatatgttattaacaagcagactccaaacaaacagatttggttgtctagccctagctcaggcccaaaaagatatgattggaccggaaaaaattgggtctattcccatgacggcgtgtccctccacgaattgcttgctgccgaacttaccaaagccctgaagacaaagctcgatctttcatctctggcctacagtggaaaagacgcgtag

SEQ ID NO: 2917 - DNA, 633 bp, Artificial Sequence
  derived and/or modified sequence
atgtggaccctgggcagaagagccgtggccggcctgctggccagccccagccccgcccaggcccagaccctgaccagagtgcccagacccgccgagctggcccccctgtgcggcagaagaggcctgagaaccgacatcgacgccacctgcacccccagaagagccagcagcaaccagagaggcctgaaccagatctggaacgtgaagaagcagagcgtgtacctgatgaacctgagaaagagcggcaccctgggccaccccggcagcctggacgagaccacctacgagagactggccgaggagaccctggacagcctggccgagttcttcgaggacctggccgacaagccctacaccttcgaggactacgacgtgagcttcggcagcggcgtgctgaccgtgaagctgggcggcgacctgggcacctacgtgatcaacaagcagacccccaacaagcagatctggctgagcagccccagcagcggccccaagagatacgactggaccggcaagaactgggtgtacagccacgacggcgtgagcctgcacgagctgctggccgccgagctgaccaaggccctgaagaccaagctggacctgagcagcctggcctacagcggcaaggacgcctag

SEQ ID NO: 2918 - protein, 633 aa, Artificial Sequence
  derived and/or modified sequence
MALLLVSLLAFLSLGSGCHHRICHCSNRVFLCQESKVTEIPSDLPRNAIELRFVLTKLRVIQKGAFSGFGDLEKIEISQNDVLEVIEADVFSNLPKLHEIRIEKANNLLYINPEAFQNLPNLQYLLISNTGIKHLPDVHKIHSLQKVLLDIQDNINIHTIERNSFVGLSFESVILWLNKNGIQEIHNCAFNGTQLDELNLSDNNNLEELPNDVFHGASGPVILSELHPICNKSILRQEVDYMTQARGQRSSLAEDNESSYSRGFDMTYTEFDYDLCNEVVDVTCSPKPDAFNPCEDIMGYNILRVLIWFISILAITGNIIVLVILTTSQYKLTVPRFLMCNLAFADLCIGIYLLLIASVDIHTKSQYHNYAIDWQTGAGCDAAGFFTVFASELSVYTLTAITLERWHTITHAMQLDCKVQLRHAASVMVMGWIFAFAAALFPIFGISSYMKVSICLPMDIDSPLSQLYVMSLLVLNVLAFVVICGCYIHIYLTVRNPNIVSSSSDTRIAKRMAMLIFTDFLCMAPISFFAISASLKVPLITVSKAKILLVLFHPINSCANPFLYAIFTKNFRRDFFILLSKCGCYEMQAQIYRTETSSTVHNTHPRNGHCSSAPRVTSGSTYILVPLSHLAQN

SEQ ID NO: 2919 - protein, 695 aa, Artificial Sequence
  derived and/or modified sequence
MALLLVSLLAFLSLGSGCHHRICHCSNRVFLCQESKVTEIPSDLPRNAIELRFVLTKLRVIQKGAFSGFGDLEKIEISQNDVLEVIEADVFSNLPKLHEIRIEKANNLLYINPEAFQNLPNLQYLLISNTGIKHLPDVHKIHSLQKVLLDIQDNINIHTIERNSFVGLSFESVILWLNKNGIQEIHNCAFNGTQLDELNLSDNNNLEELPNDVFHGASGPVILDISRTRIHSLPSYGLENLKKLRARSTYNLKKLPTLEKLVALMEASLTYPSHCCAFANWRRQISELHPICNKSILRQEVDYMTQARGQRSSLAEDNESSYSRGFDMTYTEFDYDLCNEVVDVTCSPKPDAFNPCEDIMGYNILRVLIWFISILAITGNIIVLVILTTSQYKLTVPRFLMCNLAFADLCIGIYLLLIASVDIHTKSQYHNYAIDWQTGAGCDAAGFFTVFASELSVYTLTAITLERWHTITHAMQLDCKVQLRHAASVMVMGWIFAFAAALFPIFGISSYMKVSICLPMDIDSPLSQLYVMSLLVLNVLAFVVICGCYIHIYLTVRNPNIVSSSSDTRIAKRMAMLIFTDFLCMAPISFFAISASLKVPLITVSKAKILLVLFHPINSCANPFLYAIFTKNFRRDFFILLSKCGCYEMQAQIYRTETSSTVHNTHPRNGHCSSAPRVTSGSTYILVPLSHLAQN

SEQ ID NO: 2920 - DNA, 2784 bp, Artificial Sequence
  derived and/or modified sequence
tgaccctaccagttctcaagtcagatctcttctcataagggcactgtgtggagcttctgagatctgtggaggtttttctctgcaaatgcaggaagaaatcaggtggatggatgcataattatggccctgctcctggtctctttgctggcattcctgagcttgggctcaggatgtcatcatcggatctgtcactgctctaacagggtttttctctgccaagagagcaaggtgacagagattccttctgacctcccgaggaatgccattgaactgaggtttgtcctcaccaagcttcgagtcatccaaaaaggtgcattttcaggatttggggacctggagaaaatagagatctctcagaatgatgtcttggaggtgatagaggcagatgtgttctccaaccttcccaaattacatgaaattagaattgaaaaggccaacaacctgctctacatcaaccctgaggccttccagaaccttcccaaccttcaatatctgttaatatccaacacaggtattaagcaccttccagatgttcacaagattcattctctccaaaaagttttacttgacattcaagataacataaacatccacacaattgaaagaaattctttcgtggggctgagctttgaaagtgtgattctatggctgaataagaatgggattcaagaaatacacaactgtgcattcaatggaacccaactagatgagctgaatctaagcgataataataatttagaagaattgcctaatgatgttttccacggagcctctggaccagtcattctagatatttcaagaacaaggatccattccctgcctagctatggcttagaaaatcttaagaagctgagggccaggtcgacttacaacttaaaaaagctgcctactctggaaaagcttgtcgccctcatggaagccagcctcacctatcccagccattgctgtgcctttgcaaactggagacggcaaatctctgagcttcatccaatttgcaacaaatctattttaaggcaagaagttgattatatgactcaggctaggggtcagagatcctctctggcagaagacaatgagtccagctacagcagaggatttgacatgacgtacactgagtttgactatgacttatgcaatgaagtggttgacgtgacctgctcccctaagccagatgcattcaacccatgtgaagatatcatggggtacaacatcctcagagtcctgatatggtttatcagcatcctggccatcactgggaacatcatagtgctagtgatcctaactaccagccaatataaactcacagtccccaggttccttatgtgcaacctggcctttgctgatctctgcattggaatctacctgctgctcattgcatcagttgatatccataccaagagccaatatcacaactatgccattgactggcaaactggggcaggctgtgatgctgctggctttttcactgtctttgccagtgagctgtcagtctacactctgacagctatcaccttggaaagatggcataccatcacgcatgccatgcagctggactgcaaggtgcagctccgccatgctgccagtgtcatggtgatgggctggatttttgcttttgcagctgccctctttcccatctttggcatcagcagctacatgaaggtgagcatctgcctgcccatggatattgacagccctttgtcacagctgtatgtcatgtccctccttgtgctcaatgtcctggcctttgtggtcatctgtggctgctatatccacatctacctcacagtgcggaaccccaacatcgtgtcctcctctagtgacaccaggatcgccaagcgcatggccatgctcatcttcactgacttcctctgcatggcacccatttctttctttgccatttctgcctccctcaaggtgcccctcatcactgtgtccaaagcaaagattctgctggttctgtttcaccccatcaactcctgtgccaaccccttcctctatgccatctttaccaaaaactttcgcagagatttcttcattctgctgagcaagtgtggctgctatgaaatgcaagcccaaatttataggacagaaacttcatccactgtccacaacacccatccaaggaatggccactgctcttcagctcccagagtcaccagtggttccacttacatacttgtccctctaagtcatttagcccaaaactaaaacacaatgtgaaaatgtatctgagtattgaatgataattcagtcttgcctttgaagggtatgtcacaaagagctgacagtgcttctacacatttcatctaatttaatattcctggcatacctttaaggtaaattggtcaggaactattaattccatgtgatacattaggaagctgaattattagtaacaacaataataattaaagaatgcaatactgtattacatattttatccttatatatgttatttttgcacgttatgttcaaagtgcttttgttcagatatctcaagtgatccctgttaaataagcaggacagggattattcttggagttttacaaatgaggaaaccacgactcaaagagttaagtgacttgttcaaaattgtttagtttgtaagaggcagagccaggattaggtattccgactcccagagaatttcccagagaagcaccatggtattcattcattcattcattcaacaaatattaattgaacacccatctgaagcctttgtaatgcgtcagtgtggataggctgaaatacatttcccagatttcccttcctcatgtgttt

SEQ ID NO: 2921 - DNA, 1867 bp, Artificial Sequence
  derived and/or modified sequence
agttaaatatgagagttaaatacttctagttttgaaaatgtgagatcgaaaaggcaagaaaccaggctttcctactgtctcacataatttcttacacaaaatcattttacagagagaaactgagactctgaaaaggttaatatccaacacaggtattaagcaccttccagatgttcacaagattcattctctccaaaaagttttacttgacattcaagataacataaacatccacacaattgaaagaaattctttcgtggggctgagctttgaaagtgtgattctatggctgaataagaatgggattcaagaaatacacaactgtgcattcaatggaacccaactagatgagctgaatctaagcgataataataatttagaagaattgcctaatgatgttttccacggagcctctggaccagtcattctagatatttcaagaacaaggatccattccctgcctagctatggcttagaaaatcttaagaagctgagggccaggtcgacttacaacttaaaaaagctgcctactctggaaaagcttgtcgccctcatggaagccagcctcacctatcccagccattgctgtgcctttgcaaactggagacggcaaatctctgagcttcatccaatttgcaacaaatctattttaaggcaagaagttgattatatgactcaggctaggggtcagagatcctctctggcagaagacaatgagtccagctacagcagaggatttgacatgacgtacactgagtttgactatgacttatgcaatgaagtggttgacgtgacctgctcccctaagccagatgcattcaacccatgtgaagatatcatggggtacaacatcctcagagtcctgatatggtttatcagcatcctggccatcactgggaacatcatagtgctagtgatcctaactaccagccaatataaactcacagtccccaggttccttatgtgcaacctggcctttgctgatctctgcattggaatctacctgctgctcattgcatcagttgatatccataccaagagccaatatcacaactatgccattgactggcaaactggggcaggctgtgatgctgctggctttttcactgtctttgccagtgagctgtcagtctacactctgacagctatcaccttggaaagatggcataccatcacgcatgccatgcagctggactgcaaggtgcagctccgccatgctgccagtgtcatggtgatgggctggatttttgcttttgcagctgccctctttcccatctttggcatcagcagctacatgaaggtgagcatctgcctgcccatggatattgacagccctttgtcacagctgtatgtcatgtccctccttgtgctcaatgtcctggcctttgtggtcatctgtggctgctatatccacatctacctcacagtgcggaaccccaacatcgtgtcctcctctagtgacaccaggatcgccaagcgcatggccatgctcatcttcactgacttcctctgcatggcacccatttctttctttgccatttctgcctccctcaaggtgcccctcatcactgtgtccaaagcaaagattctgctggttctgtttcaccccatcaactcctgtgccaaccccttcctctatgccatctttaccaaaaactttcgcagagatttcttcattctgctgagcaagtgtggctgctatgaaatgcaagcccaaatttataggacagaaacttcatccactgtccacaacacccatccaaggaatggccactgctcttcagctcccagagtcaccagtggttccacttacatacttgtccctctaagtcatttagcccaaaactaaaacacaatgtgaaaatgt

SEQ ID NO: 2922 - DNA, 2088 bp, Artificial Sequence
  derived and/or modified sequence
atggctctcctgctggtatcccttttggcttttctttccctgggtagcggctgccaccacagaatatgccattgctccaacagggtgttcctgtgtcaggagtcaaaagtgacggagattccttctgatctgccgagaaatgccatcgaactgcgcttcgttcttacgaagctgcgcgtcattcagaaaggagcatttagcgggtttggagaccttgagaagatcgagatctcccagaatgatgtgctggaggtcattgaagctgacgtattcagcaatctcccaaagctacatgagatccgaatcgagaaagcaaacaatctcctgtacatcaaccctgaagcatttcagaacctgccaaacctccaatatctattaatttcaaataccggtattaagcatttgccagatgttcacaaaattcatagcttgcaaaaagtgttattggacatacaggataacataaatatccacactattgagcgaaattcatttgtcggtctctcttttgagagcgtcatcttgtggttaaataagaatggtatccaggagattcacaattgcgcttttaacggaactcagttggacgagcttaatttaagcgataacaataatctggaggaactgccaaatgatgtctttcatggcgcttcggggcccgtaatcctcgacatttctagaactagaattcactctctcccttcttatggactagagaatctaaagaaactgcgcgctcgaagcacgtacaatctcaaaaaactcccaaccctcgaaaagctcgttgcattaatggaggcttcactgacatacccctcccactgctgtgcctttgcgaactggcgtcggcagatctcagaactccaccccatttgtaacaagagcattctgaggcaagaggtcgactatatgacacaggccaggggtcagcgaagctctcttgccgaagacaacgagagttcatactctaggggctttgatatgacctacacagagttcgattatgacctttgtaatgaggtggttgatgtgacctgctccccaaaaccagacgccttcaatccctgtgaggacataatgggctataacatactcagggttctgatatggtttatttccattctcgcgataactgggaacataatcgtcctggtaatccttacaaccagccagtataagctcactgtgcctcgattcctcatgtgcaaccttgctttcgctgatctctgcatcgggatctacctcctgctcatagctagcgtcgatattcacacaaagtcccagtaccataattacgctatcgactggcagactggcgctggatgcgatgctgctggtttcttcactgtgttcgctagtgaacttagcgtctacacactgacggccatcaccctggaaagatggcacacaatcacccatgcaatgcagttggactgtaaggtgcagttgcggcatgccgcctccgtcatggtgatggggtggatcttcgctttcgccgcggccctcttccctatcttcggcataagctcgtatatgaaggtttcaatctgtcttcccatggatattgacagtccactgtctcagctgtatgtaatgtctctccttgtgctgaatgtgttggcatttgttgtgatctgcggttgttacatccacatatatttgaccgtcaggaacccaaatatcgtttccagctctagtgacaccaggattgctaagcgcatggcgatgctgattttcacggattttttatgcatggccccgataagctttttcgcgatcagcgccagcctgaaagtgccactcattaccgtttcaaaagctaaaatcttactggtgctctttcatcctatcaattcatgtgctaacccctttctctacgccatcttcaccaagaacttccgaagagatttcttcatcctcctgagcaaatgtggctgttacgagatgcaagcccagatttacagaacggagaccagttccactgtgcacaatacacacccccgcaatggacattgttctagcgctccccgggtgacttccggctccacttacatcctcgtccctttgtcacacttagcgcagaactag

SEQ ID NO: 2923 - DNA, 2088 bp, Artificial Sequence
  derived and/or modified sequence
atggccctgctgctggtgtccctgctggccttcctgagcctgggcagcggctgccaccaccgcatctgccactgcagcaacagagtcttcctgtgccaggagagcaaggtgacagagatccccagcgacctgcccagaaatgccatcgagctgcgctttgtgctgaccaagctgcgggtcatccagaagggggccttcagcggctttggagacctggagaagattgagatcagccagaatgatgtgctggaggtgattgaagcagatgtgttcagcaacctgcccaagctgcacgagatccgcatcgagaaggccaacaacctgctgtacatcaaccctgaggccttccagaacctgcccaacctgcagtacctgctgatcagcaacacaggcatcaagcacctgcctgatgtgcacaagatccacagcctgcagaaggtgctgctggacatccaggacaacatcaacatccacaccatcgagaggaacagctttgtgggcctgagctttgagagcgtcatcctgtggctgaacaagaatggcatccaggagatccacaactgtgccttcaacggcacccagctggatgagctgaacctgagtgacaacaacaacctggaggagctgcccaatgatgtgttccatggagccagcggccctgtgatcctggacatcagcaggacccgcatccacagcctgcccagctatggcctggagaacctgaagaagctgcgggcccggagcacctacaacctgaagaagctgcccaccctggagaagctggtggccctgatggaggccagcctgacctaccccagccactgctgtgcctttgccaactggaggcggcagatcagcgagctgcaccccatctgcaacaagagcatcctgcggcaggaggtggactacatgacccaggcccggggccagaggagcagcctggccgaggacaatgaaagcagctacagccggggctttgacatgacctacacagaatttgattatgacctgtgcaatgaggtggtggatgtgacctgcagccccaagccagatgccttcaacccctgtgaggacatcatgggctacaacatcctgcgggtgctgatctggttcatcagcatcctggccatcaccggcaacatcatcgtgctggtgatcctgaccaccagccagtacaagctgactgtgccccgcttcctgatgtgcaacctggcctttgctgacctgtgcatcggcatctacctgctgctgattgcctctgtggacatccacaccaagagccagtaccacaactatgccatcgactggcagacaggagctggctgtgatgctgctggcttcttcaccgtgtttgccagcgagctgtctgtgtacaccctgacagccatcaccctggagcgctggcacaccatcacccacgccatgcagctggactgcaaggtgcagctgcggcatgctgcctctgtgatggtgatgggctggatctttgcctttgctgctgccctcttccccatcttcggcatcagcagctacatgaaggtgtccatctgcctgcccatggacatcgacagccccctgagccagctgtatgtgatgagcctgctggtgctgaatgtgctggcctttgtggtgatctgtggctgctacatccacatctacctgactgtgaggaaccccaacatcgtgagcagcagcagtgacacccgcatcgccaagaggatggccatgctgatcttcacagacttcctgtgcatggcccccatctccttctttgccatcagcgccagcctgaaggtgcccctcatcaccgtgtccaaggccaagatcctgctggtgctcttccaccccatcaacagctgtgccaaccccttcctgtatgccatcttcaccaagaacttccggcgggacttcttcatcctgctgagcaaatgtggctgctatgagatgcaggcccagatctacagaacagagaccagcagcacagtgcacaacacccaccccagaaatggccactgcagcagcgccccccgggtgaccagcggcagcacctacatcctggtgcccctgagccacctggcccagaactag

SEQ ID NO: 2924 - DNA, 2088 bp, Artificial Sequence
  derived and/or modified sequence
atggccctgctgctggtgagcctgctggccttcctgagcctgggcagtggttgccaccatcgcatctgtcactgttcgaacagggtctttctttgccaggaatcgaaggtgactgagatcccttcagacctgccaagaaacgctattgaacttaggttcgtactgactaaactgcgagttatccagaaaggtgccttctcaggatttggtgacctagagaaaattgaaatctcgcaaaatgacgttttggaggtgatagaggcagatgtgtttagcaatcttcccaaacttcacgagatccgtatagagaaagcaaacaatctgctctacattaacccagaggcatttcagaacctgcctaatttgcagtatctcctgatcagtaatacgggtattaagcacctgccagatgtgcacaaaatccactccctgcagaaggtcctgctggacattcaagacaacattaatatccacaccatcgaaagaaactcatttgtaggcttgtccttcgagagtgtgatcttatggctcaacaaaaacggaatccaggagatacacaactgcgctttcaacggaacacagctggacgaattgaacctgtccgataataataacctggaggaattgcccaacgatgtgttccatggcgccagcgggcccgttatcctcgatattagtagaacgcggatccattccctgcctagttatggactggagaacctgaagaagttgagggcacgaagcacctacaacttgaagaagctgcctactttagagaaactagttgcgctgatggaagcaagcttgacttatccgtctcattgttgtgcttttgctaattggagacggcaaatcagtgagctgcatccaatttgtaacaagagtatcttgagacaagaagttgactacatgacccaggctagggggcagcgttcgtcactggctgaggataacgagagctcatatagtcgcggctttgacatgacatatacggaatttgactacgatctctgtaacgaggtggtagacgtaacttgcagcccaaagccggacgcctttaatccctgtgaagatatcatgggctataacattctccgagtgctgatttggtttattagcattctcgcaatcacaggtaacattattgtcctggtaatcctgactacctctcaatacaaactgaccgtgcctcgcttcctaatgtgcaacttggcttttgccgacctctgtataggtatttacttactccttattgctagtgtagacattcatactaaatcgcaatatcataactacgccatagactggcagaccggggctggctgtgatgctgcaggtttttttacggtctttgcttctgagctctccgtatacacacttactgcgatcactcttgagcggtggcacaccataacacatgcaatgcaactagactgcaaagttcagcttaggcatgccgcttccgtcatggtgatgggctggatcttcgctttcgccgccgcgttattcccaatcttcggcatctctagctatatgaaggtgagcatttgtttgcccatggacatcgactctccactttcacaactttatgtgatgtctcttctagttctgaatgtgctggcgtttgtggttatctgcgggtgttacatccacatttacttgacagtacggaatccaaacatcgtgagctcttcttctgataccaggatcgctaaacgtatggcgatgctcattttcacagacttcctgtgtatggcacctatcagtttttttgccatcagtgcgagcttgaaagtaccactcattacagtgtccaaggcgaagattctgctggtgctgttccaccccatcaattcgtgtgccaatccattcctgtatgccatcttcacgaaaaattttcgaagagacttctttatactgcttagcaagtgtggatgctatgagatgcaggcccagatatataggactgagacatcgtctacagtacacaacacccaccctcggaacggccactgttcctccgctcctcgggttacttctggctctacatacattctcgtccctctgagccatctggcccagaattag

SEQ ID NO: 2925 - DNA, 2088 bp, Artificial Sequence
  derived and/or modified sequence
atggctcttctgctggtcagtcttctggcattcctttctctcggatcaggttgtcaccaccgcatctgccactgttccaaccgcgttttcctttgtcaggaaagtaaagtcactgaaattccctccgatctacccagaaatgcaatagagctgcgcttcgtgctgacgaaattgcgggtcattcagaagggggctttctccggctttggggatctggaaaaaattgaaatctcccagaacgatgtcctcgaagtgattgaagccgacgttttcagcaatttgccaaagctccacgaaataaggattgaaaaagctaacaatttgctgtacatcaacccagaggcattccaaaacctcccaaatctgcagtaccttttaataagtaacaccggcattaaacacctacctgacgtgcataagatccactctctacagaaggtgctgcttgatattcaagacaatataaatatccacacaattgagcgcaattctttcgtaggtctctctttcgaaagcgttattctgtggctgaataaaaatggaattcaagagatccataactgcgcatttaatggtacacagttggatgaactgaacttgtcagacaataataatctggaggaacttccgaacgatgtcttccatggagcttctgggccagttatcctcgacatctcccggacccgcattcattcccttccttcttacggcttagagaacctgaagaagctcagagcacgatcaacctataaccttaagaaactaccaaccctggagaagctagtggctcttatggaagcttctctcacatatccatcacattgttgcgcttttgccaactggaggcgccagatctccgagttacaccctatttgtaacaaaagcattctgaggcaagaggtggattacatgactcaagcgcgtgggcagaggtcttccttagccgaagacaatgaatcatcctactcccgcggttttgatatgacatacacagagtttgactacgatttatgtaatgaggtggtggatgtgacttgcagtcccaagcctgacgcgttcaatccctgtgaagacatcatgggatacaacatcttacgcgttctgatttggtttattagcatccttgcaataaccggcaacattatagtcctcgtgatcttgaccactagccaatacaagctgaccgtacctcgcttcctgatgtgcaaccttgcatttgccgacctgtgtattggaatttacctgctgttgatcgcgagtgtagatatccatacaaaatcacagtaccacaactacgcgattgattggcagacaggcgctggctgcgatgccgctggattcttcaccgtgtttgcttccgagctcagtgtctacaccctgactgctattacgctggaacggtggcacaccatcactcacgcaatgcagttagactgtaaagtgcaactgcggcacgcggcttccgtgatggtgatgggctggatctttgctttcgctgcggctctcttcccaatctttgggatctctagctatatgaaagtctccatttgtctgcctatggacatagacagcccgctgtcgcagttatatgtgatgagcctgctagtgctgaacgtactcgcattcgtggtgatatgtgggtgttatatccacatctacctgaccgtccgaaatcccaacattgtctcctcaagttccgatacacggattgcaaaaagaatggccatgctgattttcactgactttctatgtatggcgcctatatccttcttcgccattagtgctagcctgaaggtcccgctcatcaccgtgagcaaagctaaaatcttgttagtgttatttcatcctatcaactcttgcgcaaaccctttcttgtatgctatattcaccaaaaactttcgtcgagatttcttcatcctgctttctaagtgtggctgttatgagatgcaagctcaaatctaccgcaccgaaacaagctcgaccgtccataatacacatccgaggaatggccactgttcctctgcccctcgggtgacaagcgggagtacttacatacttgtgcctctctcccatctcgctcaaaactag

SEQ ID NO: 2926 - DNA, 2088 bp, Artificial Sequence
  derived and/or modified sequence
atggccctgctgctggtgagcctgctggccttcctgagcctgggcagcggctgccaccacagaatctgccactgcagcaacagagtgttcctgtgccaggagagcaaggtgaccgagatccccagcgacctgcccagaaacgccatcgagctgagattcgtgctgaccaagctgagagtgatccagaagggcgccttcagcggcttcggcgacctggagaagatcgagatcagccagaacgacgtgctggaggtgatcgaggccgacgtgttcagcaacctgcccaagctgcacgagatcagaatcgagaaggccaacaacctgctgtacatcaaccccgaggccttccagaacctgcccaacctgcagtacctgctgatcagcaacaccggcatcaagcacctgcccgacgtgcacaagatccacagcctgcagaaggtgctgctggacatccaggacaacatcaacatccacaccatcgagagaaacagcttcgtgggcctgagcttcgagagcgtgatcctgtggctgaacaagaacggcatccaggagatccacaactgcgccttcaacggcacccagctggacgagctgaacctgagcgacaacaacaacctggaggagctgcccaacgacgtgttccacggcgccagcggccccgtgatcctggacatcagcagaaccagaatccacagcctgcccagctacggcctggagaacctgaagaagctgagagccagaagcacctacaacctgaagaagctgcccaccctggagaagctggtggccctgatggaggccagcctgacctaccccagccactgctgcgccttcgccaactggagaagacagatcagcgagctgcaccccatctgcaacaagagcatcctgagacaggaggtggactacatgacccaggccagaggccagagaagcagcctggccgaggacaacgagagcagctacagcagaggcttcgacatgacctacaccgagttcgactacgacctgtgcaacgaggtggtggacgtgacctgcagccccaagcccgacgccttcaacccctgcgaggacatcatgggctacaacatcctgagagtgctgatctggttcatcagcatcctggccatcaccggcaacatcatcgtgctggtgatcctgaccaccagccagtacaagctgaccgtgcccagattcctgatgtgcaacctggccttcgccgacctgtgcatcggcatctacctgctgctgatcgccagcgtggacatccacaccaagagccagtaccacaactacgccatcgactggcagaccggcgccggctgcgacgccgccggcttcttcaccgtgttcgccagcgagctgagcgtgtacaccctgaccgccatcaccctggagagatggcacaccatcacccacgccatgcagctggactgcaaggtgcagctgagacacgccgccagcgtgatggtgatgggctggatcttcgccttcgccgccgccctgttccccatcttcggcatcagcagctacatgaaggtgagcatctgcctgcccatggacatcgacagccccctgagccagctgtacgtgatgagcctgctggtgctgaacgtgctggccttcgtggtgatctgcggctgctacatccacatctacctgaccgtgagaaaccccaacatcgtgagcagcagcagcgacaccagaatcgccaagagaatggccatgctgatcttcaccgacttcctgtgcatggcccccatcagcttcttcgccatcagcgccagcctgaaggtgcccctgatcaccgtgagcaaggccaagatcctgctggtgctgttccaccccatcaacagctgcgccaaccccttcctgtacgccatcttcaccaagaacttcagaagagacttcttcatcctgctgagcaagtgcggctgctacgagatgcaggcccagatctacagaaccgagaccagcagcaccgtgcacaacacccaccccagaaacggccactgcagcagcgcccccagagtgaccagcggcagcacctacatcctggtgcccctgagccacctggcccagaactag

SEQ ID NO: 2927 - protein, 175 aa, Artificial Sequence
  derived and/or modified sequence
MSSQIRQNYSTDVEAAVNSLVNLYLQASYTYLSLGFYFDRDDVALEGVSHFFRELAEEKREGYERLLKMQNQRGGRALFQDIKKPAEDEWGKTPDAMKAAMALEKKLNQALLDLHALGSARTDPHLCDFLETHFLDEEVKLIKKMGDHLTNLHRLGGPEAGLGEYLFERLTLKHD

SEQ ID NO: 2928 - protein, 190 aa, Artificial Sequence
  derived and/or modified sequence
MSSQIRQNYSTDVEAAVNSLVNLYLQASYTYLSLGFYFDRDDVALEGVSHFFRELAEEKREGYERLLKMQNQRGGRALFQDIKKPAEDEWGKTPDAMKAAMALEKKLNQALLDLHALGSARTDPHLCDFLETHFLDEEVKLIKKMGDHLTNLHRLGGPEAGLGEYLSKGSLSSTTKSLLSPATSEGPLAK

SEQ ID NO: 2929 - DNA, 870 bp, Artificial Sequence
  derived and/or modified sequence
gcagttcggcggtcccgcgggtctgtctcttgcttcaacagtgtttggacggaacagatccggggactctcttccagcctccgaccgccctccgatttcctctccgcttgcaacctccgggaccatcttctcggccatctcctgcttctgggacctgccagcaccgtttttgtggttagctccttcttgccaaccaaccatgagctcccagattcgtcagaattattccaccgacgtggaggcagccgtcaacagcctggtcaatttgtacctgcaggcctcctacacctacctctctctgggcttctatttcgaccgcgatgatgtggctctggaaggcgtgagccacttcttccgcgaattggccgaggagaagcgcgagggctacgagcgtctcctgaagatgcaaaaccagcgtggcggccgcgctctcttccaggacatcaagaagccagctgaagatgagtggggtaaaaccccagacgccatgaaagctgccatggccctggagaaaaagctgaaccaggcccttttggatcttcatgccctgggttctgcccgcacggacccccatctctgtgacttcctggagactcacttcctagatgaggaagtgaagcttatcaagaagatgggtgaccacctgaccaacctccacaggctgggtggcccggaggctgggctgggcgagtatctcttcgaaaggctcactctcaagcacgactaagagccttctgagcccagcgacttctgaagggccccttgcaaagtaatagggcttctgcctaagcctctccctccagccaataggcagctttcttaactatcctaacaagccttggaccaaatggaaataaagctttttgatgc

SEQ ID NO: 2930 - DNA, 573 bp, Artificial Sequence
  derived and/or modified sequence
atgagctcccagattcgtcagaattattccaccgacgtggaggcagccgtcaacagcctggtcaatttgtacctgcaggcctcctacacctacctctctctgggcttctatttcgaccgcgatgatgtggctctggaaggcgtgagccacttcttccgcgaattggccgaggagaagcgcgagggctacgagcgtctcctgaagatgcaaaaccagcgtggcggccgcgctctcttccaggacatcaagaagccagctgaagatgagtggggtaaaaccccagacgccatgaaagctgccatggccctggagaaaaagctgaaccaggcccttttggatcttcatgccctgggttctgcccgcacggacccccatctctgtgacttcctggagactcacttcctagatgaggaagtgaagcttatcaagaagatgggtgaccacctgaccaacctccacaggctgggtggcccggaggctgggctgggcgagtatctctcgaaaggctcactctcaagcacgactaagagccttctgagcccagcgacttctgaagggccccttgcaaagtaa

SEQ ID NO: 2931 - DNA, 528 bp, Artificial Sequence
  derived and/or modified sequence
atgtcttcacaaattcggcagaattactctactgacgttgaggctgcagtcaacagcttggtcaacctgtacctgcaggctagctacacatatctgtctctaggtttttacttcgacagggatgatgtcgccttggaaggcgttagccatttttttagggagttagccgaggaaaagagagagggatatgagaggctgctgaagatgcagaatcagaggggagggcgggctctcttccaggacattaagaaaccagctgaagacgagtgggggaaaactcccgacgccatgaaggctgcaatggccctggagaagaagttgaaccaagccctcctggacctccacgctcttgggtccgccaggactgacccacatctgtgcgacttcctggagacccacttcctcgatgaagaggtcaagcttatcaagaaaatgggggatcacctcaccaatcttcatcgactgggaggccctgaagcgggtctcggcgaatatctgtttgagcggttaacattgaagcacgattag

SEQ ID NO: 2932 - DNA, 573 bp, Artificial Sequence
  derived and/or modified sequence
atgagctcgcagatccggcagaactattcaacagatgtggaagcggccgtcaactccctggtcaacctgtacctgcaagcttcttacacctatctgtccctgggtttctatttcgacagggacgacgtcgctttggagggcgttagccacttcttcagagagctcgcagaggaaaagagggaggggtacgagagacttttaaaaatgcagaaccaaaggggggggagagctctctttcaggatatcaagaaacccgcggaggatgagtggggcaagactcccgatgctatgaaggcagctatggccctggagaagaagctcaatcaggctctgctggatttacatgccctgggctcagctcgaacggacccccacttgtgtgatttcttagaaactcacttcctggacgaggaggtcaagctcatcaaaaaaatgggagatcatttgaccaacttgcaccgactcggaggaccagaagctggattgggagagtatctctccaagggttccctgagttcgaccacaaagtctttattatcacccgccacttccgaaggcccacttgcgaagtag

SEQ ID NO: 2933 - DNA, 528 bp, Artificial Sequence
  derived and/or modified sequence
atgagcagccagatccggcagaactacagcacagatgtggaggccgctgtgaacagcctggtgaacctgtacctgcaggccagctacacctacctgagcctgggcttctactttgacagagatgatgtggccctggagggcgtgagccacttcttccgggagctggccgaggagaagcgggagggctatgagcggctgctgaagatgcagaaccagaggggcggccgggccctcttccaggacatcaagaagccagcagaagatgagtggggcaagaccccagatgccatgaaggccgccatggccctggagaagaagctgaaccaggccctgctggacctgcacgccctgggcagcgccaggacagacccccacctgtgtgacttcctggagacccacttcctggatgaggaggtgaagctgatcaagaagatgggagaccacctgaccaacctgcaccggctgggcggccctgaggccggcctgggggagtacctgtttgagcggctgaccctgaagcatgactag

SEQ ID NO: 2934 - DNA, 573 bp, Artificial Sequence
  derived and/or modified sequence
atgagcagccagatccggcagaactacagcacagatgtggaggccgctgtgaacagcctggtgaacctgtacctgcaggccagctacacctacctgagcctgggcttctactttgacagagatgatgtggccctggagggcgtgagccacttcttccgggagctggccgaggagaagcgggagggctatgagcggctgctgaagatgcagaaccagaggggcggccgggccctcttccaggacatcaagaagccagcagaagatgagtggggcaagaccccagatgccatgaaggccgccatggccctggagaagaagctgaaccaggccctgctggacctgcacgccctgggcagcgccaggacagacccccacctgtgtgacttcctggagacccacttcctggatgaggaggtgaagctgatcaagaagatgggagaccacctgaccaacctgcaccggctgggcggccctgaggccggcctgggggagtacctgagcaagggcagcctgagcagcaccaccaagagcctgctgagccctgccaccagcgagggccccctggccaagtag

SEQ ID NO: 2935 - DNA, 528 bp, Artificial Sequence
  derived and/or modified sequence
atgagcagccagatccggcagaactacagcaccgacgtggaggccgccgtcaacagcttggttaatctgtatctgcaagcctcttacacttatttatcactggggttttacttcgaccgagacgacgtggctctcgagggagttagccacttctttcgcgagctggccgaggagaagagggaaggatacgaaaggttgctgaagatgcaaaatcagcggggagggcgtgcgttatttcaggacatcaaaaagcccgcagaggacgaatggggcaagacccccgacgccatgaaggccgcgatggctctggagaagaagctgaaccaggcgctactcgatctccacgcactgggatcggccaggaccgacccacacctttgtgacttcctcgaaacacatttcttggatgaagaggtgaagctgatcaaaaaaatgggagatcatttgaccaacctgcatcggctcgggggacccgaggctggactcggggagtatctgttcgagcgcctcactcttaaacatgattag

SEQ ID NO: 2936 - DNA, 573 bp, Artificial Sequence
  derived and/or modified sequence
atgagcagccagatccggcagaactacagcaccgacgtggaggccgccgtaaactcactcgtcaacctttatctccaggccagctacacttatctctccctcggattctattttgatagggacgacgttgcactcgagggagtaagtcatttctttcgagaactggcggaggaaaagagggagggatacgagcggctccttaagatgcagaatcagagaggcgggcgcgctctgttccaagacatcaagaagccagctgaggacgaatggggaaagaccccagatgctatgaaagcagcaatggccttggaaaagaaactgaatcaggcgctgcttgacctgcacgcactcggtagtgcccgcacagacccacatctttgtgactttctggaaacgcactttctcgacgaggaagtgaagcttattaagaaaatgggcgaccatcttacaaacctgcaccgcctgggggggcctgaagccggccttggggaatatctgtctaagggaagccttagctctactacaaaaagcctgctatcacccgccactagtgagggaccccttgcaaagtag

SEQ ID NO: 2937 - DNA, 528 bp, Artificial Sequence
  derived and/or modified sequence
atgtccagtcagatccggcaaaactactctacagacgtcgaagcagccgtgaattcactagtgaatctgtacctgcaggcgtcatacacctatctgagtctggggttttatttcgacagggatgacgtcgccttggagggagtgagccatttcttcagggaactagctgaagaaaagcgcgaaggctatgaaagactcctcaaaatgcagaaccaaaggggtggacgtgcgctgttccaggacatcaaaaagccagcggaagatgagtggggcaaaacacctgacgcaatgaaagccgctatggctctcgagaagaagttgaatcaggctctcctcgatcttcacgccttagggagcgctagaactgatccacatctctgcgatttcttagagacccacttcctagacgaagaggtaaagctgatcaagaagatgggggaccacttgactaatctccaccgcctcggagggcctgaggctggattgggcgagtatcttttcgagaggctaacgctgaaacacgactag

SEQ ID NO: 2938 - DNA, 573 bp, Artificial Sequence
  derived and/or modified sequence
atgtcctcacagataaggcaaaactacagtacggatgtggaggctgctgtaaattccctcgtgaatctctatttacaggcctcctacacctacttatcacttggcttctattttgatcgagacgatgtcgccctggagggggttagccatttcttcagagaactggcggaggagaagcgtgaaggatatgagcgcctgctgaagatgcagaaccaaaggggcggacgagccctgtttcaggatatcaaaaagcccgctgaggacgagtgggggaaaacaccagacgctatgaaagctgctatggccctggaaaagaagttaaaccaggctctcctggaccttcacgccctggggtctgccaggactgatcctcatctgtgcgactttctcgagacacactttcttgatgaggaggtcaaattaatcaaaaagatgggcgaccacctgaccaacctgcaccgacttggcggaccggaggccggactgggagaatacctctctaagggctctctgagcagcacaaccaagtcccttctttctcccgcaaccagcgaagggccattagccaagtag

SEQ ID NO: 2939 - DNA, 528 bp, Artificial Sequence
  derived and/or modified sequence
atgagcagccagatcagacagaactacagcaccgacgtggaggccgccgtgaacagcctggtgaacctgtacctgcaggccagctacacctacctgagcctgggcttctacttcgacagagacgacgtggccctggagggcgtgagccacttcttcagagagctggccgaggagaagagagagggctacgagagactgctgaagatgcagaaccagagaggcggcagagccctgttccaggacatcaagaagcccgccgaggacgagtggggcaagacccccgacgccatgaaggccgccatggccctggagaagaagctgaaccaggccctgctggacctgcacgccctgggcagcgccagaaccgacccccacctgtgcgacttcctggagacccacttcctggacgaggaggtgaagctgatcaagaagatgggcgaccacctgaccaacctgcacagactgggcggccccgaggccggcctgggcgagtacctgttcgagagactgaccctgaagcacgactag

SEQ ID NO: 2940 - DNA, 573 bp, Artificial Sequence
  derived and/or modified sequence
atgagcagccagatcagacagaactacagcaccgacgtggaggccgccgtgaacagcctggtgaacctgtacctgcaggccagctacacctacctgagcctgggcttctacttcgacagagacgacgtggccctggagggcgtgagccacttcttcagagagctggccgaggagaagagagagggctacgagagactgctgaagatgcagaaccagagaggcggcagagccctgttccaggacatcaagaagcccgccgaggacgagtggggcaagacccccgacgccatgaaggccgccatggccctggagaagaagctgaaccaggccctgctggacctgcacgccctgggcagcgccagaaccgacccccacctgtgcgacttcctggagacccacttcctggacgaggaggtgaagctgatcaagaagatgggcgaccacctgaccaacctgcacagactgggcggccccgaggccggcctgggcgagtacctgagcaagggcagcctgagcagcaccaccaagagcctgctgagccccgccaccagcgagggccccctggccaagtag

SEQ ID NO: 2941 - DNA, 1068 bp, Artificial Sequence
  derived and/or modified sequence
atgtggctccggagccatcgtcagctctgcctggccttcctgctagtctgtgtcctctctgtaatcttcttcctccatatccatcaagacagctttccacatggcctaggcctgtcgatcctgtgtccagaccgccgcctggtgacacccccagtggccatcttctgcctgccgggtactgcgatgggccccaacgcctcctcttcctgtccccagcaccctgcttccctctccggcacctggactgtctaccccaatggccggtttggtaatcagatgggacagtatgccacgctgctggctctggcccagctcaacggccgccgggcctttatcctgcctgccatgcatgccgccctggccccgccagaagtggacagccgcacgccgtggcgggagctgcagcttcacgactggatgtcggaggagtacgcggacttgagagatcctttcctgaagctctctggcttcccctgctcttggactttcttccaccatctccgggaacagatccgcagagagttcaccctgcacgaccaccttcgggaagaggcgcagagtgtgctgggtcagctccgcctgggccgcacaggggaccgcccgcgcacctttgtcggcgtccacgtgcgccgtggggactatctgcaggttatgcctcagcgctggaagggtgtggtgggcgacagcgcctacctccggcaggccatggactggttccgggcacggcacgaagcccccgttttcgtggtcaccagcaacggcatggagtggtgtaaagaaaacatcgacacctcccagggcgatgtgacgtttgctggcgatggacaggaggctacaccgtggaaagactttgccctgctcacacagtgcaaccacaccattatgaccattggcaccttcggcttctgggctgcctacctggctggcggagacactgtctacctggccaacttcaccctgccagactctgagttcctgaagatctttaagccggaggcggccttcctgcccgagtgggtgggcattaatgcagacttgtctccactctggacattggctaagccttga

SEQ ID NO: 2942 - DNA, 1098 bp, Artificial Sequence
  derived and/or modified sequence
atgtggcttcggagccaccgccagctttgccttgcatttctgctggtgtgcgtgctttcggtgatcttctttctgcatattcaccaggacagctttccacacgggctgggcctgtctatcctgtgtcctgacagacgcctggttactccaccggtggctatcttctgcttgccgggcacagcgatgggccctaacgcgagtagttcttgtcctcagcaccctgcttcactcagtggaacctggaccgtgtaccccaacggtcggtttgggaatcagatgggacaatatgccaccttgctggcactggcccagcttaatggaagaagagccttcatcttacccgccatgcatgctgccctggcccccgtctttagaattacactcccagttctagcccccgaggttgattccagaaccccctggcgggaacttcagttacacgactggatgagcgaggaatacgcagatctcagagatcctttcctcaagctcagtggttttccctgctcttggacctttttccatcatctgagggagcagatccgtagggaatttactctgcacgatcacctgcgtgaagaggcccagtctgtcctgggtcaacttaggcttggacggaccggagatcgcccaaggaccttcgtgggggtgcacgtgcggcggggggattatctgcaggtcatgccccagcgctggaagggagtggtgggagactcggcctacctcaggcaggcgatggactggttccgcgcacggcacgaagccccagtcttcgttgtcacatccaacggaatggagtggtgcaaggaaaatattgatacctcccagggagacgtgaccttcgccggcgacggccaagaggcaactccctggaaagattttgcacttcttactcagtgtaaccacacgatcatgacaataggcaccttcggtttttgggctgcatacctggccggaggcgacacagtctacctcgcaaattttactctgcccgactccgagttcctgaaaattttcaagcctgaggccgctttccttccggaatgggtgggaatcaatgccgaccttagcccgctgtggaccttggctaaaccctag

SEQ ID NO: 2943 - DNA, 1068 bp, Artificial Sequence
  derived and/or modified sequence
atgtggctgcggtcacaccgacagctctgcctggcctttctgctggtgtgcgtgctgtctgtgatcttcttccttcatatccaccaggactcattccctcacgggctgggtttgtcaatattgtgtcccgatcggaggctagttacacccccagttgctattttctgcttgcccgggactgcaatgggaccaaacgcttccagctcgtgccctcaacaccctgcgtcactcagcggaacctggaccgtctaccccaatggacggtttggcaatcagatgggacaatacgctacattactggctctggcccagctgaatggaagaagggcgttcatcctgcctgccatgcatgcagcactggctcctccagaggtggattcacgtaccccgtggagggagctccaactgcatgattggatgtccgaggaatacgctgacctgagggatccattcttgaaattgagtggttttccatgctcttggactttttttcatcacctgcgcgagcagatccgccgcgagtttactctgcacgatcatctccgtgaagaggcccaatcagtgctaggccagctgagactgggaaggaccggagaccggccgcgcaccttcgtgggcgtccacgtgaggaggggcgattatctgcaggtgatgccacagagatggaagggtgtggttggggatagtgcgtacctgagacaggcgatggactggtttcgagcccggcacgaagccccggtgttcgtcgttacctcaaatggtatggagtggtgcaaggaaaatattgataccagtcagggcgatgtgactttcgccggtgatggccaggaagctaccccttggaaagactttgccttacttacacagtgcaatcacaccattatgactataggaacattcggcttttgggcggcctacctagccggcggagacacagtgtatctggccaattttacactgccagactctgagtttctgaaaatcttcaagccggaagctgctttcctcccggagtgggtcggaataaatgccgacctctctcccctctggacgctagctaaaccgtag

SEQ ID NO: 2944 - DNA, 1098 bp, Artificial Sequence
  derived and/or modified sequence
atgtggctgcggagccaccggcagctgtgcctggccttcctgctggtgtgtgtgctgagcgtcatcttcttcctgcacatccaccaggacagcttcccccacggcctgggcctgagcatcctgtgcccagaccggcggctggtgaccccacctgtggccatcttctgcctgcccggcacagccatgggccccaatgccagcagcagctgcccccagcacccagccagcctgagcggcacctggacagtgtaccccaacggccgctttggaaaccagatgggccagtatgccaccctgctggccctggcccagctgaatggccggcgggccttcatcctgcctgccatgcacgccgccctggcccctgtgttccgcatcaccctgcctgtgctggcccctgaggtggacagcaggaccccctggagggagctgcagctgcatgactggatgtctgaggagtatgctgacctgcgggaccccttcctgaagctgagcggcttcccctgctcctggaccttcttccaccacctgcgggagcagatccggcgggagttcaccctgcatgaccacctgcgggaggaggcccagagcgtgctgggccagctgcggctgggccgcactggagaccggcccaggacctttgtgggcgtgcacgtgcggcggggggactacctgcaggtgatgccccagcgctggaagggcgtggtgggggacagcgcctacctgcggcaggccatggactggttccgggcccggcatgaggcccctgtgtttgtggtgaccagcaatggcatggagtggtgcaaggagaacatcgacaccagccagggagatgtgacctttgctggagatggccaggaggccaccccctggaaggactttgccctgctgacccagtgcaaccacaccatcatgaccatcggcaccttcggcttctgggccgcctacctggccggcggggacacagtgtacctggccaacttcaccctgcctgattctgagttcctgaagatcttcaagccagaggccgccttcctgcctgagtgggtgggcatcaatgctgacctgagccccctgtggaccctggccaagccctag

SEQ ID NO: 2945 - DNA, 1068 bp, Artificial Sequence
  derived and/or modified sequence
atgtggctgcggagccaccggcagctgtgcctggccttcctgctggtgtgtgtgctgagcgtcatcttcttcctgcacatccaccaggacagcttcccccacggcctgggcctgagcatcctgtgcccagaccggcggctggtgaccccacctgtggccatcttctgcctgcccggcacagccatgggccccaatgccagcagcagctgcccccagcacccagccagcctgagcggcacctggacagtgtaccccaacggccgctttggaaaccagatgggccagtatgccaccctgctggccctggcccagctgaatggccggcgggccttcatcctgcctgccatgcacgccgccctggcccctcctgaggtggacagcaggaccccctggagggagctgcagctgcatgactggatgtctgaggagtatgctgacctgcgggaccccttcctgaagctgagcggcttcccctgctcctggaccttcttccaccacctgcgggagcagatccggcgggagttcaccctgcatgaccacctgcgggaggaggcccagagcgtgctgggccagctgcggctgggccgcactggagaccggcccaggacctttgtgggcgtgcacgtgcggcggggggactacctgcaggtgatgccccagcgctggaagggcgtggtgggggacagcgcctacctgcggcaggccatggactggttccgggcccggcatgaggcccctgtgtttgtggtgaccagcaatggcatggagtggtgcaaggagaacatcgacaccagccagggagatgtgacctttgctggagatggccaggaggccaccccctggaaggactttgccctgctgacccagtgcaaccacaccatcatgaccatcggcaccttcggcttctgggccgcctacctggccggcggggacacagtgtacctggccaacttcaccctgcctgattctgagttcctgaagatcttcaagccagaggccgccttcctgcctgagtgggtgggcatcaatgctgacctgagccccctgtggaccctggccaagccctag

SEQ ID NO: 2946 - DNA, 1098 bp, Artificial Sequence
  derived and/or modified sequence
atgtggctgcggagccaccggcagctgtgcctggccttcctgctggtgtgtgtgctgagtgtcatcttctttctgcatattcatcaagactcttttccccatggtctggggttgtctatcctttgccccgatcggagactggtcacgccaccagtagccatattttgcctgcctggaaccgcaatgggcccgaatgcctcctcctcatgtcctcagcaccctgcgtcactgagtggaacctggaccgtgtacccgaatggacgctttgggaatcagatggggcaatatgcgaccctactggcacttgcacaattgaacggacggcgggcttttatccttcctgctatgcatgccgcgctggcccctgtcttccggatcacactcccagtgctggccccggaggtggacagtaggaccccatggcgtgagctgcagctgcacgactggatgtccgaagagtatgctgatcttcgcgatccatttcttaaactttctgggttcccatgctcgtggaccttctttcatcacctgagagagcaaatacgacgggagttcactctgcatgaccacctccgggaggaggcccaaagtgttctcgggcagcttaggttgggaagaacgggcgatagaccgagaacattcgtgggagtacatgtgcggagaggagactacctgcaggttatgcctcagagatggaagggggtcgtcggggactcagcgtaccttaggcaggccatggactggttccgggctcggcatgaggcacctgtattcgtggtcacaagcaatggcatggaatggtgtaaggaaaacatcgatacgtctcagggcgatgtcactttcgctggtgatgggcaagaggccacaccttggaaggacttcgctttgctcacacaatgcaaccacactattatgacgattggcacttttggattctgggctgcctatcttgcgggcggggatacagtttatttggccaactttacattacccgatagtgagttcctcaagatctttaagccagaagccgctttcttgcctgaatgggtgggcattaacgccgatttaagccccctgtggactctggcgaaaccttag

SEQ ID NO: 2947 - DNA, 1068 bp, Artificial Sequence
  derived and/or modified sequence
atgtggctgcggagccaccggcagctgtgcctggccttcctgctggtgtgcgtcctctctgtgatcttcttcctgcacatacaccaggatagctttccacacggtctgggattaagcatattgtgccctgacagacggttggtgactccacctgtggcgatcttctgcctgcctgggaccgccatgggaccgaacgcttcttccagttgtccacagcaccctgcgagcctgtccggtacttggaccgtgtatcccaacgggaggtttggcaaccagatgggacaatatgccaccctcttggctttagcccagttaaacggccgccgagccttcattctacctgccatgcacgctgccctagcccctccagaagtagactctcgtacaccatggcgtgaactgcagctccatgactggatgagtgaggagtacgccgacttacgcgacccgttcctcaaactaagcggatttccctgctcatggacattctttcatcatctaagggagcagattcggcgcgaattcaccctccatgaccacctacgggaggaggcccagtccgtgctcggacagttacggctgggtcgcaccggtgataggcctcggacttttgtcggtgtgcatgtccggaggggcgactacttacaggtgatgccacagcgttggaagggcgtagttggagattctgcctacctgcggcaggccatggactggtttcgcgcgcggcacgaagcccccgtgtttgtagtgacaagtaacggtatggaatggtgtaaagagaatattgacacctcccagggtgatgttacattcgctggtgacggacaagaggctacaccctggaaggatttcgccctcctcacacaatgtaaccacaccatcatgacgatcggcacttttggattttgggcggcatacctggccgggggcgacaccgtgtacctggcaaactttacgcttccagactccgagttcctcaaaatatttaagcctgaagcagcatttctcccggagtgggtgggaattaatgcagacctatccccactgtggaccctggccaagccatag

SEQ ID NO: 2948 - DNA, 1098 bp, Artificial Sequence
  derived and/or modified sequence
atgtggctgcgatctcaccgccagctctgcctggcatttctcttagtttgcgtattgtccgttatctttttcctacatattcaccaggacagcttcccccatggattgggcctctcaatcttgtgtcctgacagacgactggtcacgccacccgttgccatattttgcttacccggtaccgccatgggccctaatgccagctcgagctgccctcaacaccctgcctcattgagtggcacctggaccgtctaccccaatgggaggtttggcaatcagatgggacagtacgccactctcttggcactggcccagctcaatggcagaagggcgtttattttaccggcaatgcacgccgctctcgccccagtgttcagaataactctgccagtgctggccccagaagtcgattcccggacgccgtggcgcgaactgcagctgcacgactggatgtccgaagaatatgctgacctcagagatccctttctgaagctgtccgggttcccctgttcctggactttcttccaccacctgagggaacagattagacgagagtttacgcttcacgaccatctccgagaggaggcccagagtgttctgggccagctccgactgggacggacaggagacaggccccgtacttttgttggggttcacgtgagacgcggtgattacctccaggtcatgcctcaacgctggaaaggtgtggtcggagattcggcctatctgaggcaggccatggattggtttcgggcaaggcacgaggctcccgtgtttgtggtcacatcaaacggtatggaatggtgcaaggaaaacatcgacacgtcccagggagacgtgacatttgcaggtgatggtcaggaggccaccccctggaaggatttcgctctgcttacgcaatgtaaccacacaatcatgaccattggtactttcggcttctgggctgcatacctggcaggcggtgacacggtctacctggccaactttaccctgcccgattcagaatttctcaaaatcttcaagcccgaagctgcttttctgcccgagtgggtcggaatcaacgctgatctgtctcccctgtggacactcgccaaaccatag

SEQ ID NO: 2949 - DNA, 1068 bp, Artificial Sequence
  derived and/or modified sequence
atgtggctgcgtagtcaccggcagctgtgcctggccttcctccttgtttgtgtgctgtctgttatattttttcttcacattcatcaggactcctttccacacgggctgggcctgagtatactttgtcccgatagacggctagtcactccccctgtggctatcttttgcctccctggtacggctatgggcccaaacgcctcttcaagctgcccccagcaccctgccagcttgagcgggacatggactgtgtatcccaatgggaggtttggaaaccagatgggacagtacgccaccttacttgcacttgcacaactgaacggcagacgagcttttatcctgccggctatgcatgctgccctggcaccccctgaggtggactcgcgaacgccttggcgtgaactgcagctccatgactggatgtcagaagagtatgccgacctgcgggacccatttctgaaattaagtggcttcccctgttcttggactttctttcaccatctgcgcgaacagatccgacgtgagtttacacttcacgaccacctgcgggaggaggcccagtcagttctgggacagctgcggctcgggagaaccggcgaccgcccaagaacctttgtcggggtccatgttaggcggggagactatctgcaggtgatgccccagaggtggaaaggggtggtgggcgattcagcctacctgaggcaagccatggattggtttcgtgcccgtcacgaagcacctgtcttcgtggtaacttccaacgggatggaatggtgcaaggagaacatcgacacatcacagggggatgtgactttcgctggcgacggacaggaagcgacaccctggaaagattttgcgttgctgacacaatgcaatcataccatcatgacaatcggcaccttcgggttttgggctgcttacctcgctggtggggataccgtgtatcttgccaactttacacttcccgactccgaatttctgaagatttttaaacctgaggccgcattcctgcctgagtgggtgggaatcaacgcagacctgtctcccctgtggacactcgccaaaccttag

SEQ ID NO: 2950 - DNA, 1098 bp, Artificial Sequence
  derived and/or modified sequence
atgtggctgagaagccacagacagctgtgcctggccttcctgctggtgtgcgtgctgagcgtgatcttcttcctgcacatccaccaggacagcttcccccacggcctgggcctgagcatcctgtgccccgacagaagactggtgaccccccccgtggccatcttctgcctgcccggcaccgccatgggccccaacgccagcagcagctgcccccagcaccccgccagcctgagcggcacctggaccgtgtaccccaacggcagattcggcaaccagatgggccagtacgccaccctgctggccctggcccagctgaacggcagaagagccttcatcctgcccgccatgcacgccgccctggcccccgtgttcagaatcaccctgcccgtgctggcccccgaggtggacagcagaaccccctggagagagctgcagctgcacgactggatgagcgaggagtacgccgacctgagagaccccttcctgaagctgagcggcttcccctgcagctggaccttcttccaccacctgagagagcagatcagaagagagttcaccctgcacgaccacctgagagaggaggcccagagcgtgctgggccagctgagactgggcagaaccggcgacagacccagaaccttcgtgggcgtgcacgtgagaagaggcgactacctgcaggtgatgccccagagatggaagggcgtggtgggcgacagcgcctacctgagacaggccatggactggttcagagccagacacgaggcccccgtgttcgtggtgaccagcaacggcatggagtggtgcaaggagaacatcgacaccagccagggcgacgtgaccttcgccggcgacggccaggaggccaccccctggaaggacttcgccctgctgacccagtgcaaccacaccatcatgaccatcggcaccttcggcttctgggccgcctacctggccggcggcgacaccgtgtacctggccaacttcaccctgcccgacagcgagttcctgaagatcttcaagcccgaggccgccttcctgcccgagtgggtgggcatcaacgccgacctgagccccctgtggaccctggccaagccctag

SEQ ID NO: 2951 - DNA, 1068 bp, Artificial Sequence
  derived and/or modified sequence
atgtggctgagaagccacagacagctgtgcctggccttcctgctggtgtgcgtgctgagcgtgatcttcttcctgcacatccaccaggacagcttcccccacggcctgggcctgagcatcctgtgccccgacagaagactggtgaccccccccgtggccatcttctgcctgcccggcaccgccatgggccccaacgccagcagcagctgcccccagcaccccgccagcctgagcggcacctggaccgtgtaccccaacggcagattcggcaaccagatgggccagtacgccaccctgctggccctggcccagctgaacggcagaagagccttcatcctgcccgccatgcacgccgccctggccccccccgaggtggacagcagaaccccctggagagagctgcagctgcacgactggatgagcgaggagtacgccgacctgagagaccccttcctgaagctgagcggcttcccctgcagctggaccttcttccaccacctgagagagcagatcagaagagagttcaccctgcacgaccacctgagagaggaggcccagagcgtgctgggccagctgagactgggcagaaccggcgacagacccagaaccttcgtgggcgtgcacgtgagaagaggcgactacctgcaggtgatgccccagagatggaagggcgtggtgggcgacagcgcctacctgagacaggccatggactggttcagagccagacacgaggcccccgtgttcgtggtgaccagcaacggcatggagtggtgcaaggagaacatcgacaccagccagggcgacgtgaccttcgccggcgacggccaggaggccaccccctggaaggacttcgccctgctgacccagtgcaaccacaccatcatgaccatcggcaccttcggcttctgggccgcctacctggccggcggcgacaccgtgtacctggccaacttcaccctgcccgacagcgagttcctgaagatcttcaagcccgaggccgccttcctgcccgagtgggtgggcatcaacgccgacctgagccccctgtggaccctggccaagccctag

SEQ ID NO: 2952 - protein, 357 aa, Artificial Sequence
  derived and/or modified sequence
MEEGMNVLHDFGIQSTHYLQVNYQDSQDWFILVSVIADLRNAFYVLFPIWFHLQEAVGIKLLWVAVIGDWLNLVFKWILFGQRPYWWVLDTDYYSNTSVPLIKQFPVTCETGPGSPSGHAMGTAGVYYVMVTSTLSIFQGKIKPTYRFRCLNVILWLGFWAVQLNVCLSRIYLAAHFPHQVVAGVLSGIAVAETFSHIHSIYNASLKKYFLITFFLFSFAIGFYLLLKGLGVDLLWTLEKAQRWCEQPEWVHIDTTPFASLLKNLGTLFGLGLALNSSMYRESCKGKLSKWLPFRLSSIVASLVLLHVFDSLKPPSQVELVFYVLSFCKSAVVPLASVSVIPYCLAQVLGQPHKKSL

SEQ ID NO: 2953 - DNA, 1071 bp, Artificial Sequence
  derived and/or modified sequence
atggaggaaggaatgaatgtgctccacgattttgggatccaatccacccattacctccaggtgaattatcaggacagccaggattggttcatcctcgtctcggtgatcgcagacctccgcaatgccttctatgtcctgttcccgatttggtttcacctgcaggaggccgtggggatcaaacttctttgggtggcggtcatcggagattggttgaatctcgtgttcaagtggatcctgtttggacagcggccatactggtgggtgctcgacaccgactattactcgaacacttcagtgccactcatcaaacagttccccgtcacctgcgagacgggtccagggtcaccgtccggacatgcaatggggacggccggagtctactacgtgatggtgacctccactttgtcgatctttcagggaaagatcaagccgacgtaccgcttccggtgtctgaacgtaattctgtggttggggttttgggctgtgcaactgaacgtgtgcctgtcccgcatctacctggcggcccacttcccgcatcaagtggtcgctggagtcctgtccggaatcgcggtggcggagactttctcacacatccattcaatttacaacgcgtcccttaagaagtacttcctgattaccttctttctgttctccttcgcgattggattctacctgctcttgaaaggactgggagtggacctgttgtggactctggaaaaggctcagagatggtgcgagcaaccggaatgggttcatattgacactactcctttcgcgtccctcctgaaaaaccttggtactctgttcggactcgggctggctctgaattcatccatgtacagagagtcatgtaaaggaaaactgtcaaagtggctcccattccgattgtcgtccatcgtggcaagcctcgtgctcctccacgtgtttgactcactgaaacctccgtcccaggttgaactggtgttctacgtgttgtccttctgcaagtcggcggtggtgccgctggcctctgtgtcggtgattccgtactgcctcgctcaagtcctcggacaaccacacaagaaatcgctc

SEQ ID NO: 2954 - DNA, 1071 bp, Artificial Sequence
  derived and/or modified sequence
atggaggaaggaatgaatgtgctgcacgatttcggcatccagagcacacattatctgcaggtgaactaccaagattcccaagattggttcatcctggtgtcggtgattgcagatctgagaaatgcgttctacgtcctgttccctatctggtttcacctccaagaagccgtcggtattaaactgctctgggtggcagtgatcggagattggctgaatctagtctttaagtggatcctgtttggacagcgcccatattggtgggtgttggacactgattactactccaacacgtcagtcccacttatcaagcagtttccggtgacctgcgaaacaggcccaggatccccttctggacatgctatgggcaccgccggtgtctactatgtgatggtgacaagtaccttgagcattttccagggcaaaattaagcccacatatcgcttccggtgtcttaacgtgatactgtggctggggttctgggctgtccagctgaacgtgtgtctgtctcgcatctatctggctgctcatttcccgcaccaggtggtggccggtgtgctgtccggcatcgctgtagcagaaactttcagccacatccactctatatacaacgcaagcttgaagaagtatttccttatcacattttttttgttcagctttgccatcggcttctacctactgttgaaggggttaggtgtagaccttctgtggactctggagaaagctcagagatggtgtgagcagccagaatgggttcatatcgacaccacacctttcgctagtctcctcaagaacctgggtaccctgtttgggcttggcctggctctgaatagctccatgtacagagagtcctgtaagggtaagttgtcgaagtggctgccctttcggctgtcgtccattgtggcctccctagttttactccacgtgttcgacagtctaaagcccccaagtcaagtggagctcgtgttttacgtgctcagcttttgtaagtcagccgtggtcccattggcttccgtgtccgtcattccatactgcttagcacaagtcctgggtcagcctcataagaaaagtttg

SEQ ID NO: 2955 - DNA, 1071 bp, Artificial Sequence
  derived and/or modified sequence
atggaagaaggcatgaacgtgctgcatgacttcggaatccagtcgactcactaccttcaagtcaattatcaagatagccaagactggttcatcttggtgtcagtgatcgccgatttgagaaacgctttctacgtgctgtttccaatctggtttcatctgcaagaagctgtgggaattaagctgctttgggtcgcagttatcggagactggctgaacctcgtgtttaagtggatcctctttggacagcggccatactggtgggtcctggacactgattactactctaacacctccgtccctcttatcaagcaatttccggtgacgtgcgagactgggccgggttcgccatcgggtcacgcaatgggaactgcaggagtttactacgtgatggtcaccagcaccctgtcgatatttcaggggaagatcaagcccacctaccggttccgctgtcttaacgtgatcctgtggctcggattctgggcggtgcagctcaacgtgtgcttgtcccgcatctacctggcggcacatttcccccatcaagtggtcgcgggagtgctgtcggggatcgctgtcgcagaaaccttctcacacatccactcaatctacaatgccagcctcaaaaagtactttctgatcacctttttcctgttctctttcgcgatcggtttctacttgctgttgaagggcctcggggtggacttgctgtggacgctggaaaaagcccagcggtggtgcgaacagccggagtgggtgcacattgacaccacccctttcgcgtcgctgctcaaaaatctggggactctgttcggcctcgggctcgccctcaacagctcgatgtacagggagtcgtgcaagggcaagctgtccaagtggctgccattcaggcttagctcgattgtggcctcgcttgtgctgctccacgtctttgattctcttaagccgccgtcacaggtggagttggtgttctatgtcctgtcattctgtaaatcggcggtcgtgccgctggcttcagtctccgtcatcccctactgcttggctcaagttctcggtcagccgcacaagaagtccctt

SEQ ID NO: 2956 - DNA, 1071 bp, Artificial Sequence
  derived and/or modified sequence
atggaggaggggatgaatgtgcttcacgacttcggcatccaatccacccactacctgcaagttaactatcaggactcccaggattggttcattctggtcagcgtgatcgcggacctccggaacgccttctatgttctctttcccatatggttccatctgcaggaggctgtgggcattaagctgctctgggtggctgtgatcggcgattggcttaacctagtatttaagtggatcctgttcggacagcggccctactggtgggtgcttgacaccgattattactccaacacgtccgtgcctttgataaagcagtttccagttacttgcgagaccgggcctgggtcaccttccggacacgcaatgggaactgctggagtgtactacgtgatggtcaccagcactctttccatctttcaggggaagataaaacctacatatcgattccgctgcctgaatgtcatcctctggctggggttctgggctgtgcagctaaacgtttgtctgtcccgaatatacttggctgctcattttccacatcaggttgtggcaggggtcttaagcggaatcgccgtggctgaaaccttcagccatatccactcgatctataacgcaagtctgaaaaaatattttctgatcacttttttcctgttcagtttcgccattggattttatcttctcctcaaagggctcggggtggatctgctgtggaccctagagaaagcccagaggtggtgcgaacaacccgaatgggttcacatcgataccacaccctttgcatcgcttttgaaaaatctcggcaccctgttcggcctgggactggcactgaactcatctatgtatcgcgaaagctgcaaaggcaaactatctaaatggttgccatttaggctgtcatcgattgtcgcaagccttgttctgctgcacgtttttgattcgctgaagccaccatcgcaagtggagcttgtcttttacgtgctatcattttgcaagagtgccgtggtacctctcgcttcagtttccgtgattccttactgcctcgctcaggtcttggggcaacctcacaaaaagagcttg

SEQ ID NO: 2957 - DNA, 1071 bp, Artificial Sequence
  derived and/or modified sequence
atggaagaagggatgaacgtgctgcatgacttcggcatccagtcaacccattatctgcaagttaactaccaggactcacaagactggttcatccttgtgtcagtgattgcagatctccgtaacgctttttacgtgctctttcctatctggtttcatctgcaagaggctgtcggaattaagctcctttgggtggctgtgattggtgattggctcaatctcgtgttcaaatggattctgttcggccaaagaccatactggtgggtgctcgatacggactactactcgaatacttcggtgccactgattaagcaatttccagtcacgtgtgagactggacccgggagccctagcggacacgcaatggggacggcaggcgtgtactacgtcatggtgactagcactctttcgatatttcaaggcaagattaagccgacgtatcgctttaggtgtctgaacgtcatactgtggctgggtttctgggcagtgcaacttaatgtgtgcctttcaaggatttaccttgctgcccactttcctcaccaagttgtggcaggagtgctttcgggaattgcggtggcggaaacttttagccatatccattccatctacaacgcctcgctgaagaagtactttctcatcacttttttcctgttctcattcgcaattggtttctatctgctgctgaaaggtcttggggtggatctgctctggacccttgagaaggcgcaacggtggtgcgaacagcccgagtgggtgcatatagacaccaccccatttgcatcgctgctgaagaaccttgggacgctgttcggacttggtcttgcactgaactcgtcgatgtaccgggaatcttgtaagggaaagctgtcgaaatggcttcctttccgactctcgtccattgtggccagccttgtccttctccacgtgtttgattcccttaagcccccatcgcaggtcgaattggtgttttacgtcctttcgttttgtaagtccgcagttgtcccgcttgccagcgtgtcggtgattccttactgtctggcccaggtcctcggacagccacataagaaatcactg

SEQ ID NO: 2958 - DNA, 1071 bp, Artificial Sequence
  derived and/or modified sequence
atggaagagggcatgaacgttctccatgactttgggattcagtccacccactacttacaggtcaactaccaagatagccaggattggttcatattggtgagcgttattgcagaccttaggaacgctttctatgttctcttcccgatatggttccaccttcaagaggcagtcggtattaagctcctctgggtcgctgttatcggtgactggttgaatttagtcttcaaatggatcctgtttggtcaacgcccttattggtgggttctggatacagactactattcaaacacgtccgtgccgctgattaaacagtttcctgtgacctgcgaaacgggacccggatctccatcaggccacgccatggggacggccggcgtgtactatgtgatggtgacgagcactctctccatcttccagggtaaaatcaagcctacgtaccgcttccgatgcctgaatgtaatcttgtggcttggcttctgggcagtgcagctaaacgtctgcctaagtcggatttacctcgcggcgcacttcccccatcaagtggtggcaggggtgctctcaggaattgcggtggccgagaccttcagccacattcactccatctacaatgcctccctgaaaaaatatttcctgattaccttcttcctgttctcatttgccattgggttctatctactgctgaagggcctgggtgtggacctcctgtggaccttagaaaaggcgcagcggtggtgtgaacagcctgaatgggtccacatcgataccaccccttttgctagcctgctgaagaatctgggaactctcttcggcctgggtctggcgctgaattcctcgatgtatcgcgagtcctgcaagggaaagctgtcgaaatggctccctttcagactcagttcaatagtagcgtccctggtgctgctgcacgttttcgacagtcttaaaccgccctcacaagtggaactcgtgttctacgtgctgtccttctgtaagtcggccgtcgtacctctggcaagtgtttccgtgattccatattgtctggcccaagtgctgggccagccacataagaagtcattg

SEQ ID NO: 2959 - DNA, 1071 bp, Artificial Sequence
  derived and/or modified sequence
atggaggagggcatgaacgttttgcacgactttggaattcaatccacccactacctgcaggtgaactaccaggatagccaagattggtttatactggttagcgttattgcggatttgcgcaatgcgttctacgtgctcttccctatttggtttcatctgcaggaagcagtcggcattaagctcctttgggtcgcagtgatcggtgactggctgaacctcgtgtttaagtggatactgtttggtcagcgtccgtactggtgggtgctggatactgattactactccaatacttcggtgcccctcattaagcaatttccagtcacctgtgaaaccgggcccggatcacccagcggacatgccatgggtactgcaggagtgtactacgtgatggtgacctcgacgcttagcatatttcagggaaagatcaagcctacttatagatttcgctgtctgaatgtgatcctttggctgggattttgggccgtgcaactcaacgtgtgcctgtccagaatatacctcgccgcacattttccccaccaggtcgttgcaggcgtgctgtcgggcattgccgtggcagaaaccttttcacatattcattcaatctataacgcttcactgaaaaagtactttctgattacctttttccttttttcgtttgctattggattctaccttctgcttaagggactgggagtggacctgctgtggactctcgaaaaagcccagaggtggtgcgaacaacctgaatgggtacatatcgataccactcccttcgcatcgcttcttaagaacctcggtacgctttttggactgggactggcactgaactcatcaatgtaccgggagtcgtgtaagggaaagctcagcaagtggcttcctttcagacttagttcgattgtggctagcctcgtgctgcttcatgtgtttgattcgcttaaacctccatcgcaagtggaactggtgttctatgtgctgtccttttgtaagtccgcagtcgtgcctctcgcttcagtatcagtgatcccttactgtctggcacaggtcttgggtcaacctcataagaaatccttg

SEQ ID NO: 2960 - DNA, 1071 bp, Artificial Sequence
  derived and/or modified sequence
atggaggaaggaatgaatgtgctgcacgatttcggaatccagtcaacgcactacctccaggtgaactatcaggattcccaggactggttcattctcgtgtctgtcatcgccgatctgcggaatgcattttacgtgctgttccccatctggttccatctgcaggaagccgtgggaatcaaactgctgtgggtggcagtgatcggagattggctgaatctcgtgttcaagtggatcttgtttgggcagcggccatactggtgggtgctcgataccgactactactctaacaccagcgtgcctttgatcaaacagtttcctgtcacctgcgagacgggaccaggatccccgtccgggcacgctatgggtactgcaggtgtgtactacgtgatggtgacctcaaccttgagcatatttcaaggcaagatcaagccgacctacaggtttaggtgtctcaacgttatcctttggctggggttctgggccgtccaacttaatgtgtgcctgtcccggatctacctggcagcccacttccctcaccaggtggttgctggcgtgttgtcgggaatcgcggtggcggaaaccttttcacacatccacagcatttacaacgcatccctgaagaagtatttcctcattaccttcttcctgttttcctttgccatcggtttctatctgcttctcaaggggctgggcgtggacttgctgtggacccttgaaaaggcgcagcggtggtgcgaacagccagagtgggtgcatatcgatactaccccgttcgcctcgttgctgaagaacttgggaaccctgttcggacttgggcttgcgctgaactcatccatgtaccgcgaatcctgcaagggcaagctctccaagtggctgccatttagactgtcgtccatcgtcgcctcgctggtgctgctgcacgtgttcgactcgctgaagcctccttcccaggtggagctggttttctacgtgctgagcttctgcaaaagcgctgtggtgcccctggcttcagtgagcgtgatcccgtactgcttggcccaggtcctgggccaaccacacaaaaagagcctg

SEQ ID NO: 2961 - DNA, 1071 bp, Artificial Sequence
  derived and/or modified sequence
atggaggaaggcatgaatgtgcttcacgactttggaatccagtcaactcactacttgcaggttaattatcaggattcacaagactggttcatcctagttagcgtgattgcagacctccgcaacgctttttatgtgctgtttcctatatggttccatttacaggaggcggtcggtatcaaactgctatgggtggcagttatcggagattggttaaacttagtgtttaagtggattctatttggacaaaggccttactggtgggttttggacaccgactactattctaacacatcggtgccgctgataaaacagttcccggttacttgcgaaacgggccctggcagtccctctggtcacgcaatggggaccgccggtgtgtactatgtcatggttacaagtaccctgtcaattttccagggtaagatcaaaccaacctacagattccgttgcctcaacgtcattctctggttgggattctgggccgtccagctcaatgtttgtctcagccgaatctacctggctgcacacttcccccaccaggtcgtcgctggggtcctctcagggatcgcagtggccgaaaccttctctcacattcattccatctacaacgccagcttaaaaaagtattttctgataacttttttcctattctcgttcgctatcggcttctaccttttactaaagggcctgggggtggatctactttggacacttgaaaaagcacagcgttggtgtgagcagcccgaatgggtccatatcgataccactcccttcgctagccttctgaagaacctcgggactctgttcggtctgggcctcgccctgaactcctctatgtacagagaatcatgtaaggggaagctgtccaagtggcttcctttccggctgtcttccatcgtggcgagtctcgtgttgcttcacgtgtttgattcattgaagccaccgtctcaggtggagttagttttctacgttctctccttctgtaaatccgccgtggttcccctcgcttctgtttcagtcataccgtactgcctagcacaggtactgggccagccacataaaaagtctcta

SEQ ID NO: 2962 - DNA, 1071 bp, Artificial Sequence
  derived and/or modified sequence
atggaggagggcatgaacgtgttgcacgatttcggcatccaaagcacacattatctgcaggtgaactaccaggactcacaggactggttcatcctggtaagtgtgatagctgacctccgcaacgcattttatgtgctgttccctatctggtttcacctgcaggaggcagtgggcatcaaactgctgtgggtggctgtcatcggcgactggcttaaccttgtcttcaaatggatactgtttgggcagcgcccatactggtgggtgctggatacggactactacagtaacacctctgtgcctcttatcaaacagttccctgtgacatgtgaaaccggaccggggtccccatctggacatgctatgggaaccgccggcgtgtattatgtcatggtcactagtacactgtccatcttccaaggcaaaattaaaccaacctataggttccggtgcctgaacgtaatcttgtggctgggcttctgggcggtgcagttgaatgtctgcctgtctcgcatctacctggctgctcatttcccccatcaagtggtcgcgggcgtcctgtcagggatcgcagtggctgaaacattctctcacatacacagtatctacaacgcatctctgaagaaatattttttgattacttttttcctgtttagctttgccatcgggttctaccttctgctgaaaggcctgggagtggacctcctgtggacgcttgaaaaagctcaaaggtggtgcgagcagccagaatgggtccacatagacacaaccccgtttgcatcactgctgaaaaacctgggtaccctcttcggacttggcttggctttgaactctagcatgtacagggaatcctgcaagggcaaactttccaagtggctgccatttagactgtcaagtatcgtggcttcactcgttctgctgcacgtcttcgactctctgaagccgcctagccaggtggagcttgtcttctacgtcctgtccttttgtaagagcgctgtggtgcctctcgcctccgtgtctgttatcccctattgcctcgcccaggtgctgggtcagccacacaagaaatctctc

SEQ ID NO: 2963 - DNA, 1071 bp, Artificial Sequence
  derived and/or modified sequence
atggaagaaggaatgaacgtgctgcatgactttggcattcagtccactcattacctgcaagtcaactaccaagactcccaggattggtttatcctggtcagcgtgatcgcagacctcaggaacgccttctacgtgttgtttccgatctggttccatctccaagaggcagtcggaatcaagctgttgtgggtggcggtgatcggagattggctgaatttggtgttcaaatggatcctgttcggacagaggccatactggtgggtcctggacaccgattactattcgaatacctccgtcccgctgatcaaacaattcccggtgacttgcgaaaccggaccaggatccccctcgggacacgctatgggaactgcgggagtctactacgtgatggtgactagcaccctctcgatctttcagggcaagattaagccaacttaccgcttccggtgccttaatgtcattctctggctcggtttctgggccgttcaactgaatgtctgcttgtcgcggatctacctggcagcgcacttcccgcaccaggtggtcgccggagtcctctcaggcatcgcagttgcggaaacctttagccatatccatagcatctacaatgcttccctcaagaaatactttcttatcaccttcttcctcttctccttcgccatcggcttttacctgctgctgaaaggattgggcgtggatctgttgtggaccctggaaaaggcgcagaggtggtgcgagcagccggagtgggtgcatatcgacactacgccattcgcatcactgctcaagaatctgggcactctgttcggactcggcctggccctgaattcatcgatgtaccgcgagtcctgcaagggaaagctgtcgaagtggctgccgtttcggctgtcatccatcgtcgcgtcgctggtgctgctgcacgtgttcgactcccttaagcctccgtcgcaggtcgagctcgtgttctacgtgctctcattctgcaaatcggctgtggtgcctctcgcatccgtgtcggtgatcccgtactgtctggctcaggtcctgggacagccgcataagaaaagcctt

SEQ ID NO: 2964 - DNA, 1071 bp, Artificial Sequence
  derived and/or modified sequence
atggaggaaggaatgaacgtgctgcacgacttcggaattcagagcacgcattacctgcaagtgaattaccaggacagccaagattggtttatcctcgtctccgttatcgccgacttgcggaacgccttctacgtcttgttcccgatttggttccacctccaagaagcagtgggaatcaaactgctgtgggtcgccgtgatcggcgattggctgaatctcgttttcaagtggatactcttcggacagcgaccgtactggtgggtgctggacaccgattactattccaatacctccgtgcctctgatcaaacagtttccggtcacttgtgaaaccgggccgggctcgccatcggggcatgcgatgggcaccgctggtgtttactacgtcatggttacctccacccttagcatctttcagggaaagatcaagccgacttacagattccgctgcctgaatgtgatcctgtggctcggattctgggccgtgcagctgaacgtgtgcctgagccggatctaccttgcagctcacttcccccaccaagtggtggccggggtgctgagtggtatagctgtggccgaaaccttctcacatatccattccatctataacgcctcactgaagaagtacttcctgattactttcttcctgttttccttcgccattgggttctatctgctgctgaagggacttggagtcgatctcctctggactctggaaaaggcccaaaggtggtgcgaacagcctgagtgggtgcacatcgacactactccgttcgcgtccctcctgaagaacctcggcacgctgtttgggttgggattggctcttaactcctccatgtaccgagagtcgtgtaaaggaaaactctcaaagtggctcccgttccggctgtcatcaatcgtcgcaagtctcgtacttctgcatgtgttcgactccctgaaaccgccctcgcaggtggagcttgtcttttatgtcttgtcgttttgcaagtccgccgtggtgcctctcgcgtctgtctcggtcatcccgtactgcctcgcgcaggtgttgggccaacctcacaagaaatccctc

SEQ ID NO: 2965 - DNA, 1071 bp, Artificial Sequence
  derived and/or modified sequence
atggaggagggaatgaacgttctccatgattttgggattcaatccacccactacctgcaagtgaattatcaggactcgcaagattggtttattctcgtttccgttatcgccgatctcagaaacgccttctacgtcctgtttcctatttggtttcatcttcaggaagcagttggaataaagctgttgtgggtggcagtcattggtgattggcttaatcttgttttcaaatggattcttttcggacagcgcccttactggtgggtgcttgacaccgactattactcgaacacgtcggtccccctgataaagcaatttccagtgacttgcgaaacgggtcctggaagtccgagtggacatgcaatggggactgctggcgtgtactacgtgatggtcacttcgaccctctccatctttcaaggaaagataaaaccaacttaccgatttagatgtctcaacgtgattctctggcttgggttttgggctgtccaactgaacgtgtgcctgtcacggatttaccttgcagcccattttcctcaccaagtggtggcgggtgtgctcagcggaatcgcagtggcagaaaccttcagccacatacattcgatctacaacgcctcgcttaagaagtactttctgatcacgttttttctcttttcattcgcgatcggattctacttgctgttgaaggggctgggcgtggatctgctgtggactctcgagaaagctcagcggtggtgtgaacagcctgaatgggtgcatattgacacgaccccttttgcatctcttctgaaaaatctgggcaccttgtttggactcggtcttgcactgaattcctcgatgtacagagaatcctgtaaaggtaaactttcaaagtggcttccattccggctttcctccattgtcgcttccctggtgcttctgcatgtattcgattccctgaagcctccttcacaggtggagcttgtgttctacgtgctctccttttgtaagtctgcagttgtcccactggcatctgtgagtgtcatcccgtactgccttgcccaagtcctggggcagccacacaaaaagtcactt

SEQ ID NO: 2966 - DNA, 1071 bp, Artificial Sequence
  derived and/or modified sequence
atggaggagggcatgaacgtcctccacgattttggaatccagtcgacccactacctccaagttaactatcaagattcacaagattggtttatactcgtctcagttattgcagatttgagaaatgcattctatgtgctgttccctatatggtttcacctccaagaagcagtcggaatcaaacttctgtgggtggctgtgatcggagactggctcaatctcgtgttcaagtggattctctttgggcagcgaccttactggtgggtgcttgacactgactactattcaaatacgtctgtgcctctgattaagcagtttccagtcacttgcgaaactggtccgggctccccctcgggtcacgcaatgggaactgcaggggtgtactacgtgatggtcacgagcactctgtccatctttcaaggcaagatcaagcctacctacagattccggtgtcttaacgtgatcctgtggctggggttttgggctgttcagctcaacgtgtgtctgagccgcatttaccttgcggcgcacttcccacatcaagtggtcgcaggtgtcctttccggaatagcggtggccgaaacgttttcgcacattcactcaatttacaacgccagccttaagaaatactttctcataaccttcttcctcttttcctttgccattggattctacctcctgctgaaggggctcggagtggacttgctgtggacccttgaaaaagcccagcggtggtgtgaacaaccggaatgggttcatatcgatacgactcccttcgcgagccttctcaaaaacttgggaactttgtttggacttggtctggcacttaatagctcaatgtacagagagtcatgcaagggtaagctgtcgaaatggctgcctttccgtctgtcctcgatcgtcgcatcgctggtgcttcttcatgtgtttgattccttgaaacccccaagccaggtggagctcgtgttttacgttctctcattttgtaagtcagctgtggtgccactggcatcggtgagcgttatcccttactgccttgcacaagtgcttggacagccacataagaagtcgctg

SEQ ID NO: 2967 - DNA, 1071 bp, Artificial Sequence
  derived and/or modified sequence
atggaagaaggaatgaacgtgttgcacgacttcggcatccaatccacccactacctgcaggtgaattatcaggattcccaggactggttcatcctggtgtccgtgatcgccgaccttcgaaatgccttttacgtcctatttcccatttggtttcatttacaggaagcggtgggcatcaaactgttgtgggtcgctgttattggggactggcttaacctggtgtttaaatggattctcttcggccagaggccatactggtgggttctagacaccgattactactccaatacctcagtccctctaattaagcagttcccggtgacttgcgagacaggacccggcagcccgagcggtcatgccatgggtacagccggcgtatattacgtgatggtgacctccaccctttccatatttcaagggaaaatcaaacctacttatcgtttcagatgtcttaatgtgattctttggctgggattttgggcagtgcagttgaacgtctgtttatcccgaatatacctggcagcacactttccacatcaggtggtggcaggagtgctgagcggaattgccgtagcggaaaccttcagccatatccacagtatttacaacgccagtctgaaaaaatactttttaatcacgttctttctgttcagcttcgctattggcttttatctgctacttaagggcttgggggtggacctcctctggacacttgagaaggcacagaggtggtgcgaacaaccagagtgggtacacattgacacgaccccatttgctagcctcctcaagaatttaggaaccttgttcggcttgggactcgctctcaatagtagcatgtacagggaaagctgtaaagggaagctctccaagtggctgccttttcggttgtcctccattgtggcttcgttggtcctgctgcacgtctttgatagcctgaagccaccaagtcaggtggagctggttttctacgtgctgtccttttgtaaatctgctgttgttcccctggccagcgtgtccgtcattccgtactgtttggcccaggtgttggggcagccccacaaaaaaagtctg

SEQ ID NO: 2968 - DNA, 1071 bp, Artificial Sequence
  derived and/or modified sequence
atggaggaaggaatgaacgttctgcacgatttcggtattcagtcgacgcactaccttcaagttaattaccaggactcgcaagattggttcattctcgtgtcagtcatcgctgacctgcgtaacgccttctatgtgttattccccatttggttccatctgcaggaggctgtggggattaaactcctgtgggtggccgtgatcggagactggctcaacctagtgtttaaatggattctcttcggacagaggccttattggtgggttttggacacagactattactctaataccagcgtgcccctgatcaaacagttccctgtgacttgtgaaactgggcccggatctccaagtgggcacgcaatgggaacagccggtgtgtactacgttatggtgaccagcacgctttcgatatttcagggcaaaatcaaacccacctacagattccgctgtttgaacgtgatcttgtggttagggttttgggctgttcaactgaatgtgtgcctgagcagaatttatctggcggcacacttccctcaccaagtggtagccggtgtcctaagcgggatcgccgtcgcagaaacgttttcccacattcacagcatctataatgcgtccctgaagaagtacttcctgattacattcttcctcttttcatttgcgatcggcttctacctgttgctgaaaggcctgggagtggacttactgtggactctggaaaaggcacagagatggtgtgaacagcctgagtgggtgcacatagacactacccccttcgcctccctgctgaaaaatttggggacactgttcggcctcgggttggccctaaacagtagcatgtaccgggagagctgtaaaggcaagctgagtaagtggttacccttccgcctgtctagcatagtcgcttcgctcgtgctattacacgtctttgatagcttaaaaccgccctctcaggtcgagttggtattctacgtgctctcattttgcaaatcagcagtcgttccgcttgcaagtgtctccgtcatcccttactgcctagcgcaggtactcggccagcctcataagaagtccttg

SEQ ID NO: 2969 - DNA, 1071 bp, Artificial Sequence
  derived and/or modified sequence
atggaggaaggtatgaatgtactccatgactttggcattcagtccactcattacttgcaggtaaactatcaggatagtcaagattggtttattttagtatcagtaatagccgacttgcggaacgctttctacgttttattccccatttggttccatctgcaggaagcagtcggcataaagctcctctgggtggccgtgatcggagattggctgaacctcgtattcaagtggatacttttcggccaacgcccatactggtgggttctggatacagattactatagtaatacttccgtgcctctgatcaaacagtttcccgtgacctgtgaaactggcccaggaagcccttccggccatgccatgggaactgccggagtctactatgtgatggtcaccagcaccttgagtattttccagggtaagattaaaccaacctatcgcttcagatgcctgaatgtgatactgtggttagggttttgggctgtgcagttgaacgtgtgtttaagcaggatctaccttgctgcccacttcccgcaccaggtagtcgctggtgtactctctggcatcgctgtggccgagacctttagtcatatccactccatttataacgcgtcactaaaaaagtactttctcatcaccttcttcctttttagttttgcgattggcttctacctgctgctgaagggcttgggagtggacctcctgtggacgttggaaaaagcccagagatggtgcgagcagccagagtgggtgcacatcgataccacaccttttgcgagcctattgaagaacctgggcaccctttttggactcgggctggccctgaactctagtatgtatagggagtcatgcaaagggaagctttcgaaatggctccccttcagactctcctccattgtcgcgtcacttgtcctcttgcatgtgtttgattccctcaaacccccgtcgcaggtggagctggttttctacgtactctctttttgtaaatccgctgtggttcctttagccagcgtgagtgtgatcccctattgtctagcccaggtcttagggcagccacacaagaagagcctg

SEQ ID NO: 2970 - DNA, 1071 bp, Artificial Sequence
  derived and/or modified sequence
atggaagaggggatgaacgtgctacacgatttcggtatccagtctacacactacctgcaggtgaattatcaggattcccaggattggttcatattggtttctgtcatagcggacctaagaaacgcgttttacgtgctcttccctatatggtttcacttgcaggaagctgtgggtataaaactgctatgggtcgccgtaattggagattggttgaaccttgtgttcaaatggattctgtttggtcagcgcccatattggtgggtgctcgatactgattactattccaacacttccgttcctctgattaaacaattcccagtgacatgtgagactggacccggatccccatcaggccacgcaatgggcacagctggtgtttattatgtcatggtgacatcaacactatcaattttccagggaaaaataaagccgacctatagattccgctgtctcaatgtgattttgtggctgggattctgggccgtgcagttgaacgtgtgcctgtcacggatctacctggcagcgcatttcccccatcaggtggtagcgggtgtgctgtcgggaattgctgtagcagagactttcagtcatatccactccatctataatgctagccttaagaaatactttctgattacctttttcttgttcagctttgcaatcggattctacctgcttctgaaggggcttggcgtcgacctcctgtggaccctcgagaaggcgcagcgctggtgtgagcaaccagagtgggtgcacatagacactactcccttcgcctcactactgaaaaacttgggcactctgtttggccttggcctcgccctgaattcctccatgtatcgggaatcatgcaaaggcaagcttagcaaatggctcccattcaggctatcttcaatcgttgctagtctcgtgttactacatgtgtttgacagtctcaaacctccctcgcaggtggagctcgtgttttatgtgctgagcttctgcaagagcgccgtggttccccttgcgtctgtgagtgtgataccatactgcctggcacaggttttgggccaacctcacaagaaatcactg

SEQ ID NO: 2971 - DNA, 1071 bp, Artificial Sequence
  derived and/or modified sequence
atggaggagggcatgaatgtgctccatgactttgggatacagtccacacattatctgcaggtcaactatcaggactcacaggactggtttatcctggtgtcagttatcgccgatctgcggaacgcattctacgtgctgtttccgatatggttccacctccaggaggcagtgggaataaaactgctgtgggtggcagtcatcggggattggcttaacctcgtgttcaaatggattttattcggacagagaccctattggtgggtgttggacacggactattacagtaacacctctgtacccttaatcaaacagttccctgtaacatgcgagacgggacccggctctccatctgggcacgcaatgggtacggcaggggtgtactatgtaatggttaccagtacactaagcattttccagggcaagattaagccaacctatagattcagatgcctgaatgtcattctgtggctcggtttctgggcggttcagctgaacgtttgtctatccaggatctaccttgccgcacatttcccacaccaagtcgtggccggcgtgctcagcggcatagctgtggccgaaacattcagtcacatccattcaatttacaacgcgtctctgaaaaagtacttcctgattactttttttttgtttagctttgccattgggttctacctccttctcaaggggctgggtgtcgatctcctgtggacactcgaaaaggcccagcggtggtgcgaacagcctgaatgggttcacattgataccactccgtttgcgtctctgttaaagaacctaggcacgctgtttggcttagggctggcactgaactcctcgatgtatcgagagtcttgcaaggggaaactcagtaaatggcttccctttagactatcatcgattgtggccagcctggtgctgcttcacgtttttgactccctgaaacctccttcccaggtggaactcgtcttctacgtgttgtctttctgtaagagtgccgtcgtcccattggccagcgtctcagttatcccatattgtctcgcccaagttttgggacagccgcacaaaaagagtttg

SEQ ID NO: 2972 - DNA, 1071 bp, Artificial Sequence
  derived and/or modified sequence
atggaagaaggtatgaacgttcttcacgacttcggcatccagtcgactcattacttgcaggtgaattaccaagactcacaggattggtttattctggtgtcggtcattgccgatctgcgaaacgctttctacgtgctgtttcccatctggttccatcttcaggaagcagtggggatcaaacttctttgggtagcggtgatcggagattggttgaacctggtgttcaagtggatcttgtttggacagcgcccttactggtgggtcctggatactgattactactccaatactagcgtgccgttgataaagcaatttccagtgacctgtgaaaccggtcctggatcgccctccggtcacgccatgggaacggccggcgtatactacgtgatggtgaccagcacgctctcgattttccaaggcaagataaaacctacttacagatttcggtgcctcaacgtgattctttggctgggattttgggcagtgcaactcaatgtgtgtctcagccgcatttaccttgccgctcattttccacaccaagtcgtggccggagtcttgtctggtatcgcggtagcagagactttttcacacattcattccatttacaacgcgtcgcttaagaaatactttctgattacgttcttccttttctcttttgcaattggattttacttgcttcttaaaggtcttggagtcgatctgctgtggacccttgaaaaggcgcaaagatggtgtgaacagccggagtgggtccacattgacacgaccccttttgcatcccttcttaagaatctgggcactctctttgggcttgggttggctctcaacagctcaatgtaccgtgagtcgtgtaaaggaaagctgagcaagtggcttcctttcaggcttagttccattgtggcatcgctggtgctccttcatgtctttgactccctgaagcctccatcccaagtcgagctggtgttttatgtgctttcgttttgtaagtccgcagttgttcccctcgcatccgtcagcgtgataccctattgcctggcacaggtccttggacaaccacataagaagagcctc

SEQ ID NO: 2973 - DNA, 1071 bp, Artificial Sequence
  derived and/or modified sequence
atggaagaaggtatgaacgtcctccacgattttggaattcaatcgactcactatctgcaggtgaattatcaagattcgcaagattggttcatccttgtgagcgtcatagctgatctgcgaaacgctttttacgtgctgtttcctatttggtttcatcttcaggaagcagtcggtattaagctcctttgggtggcggtgatcggagattggctgaatttggtgttcaagtggatcctttttggacagcgcccatactggtgggtcctcgatactgactactactcgaacacttctgtgccactcataaaacaattcccagtcacgtgtgaaaccgggccgggttcaccatcaggtcacgcaatgggaactgccggagtgtactacgttatggtgacgtcgaccctgtccatctttcaaggcaagatcaagcccacctatcgttttagatgtctcaacgtgattctgtggcttggcttttgggcggtgcagctgaacgtgtgcctgtccagaatctacctggcggcacatttccctcatcaagtggtggcaggagtgctttcaggcatcgccgtggccgaaaccttttcgcatatacatagcatctacaacgcgtcgcttaagaaatactttctcataaccttttttctgttttcctttgcgattggtttttaccttctccttaagggtctgggtgtcgatctgctctggactctggaaaaggcacagaggtggtgtgagcagcccgagtgggtccatattgataccacgccatttgcatctcttttgaagaacctgggcactctgtttggactgggcctggctcttaattccagcatgtacagggagtcctgcaagggaaaactgtcgaaatggctcccttttagactttcatcgatcgtcgcttcgctggtcctgcttcatgtgttcgactccttgaaaccaccttcgcaggtggaacttgtgttttacgtgctctcgttctgcaagtcagcagtggtgcctctggcttctgtgtcggtgattccttactgcctggcccaagtccttggtcaaccacataagaaatcgttg

SEQ ID NO: 2974 - DNA, 1071 bp, Artificial Sequence
  derived and/or modified sequence
atggaggaaggaatgaatgtgctgcatgacttcggtatccagagtacccattacctccaagttaactaccaagactctcaagattggtttatcctggtatcagtgatcgctgatttgcgcaatgccttctacgtcctcttccccatctggtttcacctgcaggaggctgtaggaataaagttgctgtgggtggcagtaattggcgactggctgaacctcgtctttaagtggatcctcttcggtcagagaccctattggtgggtgctggataccgattactactctaatacttccgttcccttgataaagcagttcccagttacatgtgagacaggccccggaagtccctctggtcatgcaatgggtactgctggcgtttattacgtaatggtgacctctactttgagcatcttccaaggaaagatcaaacccacataccgttttcgctgcttgaacgtgatcctctggctgggtttctgggctgtgcagttgaatgtctgtttgagccgcatttacctggcagctcacttcccccaccaggtcgtggcaggtgttttgtccggaatcgctgtggctgagacattctcacacatacactccatatataacgcctcactgaaaaaatacttccttataaccttcttcctcttcagcttcgctattggcttctacctgttgctcaagggacttggtgttgatctgctgtggacactggaaaaggcccagcgctggtgcgaacagccagaatgggtgcatattgacactactcccttcgcctctctcttgaagaacctgggtactctttttggcctgggactggccctgaattcttccatgtacagggagagttgcaagggcaagctgtccaagtggttgccctttaggctctccagcatagtggcttctctggtcctgctccacgtatttgacagccttaagcctccctcccaagtcgaattggtcttttatgtgctctcattctgcaagtcagccgtggtgcccttggctagtgtctctgttatcccttactgcctggcccaggtgttgggacaaccccacaagaaatcactg

SEQ ID NO: 2975 - DNA, 1071 bp, Artificial Sequence
  derived and/or modified sequence
atggaagagggcatgaatgtcttgcacgatttcggcattcaaagcacccactacctgcaggttaactaccaggatagccaagattggtttatcctcgtgtctgtgatcgctgacctcaggaacgctttctacgtactgttcccgatatggtttcacctgcaggaggcggtgggtatcaagttgctgtgggtggccgtcatcggtgattggcttaacttggtctttaagtggatattatttgggcagcgcccgtactggtgggtactggacactgattactactctaacaccagcgtaccacttataaaacaattcccagtgacatgcgagaccggcccaggcagcccgtctggtcatgccatgggtaccgcaggtgtctattacgtgatggtgacctcaacactgtctattttccagggcaagatcaagcctacctatcgcttccgttgtctcaatgtgatcctgtggctgggtttctgggctgttcagcttaatgtttgcctgagcagaatttacttggcggcccacttccctcaccaagttgtggcgggtgtgctttctggcatcgcggtcgcggagactttcagccacatccacagcatctataatgcaagcctgaagaaatatttcctgattacttttttcctgttttctttcgctatcggtttttaccttctgttgaagggactgggcgtcgatctgctctggacgctggaaaaggcccagcgatggtgtgagcaaccagaatgggtccatatcgacactacgccatttgcgagcctgctgaagaatctgggaacgctgttcggcctgggcctggccctaaattctagtatgtaccgcgaaagctgcaagggcaagctgtcgaaatggctgccattccggctgtcttcgatcgttgcttcgctggtcttgctgcacgtgttcgattcccttaagcccccgagccaggtggaactggttttttacgtgctgagtttttgcaagagcgcggtggtgccgcttgccagcgtgtctgtcattccttactgtctggcgcaagtgttgggtcagccgcacaagaagtccctg

SEQ ID NO: 2976 - DNA, 1071 bp, Artificial Sequence
  derived and/or modified sequence
atggaagaaggcatgaacgtgctacatgactttggcatccaaagcacacactacctgcaagtaaattaccaggatagccaggactggtttattctcgtgtccgtcatcgctgacctgaggaatgctttctacgtactctttcctatttggttccacttgcaagaagccgtcggaataaagctgctgtgggtagccgtcattggtgattggttgaacttagtcttcaagtggatacttttcggccaacgaccttattggtgggtgcttgatacggattactacagtaacacgagtgtgccccttattaaacagttcccagtaacatgtgagaccggtcctgggagcccctccggccacgccatgggtactgcaggagtgtactatgtgatggttacttctactctgtcaatcttccaaggcaagattaagcccacatacagattccgttgtctcaatgtcatcttgtggctaggcttttgggccgtgcaactgaacgtctgtctttctaggatttatctggcagcacactttcctcaccaggtggtcgctggggtattgtctggaatcgccgtggccgagaccttttcgcacattcatagcatctacaacgcctccctgaagaaatatttcctgattacattctttcttttctcctttgcaattgggttttacctgcttctgaagggtctgggggtggatctgctgtggacactcgaaaaagcccagcgctggtgcgaacagcctgaatgggtgcacattgacacgacgccctttgcatccctgttaaagaatctgggtaccctgttcggattgggcttggcacttaactcatctatgtaccgggagagctgcaaggggaagctgtcaaaatggctgccctttagattgtctagcatcgttgctagcctcgtcctccttcatgtgtttgacagccttaagcctccttctcaggtagaactcgttttctacgtacttagcttttgtaagtcggcggtcgtccccttagcctcagtgtccgtaataccttactgcctggcccaagtgcttggccaaccccacaagaagtcatta

SEQ ID NO: 2977 - DNA, 1071 bp, Artificial Sequence
  derived and/or modified sequence
atggaggagggaatgaacgtgctccatgattttggcattcaatcgacccattacctgcaggttaactaccaagattcgcaggactggttcatcctcgtgtccgtgatcgccgatcttcgaaacgcattctacgtgctgtttccgatctggttccacctccaggaggcagtgggaataaagttgttgtgggtggcggtgattggcgactggctgaatttggtgttcaagtggatcctgtttggccaacggccgtactggtgggttctggacactgactactactcaaacacctcagtgccgctgatcaagcagttcccagtgacgtgcgagacgggaccaggatcccctagtggacacgccatggggacggctggagtgtactacgtcatggttaccagcactctctccatcttccaaggcaagatcaagcctacgtacagattccgctgtttgaatgtgatcctctggctgggcttttgggccgtgcagctcaacgtgtgcctttctcgcatctacttggcagctcactttcctcatcaggttgtggcgggagtcctgtcgggaatcgctgtcgcagaaaccttctcgcacattcactcaatttacaacgcctcccttaagaagtatttcctgatcaccttctttctcttcagcttcgccatcggcttctacctgttgctgaaggggttgggggtcgacctgctgtggaccctggaaaaggcccaacgttggtgcgaacagccggaatgggtgcacatcgataccaccccattcgcctcgctgttgaaaaatctcggtacgctgttcggcttgggactcgccttgaattcctccatgtaccgcgaaagctgcaaaggaaagctgagcaaatggctgccgttcaggctttcgtcaatcgtggcctcactggtcctgctccatgtgttcgacagcctcaagccgccatcacaagtcgaactcgttttctacgtgttgtcgttttgtaaatcagccgtggtgccactcgcaagcgtcagcgtcattccttactgcctggcgcaggtgctggggcagccgcataagaagtcactc

SEQ ID NO: 2978 - DNA, 1071 bp, Artificial Sequence
  derived and/or modified sequence
atggaagaaggcatgaatgttttgcatgacttcgggattcagtctacgcattacctgcaggtgaattatcaggatagccaagactggtttattctggtgagtgtgatcgcggatctgagaaacgctttttatgtcttgtttcctatctggtttcatttgcaagaggccgtaggcatcaagctgctctgggtcgcagtgatcggcgactggttgaacctggtgttcaaatggatcctgtttggacaacgaccctactggtgggtactggacactgattactactctaatacctccgttcctctgattaagcagtttcctgtcacttgtgaaacgggacccggttccccatccggtcatgccatgggcaccgctggagtgtactatgtgatggtgacctcaacccttagtatcttccaggggaaaataaagccgacatataggttccggtgcctgaacgttattttgtggctgggattctgggccgtacagctgaacgtttgcctgtccagaatctatctggccgcccattttccacatcaagtggtggccggcgtacttagcggcattgctgtggctgaaacgttttcacacatacattcaatttacaacgccagtctgaaaaagtatttcctcattactttcttcctcttctcctttgctatcggcttctacttgctgctgaagggtttgggtgtggacctgctttggaccctcgagaaggcccaacgatggtgcgaacagccagagtgggtgcacatcgacacgacaccattcgcgtcccttctgaagaatctcggaactctcttcgggcttggtcttgcactcaacagctcaatgtaccgcgagagttgtaaggggaagctcagcaagtggctgccgtttcggctcagttccattgtggcctccttggtgttgttgcatgtcttcgattccctgaagcccccctctcaggtggagcttgtgttttatgtgctgagcttttgtaaatccgccgtggtacctttggcatctgtgtcagttataccctattgtctggctcaggtcctgggtcagcctcacaagaaatctctc

SEQ ID NO: 2979 - DNA, 1071 bp, Artificial Sequence
  derived and/or modified sequence
atggaggagggcatgaacgtcttacacgactttggtattcagtctactcactatttacaggtgaactaccaggactcccaagactggttcatcctcgtgagcgtgattgccgacctccggaacgcattctacgtgctctttccaatatggtttcacttacaggaagcagtcggcatcaagcttctctgggtggccgtaatcggagattggctgaatctcgtgtttaagtggatcctgttcggacagcgcccctattggtgggtgctggacactgattactattcaaatacctccgttcctctgatcaagcagttccctgtgacgtgcgaaacaggcccaggctccccatctggccatgccatggggaccgctggtgtctattacgtcatggtcacgtcaaccctgtcaattttccaaggaaaaatcaagccgacctaccgcttccgctgtcttaacgtgatactgtggctcggattttgggccgtgcagctgaatgtgtgtctctctaggatatatctggccgcgcacttcccccaccaggtagtcgctggtgtcctgtccggcattgcagtagccgagactttttcccacatacacagcatttacaacgcatcactgaagaaatactttctaatcaccttttttctgttttcattcgctatcgggttctatcttttacttaaaggattgggcgtggatttactctggaccctggagaaagctcagcgctggtgcgaacagcccgagtgggttcatattgacacgacaccttttgcatctttgttgaaaaatctgggtaccctttttggcctgggcctggctctgaacagctccatgtatagggagagctgcaagggtaagctcagcaagtggttgcctttccgactatcatctattgtggccagtctggtcctgcttcacgtttttgattccctgaagccccctagccaggttgaactggtgttctacgtcctttcattctgtaagagcgctgtggtgccgcttgccagcgtatccgtaattccttattgcctcgcccaggtcttaggacagccacataaaaagagcctt

SEQ ID NO: 2980 - DNA, 1071 bp, Artificial Sequence
  derived and/or modified sequence
atggaagagggaatgaatgtgcttcatgattttggaatccagtctactcattatctgcaggtgaactatcaggattctcaggattggttcatactcgtatccgtgatcgctgatctgagaaatgccttttatgttttatttcccatctggttccatctccaggaagctgtgggaataaaactcctctgggtggctgtgataggagattggttaaaccttgttttcaaatggatattatttggacagagaccctactggtgggttctcgatacagattattattctaatacttccgtcccgctcataaaacagttccctgtcacatgcgaaacagggcctgggtcccccagtggacacgccatgggaacagccggggtatattacgttatggtaacttccacactctccatatttcaggggaaaataaaaccaacttatcgttttcggtgtctcaacgtgatactctggctcgggttttgggcagtccagctcaatgtgtgcctctcccggatctatctggcagcccattttcctcaccaggttgttgccggagtgctctctggaatagccgtagccgagacattttctcatatacactctatctacaacgcctcgctgaaaaaatacttcctcattacatttttcctctttagttttgccattggattttatctcctgctcaagggactgggagtagatctattatggacgctcgaaaaagcacagagatggtgcgagcagcctgaatgggtgcatatcgatacaactccttttgcatccttattaaaaaatctcgggactctatttgggttgggacttgctctgaacagttccatgtacagggagagttgtaaggggaaattatctaaatggctaccttttagactttctagtatagtggcttctctagttcttctccacgttttcgattcactcaaacccccttcacaggtggaattggtattttatgtgttgtctttctgtaaatctgccgtcgtcccactcgcatcagtgtccgtcattccctattgccttgcacaggttctgggacagccacataagaaatcgttg

SEQ ID NO: 2981 - DNA, 1071 bp, Artificial Sequence
  derived and/or modified sequence
atggaggagggaatgaatgtccttcatgactttggcatccaatcaactcactacttgcaggtgaactaccaggattcgcaagactggttcatcctggtatccgtgatcgccgacttgcgcaacgccttctacgtcctgttcccgatctggttccacttgcaggaggccgtgggtattaagctgctctgggtcgcagtcatcggagactggctgaacctggtgttcaaatggatcctgttcggccagcggccatactggtgggtcttggatacggactactactctaacacctcagtccccctgatcaagcagtttccggttacctgcgaaactgggcctggcagcccgagcggccatgcaatgggaactgctggggtgtactacgtgatggtgacctcaactttgtcgatcttccagggcaagattaagccgacctacaggtttagatgcctgaacgtgattttgtggctgggattctgggcagtgcaactcaacgtctgtctgtcgcggatctatctggcggctcacttcccgcaccaagtggtcgcgggagttctgtcgggaatcgcagtggcggagactttctcccatatccactccatttacaatgcctcgctcaagaagtactttctcatcaccttcttcctgttcagcttcgctatcggattctacctgctcctgaaggggctgggtgtggacctgctttggaccctggagaaagcccagcgatggtgtgaacaacctgaatgggttcatatcgataccacgccatttgcgtccctcctcaaaaatcttggtactctcttcggactcggactggctcttaattcttcaatgtacagagaatcgtgcaagggaaaactctccaagtggctcccattccgcctgtccagcatcgtggcgtcgctggtcctgcttcacgtctttgatagtctgaagcccccgtcccaggtggaactggtgttttatgtgctctcgttctgcaagagcgccgtggtgccactggcctcagtgtccgtgatcccttactgcctggcccaggtgctcggccaaccgcacaagaaaagcctc

SEQ ID NO: 2982 - DNA, 1071 bp, Artificial Sequence
  derived and/or modified sequence
atggaggagggcatgaacgtgctccacgacttcggaatccagtccacccattacttgcaagtcaactatcaggattctcaggactggtttatcctcgtctcggtcatagccgacctgcgaaacgctttctacgttttgttccccatctggttccacctccaggaggccgttggcattaaactgttatgggtcgccgtcatcggtgattggctcaacctagtctttaagtggatcctgttcggtcagagaccgtattggtgggtactcgacacagattactactctaacacgtccgttcctcttattaagcaatttccagtcacatgtgagacaggtccaggctccccctccggccatgcgatgggcacggccggagtctactatgtcatggtcacctcgacactgtccatcttccaggggaagatcaaacccacataccgattccgatgtctaaacgtgatcctctggctcggattctgggcagtacaactgaacgtctgtctgtctcgcatctacctcgcagcgcactttccccaccaggtcgtggccggtgtgcttagcggtatcgctgtcgcggaaactttcagccacatccattcgatttacaacgccagcctcaagaaatacttcctgatcaccttcttccttttcagcttcgccatcggcttttaccttcttctaaaggggctgggcgtcgatttactctggacacttgagaaagcccagcgctggtgcgaacagcccgaatgggtccacattgacactacgcccttcgcctcattgttgaagaatttgggcaccctctttggactcggtcttgcgctgaactcttctatgtaccgcgaatcatgtaaaggaaagttgtcgaagtggttgcccttccgccttagcagcatcgtagcctcgttggtcctgcttcacgtgttcgactccttgaagccacccagccaggtcgaactggtcttttacgtcttgagcttctgtaagtcggccgtcgtgcctcttgccagtgtcagcgtgatcccttactgtctggcacaagttttaggccagccacacaagaagtccctg

SEQ ID NO: 2983 - DNA, 1071 bp, Artificial Sequence
  derived and/or modified sequence
atggaagagggcatgaatgtgctccatgacttcggtattcagagtacgcactacttacaggtgaactaccaggattcacaggattggttcattttagtcagcgtgattgccgacttaaggaatgccttttacgtgttgtttcctatctggtttcacctccaagaggctgttgggatcaaacttctgtgggtggccgtgatcggggattggctcaatttggtcttcaaatggatactgttcgggcagaggccctattggtgggtcctggatactgactactactcgaatacgtcagtgcctctgatcaagcaatttccagtgacttgcgagacaggacctggcagcccgtctggacatgccatggggacagccggcgtgtactatgtcatggtaacaagtaccttgtcaatttttcagggaaaaataaaacctacctatagattcaggtgcttgaatgtaattctttggctcggattctgggccgtgcagctaaacgtgtgcctctcccggatctacctcgctgcacactttccacaccaggtggtcgcgggggtgctcagcggcattgcggtcgctgagactttcagccatattcacagcatctacaacgcttcgctgaagaaatatttccttattacatttttcctcttcagttttgctattggcttctacctgctacttaagggtctaggagtggatctcctctggacccttgaaaaggcacagagatggtgcgaacaacctgaatgggtccacatagacacaactccattcgcctcgctcctgaaaaacctggggactctcttcggattggggcttgctttaaatagcagcatgtatagagagtcttgcaaagggaaactcagtaaatggctgcctttccgtctgtcctcgatcgtagccagcttggttcttcttcacgtgtttgatagtttaaagccccctagtcaggtcgagctggtgttttacgtcctgagcttttgcaagtccgctgtcgtccctctggcgagtgttagcgtgataccttactgtctagcccaggtactcggacagccacacaaaaagtccctg

SEQ ID NO: 2984 - DNA, 1071 bp, Artificial Sequence
  derived and/or modified sequence
atggaagagggaatgaatgtgctgcacgattttgggattcaatccacccattacctgcaggtcaactaccaggatagtcaagactggttcattctggtcagtgttatcgccgacctgcggaacgcgttctatgtgctgttccccatctggttccacctgcaagaagctgtgggtatcaagctgctctgggtcgctgtgatcggcgattggctgaacctggtattcaagtggatcctgttcggccagcggccgtattggtgggtcctcgataccgactattactcgaatactagtgtgcctctgatcaaacagttcccggtcacttgtgaaaccgggccaggctcgccaagcgggcatgccatgggaacggccggagtgtactacgtgatggtgacctcaactctctcaattttccaaggcaagatcaaacccacttacagatttagatgcctcaacgtgatactgtggctggggttctgggccgtgcaactcaatgtgtgtctctcgcgcatatacctggcagcccatttccctcatcaagtcgtcgccggcgtgctttcgggcatcgctgttgccgaaactttttctcacattcactcgatttacaacgcgagcttgaagaaatactttctgatcactttcttcctgttttctttcgctattggattctaccttctgctgaagggactcggagtcgacctgctctggaccctggagaaggctcagcgctggtgcgaacagccggagtgggtgcacatcgacactacgccttttgcgtcactgctgaagaacctgggaacccttttcggactgggtttggcattgaattcctcgatgtacagggaatcctgcaagggaaagctgtcgaaatggctcccgttccgactgtcgtccatcgtcgcatccctggtgcttctgcatgtgtttgacagcctgaagccgccttcccaagtggaattggtgttctacgtgttgtcgttctgcaagtccgcagtcgtgccgctggcctcagtgtcagttattccatactgtctggcccaggtgctgggtcagccgcacaagaaaagcctc

SEQ ID NO: 2985 - DNA, 1071 bp, Artificial Sequence
  derived and/or modified sequence
atggaggagggcatgaacgtcctccatgacttcggcatccagtccacacactatttgcaagtgaattaccaagactctcaggattggtttatcctggtgagcgtgatcgctgacctgaggaacgctttttacgtcctcttcccgatctggtttcacctgcaggaagcagtcggaatcaaactgctttgggtcgctgtgattggtgactggcttaaccttgtatttaagtggatactttttggacagaggccttactggtgggtgctggataccgactactacagcaatacatctgttcccttgattaagcaatttcctgtcacctgtgagacagggcctgggagcccaagcgggcatgcaatgggaactgcgggagtttactacgttatggtgacgtcgaccctctctatctttcagggaaagatcaagccgacttacaggtttcgctgtttgaatgtgatattatggctgggcttctgggcagtccagcttaacgtgtgcctgtccagaatctacctggccgcccatttcccgcaccaggtggttgccggtgttttgagtggaatcgccgttgccgagacattttcccatatccatagcatctataatgcttcgcttaagaagtatttcttgattacattttttctgttttcctttgcaatcggattttacctactactgaaaggactcggggtcgatctcttgtggacgttggaaaaagctcagaggtggtgcgagcaaccagagtgggttcacatcgacactacacctttcgcaagcctcttgaagaatctcggaaccctctttggactcggactagcattgaactcatctatgtaccgggagagttgcaagggcaaactctccaagtggctgccttttagactgtctagtatcgtcgccagcctggtgctgcttcacgtttttgattctctgaaaccaccttctcaggtggaactggtgttctacgtcttgagtttctgcaaatctgccgtggttcctcttgcaagcgtcagtgtcatcccttactgcctggcccaggtcctgggccaacctcacaagaagtcgttg

SEQ ID NO: 2986 - DNA, 1071 bp, Artificial Sequence
  derived and/or modified sequence
atggaagagggaatgaatgtcctgcatgattttggtatacagtcaacacactacttgcaggtcaattaccaggactcacaagactggttcattttggtgagcgtgatcgcagaccttaggaatgctttctacgtgctgttccctatctggttccacctccaggaggccgtgggcattaagctactctgggtcgcagtgataggcgactggctgaatctggtgttcaaatggattctgttcggccagagaccctactggtgggtgctggatactgactactatagcaacacatccgtgccactgataaagcagtttccagtgacttgtgagactggtcctgggagcccatcaggtcatgctatgggtactgctggagtgtattacgttatggtgaccagtacactgagcatatttcaaggaaaaattaaaccaacctaccggttcaggtgcttgaatgtcatactgtggctgggcttctgggcagttcaattgaatgtgtgtctgagccggatatacctggccgctcattttcctcaccaggttgtcgcaggggtgttgtccgggatagcagttgcagagacattttctcacatccacagcatttataatgcctcacttaaaaagtactttctgattactttctttctgttctcctttgccattggcttttatctgctgctcaaaggattaggggtagatttgctttggacactggaaaaagcccagaggtggtgcgagcagccagaatgggtccatatcgatacgaccccctttgcatccctgctgaagaatctagggaccctctttgggttgggacttgcactgaacagtagtatgtaccgggagtcatgtaagggcaagctgtccaagtggctcccttttcggctgtcctcaattgtggcgtcactggtactgctgcacgtgttcgacagtttgaagccgccttcacaggtcgaactggttttttatgtgttatcattctgtaagagtgcagtagtgccattggcctccgtgtccgtcattccttattgcctggcacaggtgctcggccagccccataaaaaatctctg

SEQ ID NO: 2987 - DNA, 1071 bp, Artificial Sequence
  derived and/or modified sequence
atggaagaaggcatgaacgtgcttcatgactttgggatccaatccactcactatctccaggtcaactaccaggactctcaagattggtttattctggtcagtgtaattgccgatctgaggaatgccttctacgtcctgttcccaatatggttccacttgcaggaggcagtcggcattaagcttctttgggttgcagtgattggggattggcttaatttagtatttaagtggattctgtttgggcagcgcccctattggtgggtcctcgacacagactattatagtaacacgtcagtgcccctgatcaaacagtttcctgtcacgtgcgagacgggacccggcagtccgtctggccacgccatgggcacagcaggggtctattacgtgatggtgacctctaccctgagcatcttccagggaaagataaagcctacctacaggtttaggtgcttgaacgtgatcctttggctggggttctgggcagtccaattgaatgtctgcctatcccggatatatctggccgcacattttccacaccaggtggtcgcaggcgtgctgtctgggatcgctgtggcagaaactttcagccacatccactccatctataacgctagcctgaaaaaatacttcctgatcacttttttcttgtttagctttgctattggtttctatctgctgctcaaagggctgggggtggatctgctgtggacccttgagaaggcacaacgctggtgcgagcaaccagagtgggtgcatatcgacacaactccatttgccagcttgctcaaaaacctcgggaccctttttgggctcggattagctttgaatagctctatgtacagggaatcctgcaaggggaagctctccaagtggcttccctttagactgtccagtatcgttgcttctctggtattgttgcatgtatttgacagtttgaaacccccaagccaagttgagctcgttttctatgtccttagcttttgcaaatcggctgtggtgcctctggcgtccgtgtctgtgataccatactgcctggcccaggtgctgggccagccacataagaaatcactt

SEQ ID NO: 2988 - DNA, 1071 bp, Artificial Sequence
  derived and/or modified sequence
atggaagaaggcatgaatgtgctccatgattttggaattcagtccacccattacttgcaggtcaactatcaggattcccaagattggtttattctggtgtcggtcatcgctgatcttcggaacgccttctacgtgctgttccctatctggtttcacctgcaggaggccgtgggcatcaagctgctctgggtcgctgtcattggggactggctgaatctcgtgttcaagtggatcctgttcggccaaagaccctactggtgggtgctcgacactgattactactcgaacacttccgtccccctgataaagcagttccctgtcacctgcgaaaccggcccgggaagcccgtcgggccatgctatgggaactgcgggagtgtactacgtgatggttacttcgactctgtcgatctttcaaggaaagatcaagccgacctaccggtttaggtgtctcaatgtgatcctttggctcggattctgggctgtgcagcttaatgtgtgcctctcgcggatctacctggccgcccatttcccacaccaggtggtggcgggggtgctcagcggcatcgctgtcgcagagacgttcagccatattcacagcatttacaacgcctccctcaaaaagtactttctgataacgttctttcttttttccttcgccattggattctacctgctgctcaagggactcggagtggatctgctgtggactctggaaaaggcacagagatggtgcgaacagcctgagtgggtgcacatcgacaccaccccgttcgcctcgctgctgaaaaacctcggaaccctgttcggattgggactggcgctgaacagctcgatgtatagagaaagctgcaagggtaaactgtcaaagtggcttccctttcggctgtcctccattgtcgcttcgctggtgctcctgcacgtgttcgactccctcaagccgccgtcgcaagtggaattggtgttttacgtgctctctttctgtaaatcggcggtggtgcctctggcatcagtgtcggtgatcccatactgccttgcccaagtgttggggcagccccataagaagtcgctg

SEQ ID NO: 2989 - DNA, 1071 bp, Artificial Sequence
  derived and/or modified sequence
atggaagagggcatgaacgtgctccacgatttcggcatccaatcgactcattacctgcaggtgaactaccaagattcccaggattggtttatcctggtgtccgtcatcgcggacctgaggaatgccttctatgtgctgttccccatctggtttcatctgcaagaagcggtggggatcaaattgctctgggtggcagtgattggggactggctgaacctggtctttaagtggatcctgttcggacagcgtccttactggtgggtgttggacaccgattactactccaatacctcggtgccgctcatcaagcaattcccagtcacctgcgaaaccggaccgggctcgccttcaggtcacgcaatgggaaccgccggtgtgtactacgtgatggtgacttccaccctctccattttccaagggaagatcaagcccacttacagattccgctgcctgaatgtgatcctgtggctcgggttctgggcggtgcagttgaacgtctgcctgtcgagaatctacctggcagctcatttcccgcatcaggtcgtggccggtgtgcttagcggtatcgctgtggccgagactttctcacacatccactcgatctacaacgcctcgttgaagaaatacttcctgattaccttcttcctgttctcattcgcgatcgggttctacttgctcctgaagggtctgggagtggatctcctgtggacgctggagaaagcccagagatggtgcgagcagccagaatgggtccacatcgacaccaccccgttcgcgtcgctgcttaagaatctcggcactctgttcgggctgggactcgcgctcaacagctcgatgtaccgggagagctgtaagggcaagctgagcaagtggctcccgttccgcctttcatcaatcgtcgcctcgctggtcctgttgcacgtgtttgacagcctgaagccaccgtcgcaggtggaacttgtgttttacgtgctgtcgttttgcaaaagcgcagtggtgccgctcgccagtgtttcagtgatcccatattgcctggctcaagtcctgggccaaccacataagaaatccctg

SEQ ID NO: 2990 - DNA, 1071 bp, Artificial Sequence
  derived and/or modified sequence
atggaagaaggcatgaatgttttgcacgactttggaatccagtcgacccattacttgcaggtcaactaccaggattctcaggactggttcattctggtaagcgtgattgcagatcttcggaacgcattctacgtgctgtttcctatctggttccatttgcaggaagccgtcggtatcaaactcttgtgggtcgccgtgattggagactggctcaaccttgtctttaagtggattttgtttgggcagaggccatactggtgggtgctggatactgactactactcgaacacgagcgtgcctctcatcaaacagttccccgtgacctgtgaaaccggacccggttccccgagcgggcatgctatggggaccgcaggagtgtactacgtgatggtgactagcacgctctcaatctttcaaggcaagatcaagcctacctatcgcttcaggtgtcttaatgtgattctctggcttggattttgggcagtccagctgaacgtgtgcttgtcccgaatatacttggctgcacactttcctcaccaggtggtggcaggggtgctgagcggcatcgccgtggcagaaactttttcgcatatccattccatatacaatgcttcactcaaaaagtatttcctgattaccttttttctttttagctttgcaataggattctacctgcttcttaagggtctgggtgtggatttgctctggactcttgagaaagcgcaacggtggtgtgagcaacccgaatgggtccatatcgacaccaccccatttgcctcgctgctgaaaaatctcggcactctcttcggcctgggtttggccctcaattcatccatgtaccgcgaatcgtgcaaaggaaagctgtccaagtggcttccattcagacttagctcgattgtggcctcgctggtcctccttcatgtgttcgatagtctcaagcctccttcgcaagtcgagctggtgttttacgtgcttagcttttgcaagtcggcagtggtcccactggcatcggtgtcggtgataccttactgtctcgcgcaagtactgggccagccccacaagaagtcgctt

SEQ ID NO: 2991 - DNA, 1071 bp, Artificial Sequence
  derived and/or modified sequence
atggaagaaggtatgaatgttcttcatgattttggaatacaaagtacacattatttacaagtaaattatcaagattcacaagattggtttatccttgtttcagttattgcagatttaagaaatgctttctatgtactttttccaatttggtttcatcttcaagaagcagttggaattaaattattatgggttgcagttattggagattggctaaatttagtttttaagtggatattatttggacaaagaccatattggtgggttcttgatacagattattattcaaatacttcagttccattaattaaacaatttcctgtaacttgtgaaacaggtcctggatcaccaagtggacatgctatgggtactgcaggagtttactatgtaatggttacttcaacactttctatttttcaaggaaaaataaaaccaacttatagatttagatgtttaaatgttatactttggctaggattttgggctgtacaacttaatgtttgtttaagtcgtatttatttggctgcacattttccacatcaagttgttgctggagtgttatcaggtattgcagttgctgagacattcagtcatatacattctatttataatgctagtctaaaaaaatattttcttataactttttttcttttttcatttgctattggattttatcttttgcttaaaggattaggagttgatttactttggacacttgaaaaagctcaacgatggtgtgaacaacctgaatgggttcatatcgatacaactccatttgcatcattattaaaaaatttaggaactctttttggattaggacttgcactaaattcttctatgtatcgagaatcatgcaagggtaaattatcaaagtggttaccattcagactttcttctatagttgcatcattagttttattacatgtttttgattctttaaaacctccaagccaagttgaattagttttttatgttttatctttttgtaagtcagcagttgttccattagcaagtgtaagtgttattccatactgtcttgctcaagtattaggacaaccacataagaaatcatta

SEQ ID NO: 2992 - DNA, 1071 bp, Artificial Sequence
  derived and/or modified sequence
atggaggagggaatgaacgtgctgcacgattttggaatacagagcacacactatctgcaggtgaactatcaggacagtcaagattggttcattctcgtgtcggtcattgccgacttacggaacgctttctatgtgcttttccccatctggttccacctgcaggaggcggttggcatcaaactattatgggtcgccgtaattggtgattggctgaatttggtctttaagtggattctcttcggccaaagaccttattggtgggtgcttgacacagattattactcaaacacatctgtcccccttatcaagcagttcccagttacatgcgagaccggtccgggctctccgtccggccacgcaatgggtacagccggggtgtattacgttatggtgacttcaactttatccatcttccagggtaaaatcaagccaacgtaccgattcagatgcctgaacgtgatactgtggctgggattctgggcggtgcaattgaacgtatgcctctcgcgtatttacttagcggctcatttcccccatcaggtggtcgctggagttctatcgggaattgccgtcgctgaaaccttttcgcacatacactcgatatacaatgcgtcattgaaaaagtactttctgattactttcttcttgttcagtttcgctatcgggttttacctgctgttaaagggactgggcgtcgacttgttgtggactctggagaaggctcagcgttggtgcgaacaaccggagtgggtacatatcgacacaacaccgtttgcgtctctgctcaagaatcttggtacactgttcggcctgggattagccctgaactccagcatgtaccgagagtcgtgcaagggcaagctgtcgaagtggctgccattccgccttagctcaatcgtggcgagtcttgtgctgctgcacgtatttgatagcctgaagccaccgagccaggtagaattggttttttatgtcttgtcgttctgcaaatctgccgtggttccactcgcctcggtgagtgtcattccctactgcctggcccaggtcctgggacaaccccataagaaatcgctg

SEQ ID NO: 2993 - DNA, 1071 bp, Artificial Sequence
  derived and/or modified sequence
atggaggagggtatgaacgtactgcatgacttcggtattcagagcactcactacttgcaagtcaattaccaggactcacaggattggttcatcctggtgagtgtgattgccgaccttaggaatgcattttacgttctgttccccatttggtttcacttgcaggaagctgtgggtataaaactgttgtgggtggccgtaattggagactggctcaatctggtctttaaatggatcctgtttggacaacgaccgtactggtgggtgctggacactgactactattctaatacgtctgtgcccctaatcaaacaattccccgtaacctgtgagacaggcccggggtctccctccggacatgctatgggtactgccggggtctactacgtgatggtaacttccaccctaagtatttttcaaggtaagattaaacccacctacaggtttaggtgcttaaatgtcattctctggcttgggttttgggctgtgcagttaaatgtctgcttgagccgcatctacctggcagctcacttcccccaccaggtggtggcaggcgtgctgtctgggatcgcagtagcagaaacgttcagtcatatccacagtatatataacgcatcactcaagaaatactttttaatcacattctttctattctcttttgctattgggttttacctccttttgaaggggctgggagtggacctcctatggacactggaaaaggcgcagagatggtgtgaacaaccagaatgggtacatatagatacaacgcccttcgcaagcttgcttaagaacctggggaccttgttcggacttggactcgccctgaactcatcaatgtaccgcgaaagctgcaaagggaaactctccaaatggcttccctttcggctgagctctatcgtcgcatccctggtgctcctgcatgtgtttgacagtctcaaacctccttcacaagtggagttggtgttctacgttttgtcattctgtaaaagcgcagtcgttcccttggcaagcgtgtctgtgataccatactgcctcgcccaagtccttggccaacctcacaaaaaatccctg

SEQ ID NO: 2994 - DNA, 1071 bp, Artificial Sequence
  derived and/or modified sequence
atggaagaaggaatgaatgtcctccatgatttcggaattcagtcgacccattacttgcaagtcaactaccaagacagccaagactggtttattcttgtttcggtgattgcagatctccgtaacgcattttacgtgttgtttccaatctggtttcacctgcaagaagccgtgggtataaagctcctgtgggtggcagtgatcggagattggcttaatctggtctttaagtggattctttttggacagaggccctactggtgggtgttggataccgactactactcgaatacctccgtgccactgataaagcaatttcccgtcacttgcgagactgggcctggctcgccctcgggacacgcgatgggaaccgcgggtgtgtactacgtcatggtcacttccactcttagcatatttcagggaaagattaagcccacctaccgctttaggtgtctcaatgtgattctgtggctgggcttttgggcagtgcaacttaacgtgtgcctgtcgagaatttacctcgcagcccactttcctcatcaggtcgtggccggagtgctgtcaggtattgcagtggccgaaacttttagccacattcattcaatttacaatgcctccctgaaaaagtactttcttatcacttttttcctgttctcatttgcgataggattttaccttctgctgaaaggcctcggggtggacttgctttggaccctcgaaaaagcacagcggtggtgcgagcaacctgagtgggtgcacattgatactactccttttgcctcgctgcttaagaatcttggaacgctgtttggcttgggtcttgcattgaacagctcaatgtaccgtgaaagctgcaagggcaagctgtccaagtggcttcctttcagactgtcatccatcgttgcgagccttgtccttcttcacgtgttcgactctctcaagccaccatcacaagtcgagctggtgttttacgtgctgagcttttgtaagagcgctgtcgtgccgctcgcatccgtgtccgtgatcccatactgccttgcacaagtcctcggacagccacataagaagtcgctt

SEQ ID NO: 2995 - DNA, 1071 bp, Artificial Sequence
  derived and/or modified sequence
atggaggagggtatgaacgtactgcacgacttcggtatacagtcaacacactacctgcaggtgaactatcaagactcacaagattggttcattctggtcagtgtaattgccgacctgcggaatgccttctacgtgctgttccctatttggttccacctccaggaagccgtaggtatcaagcttctctgggtcgctgtgataggggactggctgaatctagtctttaaatggatactttttggacagaggccctattggtgggtcctggatacagactactatagcaacacgtccgtcccccttataaagcagttccctgtcacctgtgagaccgggcctggttcacctagcggccatgctatgggcacagcgggtgtctattacgtgatggtaacgtccacgctgtccatattccagggtaaaatcaagccaacttacagattccggtgtttgaatgtgatcctgtggctggggttttgggcagtgcagcttaacgtctgcttgtcaaggatctatttggcagcgcatttcccccaccaggtggtggcaggggtcctgagtgggatcgctgtagctgaaacattttcccatatacacagtatttacaatgcgagcctgaagaaatactttcttattacttttttcttgttctcattcgcaattgggttctacctgctgctgaaggggcttggggtcgacctgttgtggactctcgaaaaggcacagcgctggtgtgagcagcccgaatgggtgcatatcgataccactccgtttgccagtttactgaagaacctgggaacattattcggacttggtctagccttaaattcttctatgtatagggaatcatgcaaagggaaactcagtaagtggctaccgtttcgccttagctccatcgtagccagcctagtgctcctgcacgtatttgactcacttaagcccccatcgcaggtggagcttgttttctatgtcctgagtttctgcaaatcggcagttgtgccactggcttccgtcagcgtgatcccctattgtttggcgcaggtccttgggcagccgcataaaaagtcgctg

SEQ ID NO: 2996 - DNA, 1071 bp, Artificial Sequence
  derived and/or modified sequence
atggaggaaggtatgaacgttttgcacgattttgggatccaatctactcactacctgcaggtgaattaccaggactcccaggactggttcatcctggttagcgtcatcgcggacctccggaatgctttctacgttctgtttccgatttggtttcatctccaggaggccgtcggtatcaagctgctctgggttgcagtaatcggagattggcttaacctcgtgttcaagtggatccttttcggacaacgaccatactggtgggtgctggatactgactactactccaatacctctgtgccactgatcaagcagtttccggtgacttgtgaaaccggtccaggctcaccaagcggccacgccatgggaaccgcaggagtctactacgtcatggtcacctcaaccctgtcgattttccaagggaaaatcaagcccacctacaggttccggtgtctgaacgtgatcttgtggcttggtttctgggcggtccaactcaacgtttgcctgtcgagaatatacctggcggcccacttcccacatcaggtggtcgcgggagtgttgtcgggaatcgcggtcgccgaaacttttagccatatccactcaatctacaacgcctcactgaagaaatacttcctcattaccttttttctctttagcttcgcaatcggattctacctgctgctcaaagggctgggtgtggacctcctgtggactttggaaaaagcccaaaggtggtgcgaacaacccgaatgggtccatatcgatacgactccattcgcctccctgctgaaaaatctgggcactctgtttggcctgggactggccctcaactccagcatgtaccgggagtcgtgtaagggtaagctgtctaagtggttgccgttccggctgtcgtcgatcgtggcatcgctggtgctgctccacgtgttcgactcactcaagccgccttcccaggtggaactggtgttctacgtgctgagcttttgcaagtcggccgtggtgccgctcgcctcggtttcagtgattccgtattgcctggcccaagtgctcgggcagccacataagaagtccctt

SEQ ID NO: 2997 - DNA, 1071 bp, Artificial Sequence
  derived and/or modified sequence
atggaagaggggatgaatgtgctccacgattttggaatacagtcaacccattacctccaggtgaactaccaggactcccaagattggtttattctcgtatcggttatcgcagatttgaggaatgcattttacgtgttgttccctatctggttccacctgcaggaagccgtagggattaagctgctctgggtcgccgtcatcggagattggctgaatctggtcttcaagtggattctctttggacaaaggccttactggtgggtcctcgacacagactattattccaacacttccgtgccccttataaagcagttcccggtcacctgcgaaacaggaccgggaagccccagtggccacgcaatgggcaccgcaggagtttactatgtgatggtgacctccacactgtcaatcttccagggcaaaatcaagccaacatatcgctttcggtgtcttaatgtaatcctctggttggggttttgggccgtgcagttgaatgtgtgtttgtccaggatttatctggcagcccatttcccacatcaggttgtggccggcgttctttctgggatcgcagtagcagagactttttcacacattcacagtatctacaatgcatctcttaaaaaatacttcctgattacattcttcctcttcagtttcgctattggtttttatctgctgctcaagggtctaggtgtggatctgctttggacattggagaaagcacagcgatggtgcgagcaaccagagtgggtccacattgataccacccccttcgcctcgctgcttaagaacctgggtaccctgtttgggcttggcctggccctgaattccagtatgtaccgggagtcctgcaaagggaagttatctaaatggttgcctttcaggttgagctctatagttgctagcctggtcctcttgcacgtattcgactcgctgaagcccccttcccaggttgaactggtgttttacgtgctctctttttgtaagagtgctgttgtgcctcttgcctcggtgtctgtcattccatattgccttgcacaagtactcgggcagccccataaaaagagcctg

SEQ ID NO: 2998 - DNA, 1071 bp, Artificial Sequence
  derived and/or modified sequence
atggaggagggcatgaatgttctgcatgacttcggcatccagagcacacactatctccaagtgaattatcaggatagccaagactggttcatcctagtgagcgtcatcgcagatctgaggaacgccttctacgtgctctttcctatctggttccatctgcaagaagctgtaggaatcaagctgctttgggtcgccgtcatcggcgattggttgaacctggtctttaagtggatcctctttgggcagcgaccttattggtgggtgctggatactgactattattccaatacttctgtaccccttattaaacaattccccgtgacctgtgagacaggtccaggatccccttctggccatgccatgggaaccgcgggggtgtattatgttatggtcaccagcaccctttccatcttccaggggaagatcaagccaacatacaggttccggtgcctgaatgtgattctttggctgggcttctgggctgtccaactgaacgtttgtttgtcccgtatctatctcgcagcccatttcccccaccaggtggtggctggcgtcctaagcgggatcgccgtcgccgagaccttctcccatatccacagcatctataacgcatctttaaagaagtattttctgatcacattctttctgttttctttcgctatcggattctatctcctcctgaaaggactcggcgtcgatctgctgtggaccctggaaaaggcgcagcggtggtgcgagcaacccgagtgggtccatatagacaccacgccatttgcctcactgctcaaaaatcttgggacattgtttggactgggtctggctctgaactcttcaatgtaccgtgagtcctgcaaaggcaaactcagcaaatggctaccattccgcctgagcagcatcgtggcttccttagtgctgctccatgtgtttgattcactgaagcctccctcccaggtggagctggtgttctacgtcctgagcttctgcaaatcggcagtcgtccctttagcaagcgtgagcgtgattccgtactgcctggcccaggtcttggggcaaccccacaaaaaaagccta

SEQ ID NO: 2999 - DNA, 1071 bp, Artificial Sequence
  derived and/or modified sequence
atggaggaagggatgaacgtgctacatgactttgggattcagtctacacactatctgcaagtgaactatcaagatagccaggactggttcatactggtaagtgtgattgccgacctccgcaacgctttttacgtcctatttcctatctggttccacctgcaggaagctgtgggtattaaattactatgggttgcggtaatcggtgattggctcaaccttgttttcaagtggattttattcggacaaaggccttattggtgggttctggacacagactactattccaatacaagtgttcctctaattaaacagtttcccgtgacatgtgagacagggcctggctctccttctgggcacgctatgggaactgctggcgtgtattacgtgatggtgactagcacgcttagtattttccagggtaagatcaagccgacctaccgatttaggtgtttaaacgtcattctctggctcggattctgggcggtccagctaaacgtgtgtctttcccgcatttatctggctgctcacttcccccaccaggtagtcgccggcgttctgagtggcatcgccgtcgccgagacgtttagtcatatccactctatatacaacgcctcactaaaaaagtatttcctgatcaccttcttcctgttcagctttgctatcggattctacttgctgctcaagggcctcggtgtcgatcttctgtggaccctggagaaggcccagagatggtgcgagcagcctgaatgggttcatatcgatacaactcctttcgcttcgctgttaaagaacctcggcacactgtttggtctcggactggcactcaattcttccatgtaccgagaaagttgcaagggaaagctgagcaagtggctgccattccgcctgtcttcaatcgtggccagcctggtgctgctccacgtcttcgactcccttaagccaccctcccaggtagagctcgtattctacgtgctgagcttttgtaagagcgcagtggtgccactagcctccgtgagcgtgataccgtactgtctggcccaggtccttgggcagcctcataaaaagtcccta

SEQ ID NO: 3000 - DNA, 1071 bp, Artificial Sequence
  derived and/or modified sequence
atggaagaggggatgaacgttctccatgactttggcattcagtccacacattatctgcaggtaaactatcaggattcccaggattggtttatcctcgttagcgtcatcgctgatttgagaaacgccttctacgttctcttcccaatttggtttcatctgcaggaggctgtcgggattaagctgttatgggtagccgtaatcggagactggttaaatctggtcttcaagtggatcttgttcggccagagaccgtactggtgggtactagatactgattattacagtaacacctctgttcccctgatcaagcagtttccagttacatgcgaaaccggccctgggagccctagtggccacgccatggggacagctggcgtgtactatgtgatggtgacttcgacactgagcatttttcaagggaaaattaaacctacatacagatttaggtgcctcaatgtaatactttggctgggcttttgggccgttcagctcaatgtgtgtctctctcgaatttatctggccgctcacttccctcaccaggtcgtggctggggttctctctggaatagccgttgcagagactttttcccacatccatagtatctacaacgcttctctgaagaaatattttctgattacttttttcttgttttcattcgctattgggttctacctcttgctaaaaggcctgggtgtggacttgctgtggaccctggaaaaggcccagcggtggtgtgaacagcccgagtgggtacacatagataccacgccttttgccagtctcctgaagaatttaggcaccctgtttggtctcggactggctctaaacagctctatgtatcgggagtcctgtaagggaaagctttctaaatggctgcctttcaggttatctagcattgtggccagcttggtgctgcttcatgtgtttgacagcctgaaaccaccttcgcaggtcgagctggtgttctatgtgctctccttctgcaagtcagctgtagtccctctggcctccgtctcagtgattccttactgcctggcgcaggttttgggtcagccccacaagaaatcactg

SEQ ID NO: 3001 - DNA, 1071 bp, Artificial Sequence
  derived and/or modified sequence
atggaagagggtatgaatgtccttcacgacttcggcatccaaagcacccattatctccaagtcaactaccaggattcccaagactggttcatcctcgtctccgtgattgcggacctgcgtaatgcattctatgtcctcttcccgatctggttccatcttcaagaagccgtgggaatcaagctgctgtgggtggctgtcatcggggattggctcaatcttgtgttcaagtggatcctcttcggccagcggccgtactggtgggttctggacacggattactactccaacaccagcgtcccacttatcaagcagttcccggtgacgtgcgagactggtcctggatcgcccagcggccatgctatgggcaccgccggtgtgtactacgtgatggtgacctccaccttgagcatctttcaaggcaaaatcaagccgacctaccggttcaggtgcctcaacgtgatcctgtggctgggattctgggccgtccagctcaatgtctgtctgagccgaatttacctcgcggcccactttccacaccaggttgtggcaggagtgctctccggaattgcagtcgccgaaaccttctcacacatccattccatttacaacgcctccctcaaaaagtacttcctgatcactttctttctgttttcgtttgcaattgggttctacctcctgctgaagggactcggagtcgacctcctctggactcttgaaaaggctcagagatggtgtgaacaacctgagtgggtccacatcgacactactccgttcgcctcccttctcaagaaccttggtactctgttcggattgggactcgcgctcaactccagcatgtaccgggagtcatgcaaaggaaaactgtcgaagtggctccccttccggctttcgtcaatcgtggcgtcgctggtgttgctccatgtgttcgatagcctgaagccgccttcacaagtggaactggtcttttacgtgctgtcattctgcaagtccgcggtggtgccgctggcgtcagtgagcgtcattccatactgcctggctcaagtgctcggccagccacacaaaaagagcctg

SEQ ID NO: 3002 - DNA, 1071 bp, Artificial Sequence
  derived and/or modified sequence
atggaagagggaatgaacgtgctgcacgattttggcattcagagcacccactaccttcaggtcaactaccaggattcgcaagactggtttattcttgtgagcgtgatagcagaccttcgcaatgccttttacgttctcttccccatctggtttcatcttcaggaagccgtgggtattaagttgctgtgggtggcagtgattggcgactggctcaacctggtgttcaaatggattctgtttgggcagcgcccttactggtgggtccttgataccgactactatagcaacacttcagttcctttgatcaaacaatttcctgtcacttgcgaaaccgggccgggttccccttccggccacgctatggggaccgcaggcgtgtactacgtgatggtcacctcgaccctttcgatttttcaaggaaagatcaagccaacttaccgattcagatgtctcaacgtgattctctggctcggtttttgggctgtgcaactgaatgtctgtctcagcagaatatacttggcagctcatttcccccaccaagttgtcgcaggtgtgctgagcggcattgcagtggccgaaaccttttcgcacattcactcaatctacaacgcatccctgaaaaagtactttctgattaccttttttctgttctcgtttgcaattggattttaccttcttttgaagggacttggtgtggatcttctttggactctcgaaaaggcacagcggtggtgtgaacaacctgaatgggtgcatatcgataccacgccatttgccagccttcttaagaaccttggaaccctgtttggtctgggacttgccctgaactcatcaatgtacagagaatcatgcaaaggcaagctgagcaagtggcttccttttagactgtcatcaatagtggcatcacttgtattgttgcacgtgtttgattcgctcaagccgcccagccaagtggagctggtgttttacgtgctctcgttttgtaagtccgctgtcgtgccactcgcaagcgtgtcggtgattccttattgtctggcacaggtccttggtcaaccacacaaaaagtccctc

SEQ ID NO: 3003 - DNA, 1071 bp, Artificial Sequence
  derived and/or modified sequence
atggaggaagggatgaacgtgctccatgattttggtattcaatcgacccactacctgcaggtcaactaccaggattcccaagactggttcattctcgtgtccgtgattgctgacctcagaaatgcgttttacgtcctctttcctatatggttccatctgcaagaagcagtcggcataaagctgttgtgggtcgcagtcataggagattggctcaacctggtctttaagtggatcctctttgggcaaagaccttactggtgggtgctcgacactgattactactcgaatacttcggtccccctcattaagcaattccctgtcacttgtgaaaccggccccggttccccttcaggtcacgcaatgggtaccgcaggcgtgtactacgtcatggtgacttccactctgtcgatctttcaaggcaaaatcaagcctacttaccgcttccggtgtcttaatgtcatcctttggctgggtttctgggcagtgcagctgaacgtgtgcctgtcacggatttatctggcagcgcatttcccgcaccaagttgtggccggggtcctttccggtatcgccgtcgcagaaactttttcccatattcatagcatctacaacgcatccctgaagaagtacttccttattactttctttctgtttagcttcgcaattggtttctaccttcttctgaagggtctgggtgtggatctgctttggactctcgagaaggcacagaggtggtgcgaacaacctgaatgggtccatatagatactacccccttcgcatcgctcctgaagaatctgggaacgctctttggactcggacttgcgcttaattcgtcgatgtacagagaatcatgcaagggaaaacttagcaagtggttgcccttcagactttcctcaattgtagcgtcactcgtgctgctgcatgtgtttgatagcctgaagccaccatcacaagtggaactggtgttctacgtgcttagcttttgtaagagcgcagtggtgcctctggcatcggtcagtgtgattccctactgtctggctcaggtattgggccagccacacaaaaagtccctc

SEQ ID NO: 3004 - DNA, 1071 bp, Artificial Sequence
  derived and/or modified sequence
atggaggagggtatgaatgttttgcatgatttcggtattcaaagtacccattacttacaggtcaactaccaggatagccaagattggttcattctggtttccgttatcgcagatctcaggaatgccttctatgtcctgttccctatctggtttcacctgcaagaagcagtggggatcaagctgctgtgggtagctgttatcggagactggctaaatttggtgtttaaatggatcctctttggtcaaagaccctactggtgggtcttggatactgattactactctaacacaagtgtgcctctgataaagcagttccccgtgacctgtgaaaccggccctgggagccccagtggtcacgccatgggcaccgccggcgtatattatgttatggtgacgtccacgctttccatctttcagggaaagatcaagcctacataccgtttccggtgcctcaacgtaattttatggctggggttctgggccgtgcaacttaacgtttgtctgtcacgcatctatcttgctgctcacttcccccaccaggtagtagccggagtcctgtcaggtatcgccgtagccgaaacgttcagtcacatccactccatttacaacgcttccctcaagaagtacttcttgattaccttctttctgttcagctttgccatcgggttctacttactgctgaaagggctgggtgtggacctgctttggaccttggaaaaagcgcaacgatggtgcgagcagccggaatgggtgcacattgatactaccccattcgcttctctgctcaaaaatctcggaaccctctttgggctgggcctggccttaaactcaagcatgtaccgtgaatcgtgcaagggcaaactctcaaagtggctgccgttccgattatcctccatcgtggcaagcctggtgcttttgcacgttttcgactccctgaagcctccaagtcaagtggaattggttttttacgtgttgtccttttgcaagtccgctgtcgtccctctggcatccgtatccgtcatcccgtattgtctcgcccaggtgctgggtcagccacacaaaaagagtctt

SEQ ID NO: 3005 - DNA, 1071 bp, Artificial Sequence
  derived and/or modified sequence
atggaggaaggcatgaacgtgctgcacgactttggaattcagtcgacccactacctgcaagtcaactaccaagattcgcaagactggtttatacttgtgagcgtcatcgcggatctgagaaacgcgttctacgtgcttttcccgatctggttccatctccaagaggctgtgggcatcaaacttctgtgggttgccgtcatcggtgactggctgaaccttgtattcaaatggattctctttggacagcgcccgtactggtgggtgctcgataccgattactacagcaacaccagtgtgcctttgatcaagcaattccctgtgacgtgtgaaactggtccgggatctccatcgggacacgctatggggaccgccggcgtgtactatgtcatggtaacttccaccctctcgattttccagggcaagatcaagccgacctaccgttttcgctgcttgaacgtgatcctttggttgggattctgggccgttcagctcaatgtgtgcttgagccggatctatctggccgcgcatttccctcaccaggtcgtggctggtgtgctttcgggaatcgccgtggccgagactttttcacacatccattcaatctacaatgcttcactgaagaagtacttcctgattactttcttccttttctcctttgcaatcgggttctacctgctccttaagggactcggggtcgacctgctgtggacgctggagaaggctcagcggtggtgcgaacagcccgaatgggtgcacatcgacaccactccgttcgcgtcgctgttgaaaaatctgggtaccctttttggcctcggactcgcattgaattcgagcatgtaccgcgaatcgtgcaagggaaaactgagcaaatggctcccattcagactgagttctatcgtggcatccctcgtccttctgcacgtgttcgactcgctgaagccaccgtcccaagtggagttggtattctacgtgctctctttctgcaagtccgcagtggtcccactggcctcagtttccgttatcccatactgtctggcccaggttctcgggcagccccataagaagtcactg

SEQ ID NO: 3006 - DNA, 1071 bp, Artificial Sequence
  derived and/or modified sequence
atggaagaaggtatgaatgtattacatgattttggtatacaatcgacgcattatttacaagtaaattatcaagattcgcaagattggtttatattagtatcggtaatagcggatctacgaaatgcgttttatgttctatttccgatatggtttcatctacaagaagcggtaggtataaaattactatgggttgcggtaataggtgattggctaaatttagtttttaaatggatattatttggtcaacgtccgtattggtgggttttagatacggattattattcgaatacgtcggttccgctaataaaacaatttccggtaacgtgtgaaacgggtccgggttcgccgtcgggtcatgcgatgggtacggcgggtgtatattatgtaatggtaacgtcgacgttatcgatatttcaaggtaaaataaaaccgacgtatcgttttcgttgtctaaatgttatattatggttaggtttttgggcggtacaactaaatgtatgtttatcgcgtatatatctagcggcgcattttccgcatcaagtagtagcgggtgtattatcgggtatagcggtagcggaaacgttttcgcatatacattcgatatataatgcgtcgttaaaaaaatattttttaataacgttttttttattttcgtttgcgataggtttttatctattactaaaaggtttaggtgttgatttactatggacgttagaaaaagcgcaacgatggtgtgaacaaccggaatgggtacatatagatacgacgccgtttgcgtcgttattaaaaaatttaggtacgttatttggtttaggtttagcgctaaattcgtcgatgtatcgagaatcgtgtaaaggtaaactatcgaaatggttaccgtttcgtctatcgtcgatagtagcgtcgctagtactattacatgtatttgattcgctaaaaccgccgtcgcaagtagaactagtattttatgtactatcgttttgtaaatcggcggtagtaccgttagcgtcggtatcggtaataccgtattgtctagcgcaagtactaggtcaaccgcataaaaaatcgtta

SEQ ID NO: 3007 - DNA, 1071 bp, Artificial Sequence
  derived and/or modified sequence
atggaggagggtatgaacgttctgcacgacttcggcattcaatccactcattacttgcaagtgaactaccaggactcgcaggattggtttattcttgtgtccgtgatcgcagatcttagaaacgctttctacgtgctgtttcctatctggttccatcttcaagaagccgtgggtatcaagctcctttgggtggcagtcatcggagactggcttaacctggtgttcaaatggattcttttcggacagaggccttactggtgggtgctcgacacggactactattccaacacctcagtccctcttatcaagcaatttcctgtgacttgtgaaaccggacccggttcaccgtcgggacatgccatgggaaccgcgggggtgtattatgttatggtgacgtccacgctctcgatctttcaaggcaagattaagcctacttacaggtttcggtgccttaatgtcattttgtggctgggtttttgggcggttcaacttaacgtgtgtctgtcaagaatttaccttgctgcccacttcccacatcaagtggtggctggagtcctttcgggaatcgcagtggcagaaacctttagccatatacattccatctacaatgccagcctgaaaaagtactttcttattaccttcttcctgttttcgtttgcaattggattttacctgctgttgaaaggcctcggagttgacctgctgtggactttggaaaaagcccaacggtggtgtgaacaaccagaatgggtgcatatcgatactaccccgtttgcatcactgttgaaaaacttgggaaccctttttggtcttggactggcactcaactcgtccatgtaccgcgagtcctgtaaggggaagctcagcaaatggcttccatttcgtctgagctcgatcgtcgcgtcccttgtcctcctccatgtgtttgactcactgaaacctccttcgcaagtggagttggtcttttacgtcctgtcattctgtaaatccgcggtcgtgcccttggcgtcggtgagcgtgattccttactgtttggcacaggtgcttggtcagccacataagaagtccctg

SEQ ID NO: 3008 - DNA, 1071 bp, Artificial Sequence
  derived and/or modified sequence
atggaagaaggcatgaacgtgctccacgatttcggaatccaatcgacccactatctccaggtgaactaccaggacagccaagactggtttatcttggtgtcggtgatcgccgacctgcgcaacgccttctacgtgctcttcccaatctggttccacctccaggaagctgtgggcatcaagctcctgtgggttgcagtgatcggtgactggcttaacctggtgttcaagtggatccttttcggtcagcgcccgtactggtgggtgttggacactgactactacagcaatacttcagtcccgctcatcaagcaattcccggtcacgtgtgagactgggcctggatccccatcgggacatgccatgggcactgccggtgtctactatgtgatggtgactagcaccctgtccatctttcaagggaagattaagcctacttacaggtttcggtgcctgaatgtgatcttgtggctgggtttctgggcggtacaacttaatgtctgcctctcgcggatctacctggcagcacacttcccgcaccaggtcgtcgccggcgtgctcagcggtattgcagtggctgaaaccttctcccacatccacagcatctacaacgcctccctcaaaaagtactttctcatcacgttctttctgttctcgttcgccatcggtttctacctgctcctgaagggactgggcgtcgacctgctgtggaccctggagaaagcacagaggtggtgcgaacagcctgaatgggtgcatatcgacacgaccccgtttgcctcactgctcaagaacctggggactctctttggacttggacttgcgctcaattcgagcatgtaccgggaatcgtgcaaaggaaagctgtcaaagtggctgccgttccgcctctcgtccattgtcgcatcactcgtcctgctgcacgtgttcgactcgctcaagccaccatcgcaagtggagcttgtgttctatgtgctttccttctgcaagtccgctgtggtgccacttgcgtcggtgagcgtgatcccgtactgcctggcacaggttctgggacaaccacataagaagtccctg

SEQ ID NO: 3009 - DNA, 1071 bp, Artificial Sequence
  derived and/or modified sequence
atggaggagggaatgaatgttctccatgattttgggatacaatcgactcactatttgcaagttaactatcaagactcacaagattggttcattcttgtatctgtaattgcagatctcaggaatgccttctatgtcctgttcccaatttggttccacttacaggaggccgtcgggattaaacttttatgggttgctgttattggagattggctaaatttagttttcaagtggattcttttcggacagcgtccatattggtgggttctggatacggactactattcaaatacctccgttccactaattaagcaattcccagtgacatgcgagaccggacctggatccccatctggacacgctatgggtaccgctggtgtgtactatgtgatggtaactagcacattgtcaatcttccaaggtaaaatcaagccaacgtataggtttcgttgcctgaatgttatcctgtggttgggtttttgggcagtacagctcaatgtgtgcttatccagaatctaccttgctgctcatttccctcaccaggttgttgcaggtgttttgtctggtatcgcagtagctgaaacgttctctcatattcacagtatctataacgcttctttgaagaaatattttcttatcaccttctttctgttctcgttcgctatcggtttttatttactgctcaagggtttgggtgtggatttactgtggactcttgagaaagcacaacgttggtgtgagcagcctgagtgggtccatatagacactacaccgtttgcgtcactgctcaagaatcttggtacccttttcggtctggggcttgcattaaactcatcaatgtacagggagtcatgcaaaggaaagctgtcaaaatggcttcctttcaggttgtcgagcattgttgcttctctcgtacttctccatgtgtttgatagtctcaagccaccttctcaagtggaattggtcttttatgtgctctcgttttgcaagtctgctgttgttccgctggcatcagtgtctgttatcccttactgtttagcccaagttttgggacagcctcataagaagtctctg

SEQ ID NO: 3010 - DNA, 1071 bp, Artificial Sequence
  derived and/or modified sequence
atggaagaaggtatgaatgtcctgcacgattttggtatccagtctacacactaccttcaggtgaattaccaggactctcaggattggtttatcctggtttccgtgatcgccgatctgcggaatgctttctacgtgctattccctatttggttccatttacaggaagccgtgggcatcaaactactctgggtggcagtgattggcgactggttgaatcttgtgtttaagtggatattgttcggacaacgcccctactggtgggtgctggacactgactattattctaatacatctgtgccacttattaagcagttcccggtgacttgtgaaacagggccaggctccccgagcggacatgccatgggtactgccggcgtgtactacgtgatggtgacttctacgctctctatctttcagggtaagatcaagcccacctatcggtttagatgtctcaacgtcattttgtggctgggcttttgggccgttcagttgaatgtgtgtctatcccgtatatatttggcagctcacttccctcatcaagtcgtagccggtgtactgtctgggatagctgttgcggaaacattctcccacatacattccatttataacgcctcccttaagaagtacttcctcattaccttctttctcttctcctttgccatcggcttctaccttctcctgaaggggttgggcgtcgacctgctatggaccctggaaaaagcacagaggtggtgcgaacaaccggaatgggtgcatatcgacactaccccatttgcgtcccttctaaagaacttggggacactatttggcctgggcctggccctgaactcctcaatgtaccgtgaaagttgcaaaggaaagctttcaaagtggctgccttttagactctcctcaatcgtggctagtctggtgctgttgcatgtcttcgactctctgaagcccccttcacaagtggaactggtgttctatgtgctgtctttttgcaagagcgccgtggtccccctagccagcgtctccgtgattccttattgcttggctcaggtcctgggccaacctcacaagaaatccctc

SEQ ID NO: 3011 - DNA, 1071 bp, Artificial Sequence
  derived and/or modified sequence
atggaagaaggcatgaatgtcttacatgacttcggcatccagtcaacacattatcttcaagtaaactatcaggactctcaggattggtttattttagtatccgtcatagccgatctgagaaatgctttttacgtcttgttcccgatctggtttcatcttcaagaagctgtgggaattaagttgctgtgggtcgcggtaattggagattggctcaacctggtgtttaaatggattctctttggacaacgcccttactggtgggttctggatactgattactatagcaacacttctgtgccgttaataaagcaatttcctgtgacatgtgagacaggcccaggatctccgagcggccatgctatgggaacagcaggggtctactatgtgatggtgacatctacgctgtcaatctttcaaggtaaaatcaaaccgacttatcgttttcgttgcctgaatgtcatcttatggttaggcttttgggctgttcaacttaatgtgtgcctgtctcggatctacttggccgcgcattttccgcaccaggtcgtcgcgggagtcctgtcgggaattgcagttgctgagacattttctcacattcactccatttataacgcgtctctgaagaagtatttcttgattacgttttttttattcagcttcgccattgggttttatctgcttctgaaaggtttgggagttgacttattatggacgttggagaaggcccaaagatggtgtgaacagccggagtgggtgcacatcgatacaacaccttttgcatcgcttctgaaaaaccttgggacactctttggactaggcctggcccttaacagctccatgtatagggagtcttgcaaaggaaaactgtcaaaatggctgccattccgcttgtcaagtatcgttgcaagcttggtattattacatgtttttgactctttgaagccaccgtctcaggtggagttagttttttatgtgttatccttttgcaagtctgcagttgttccgctggcctccgtctcagttattccgtattgtctggcgcaggtgttgggacaaccgcacaaaaagtcactt

SEQ ID NO: 3012 - DNA, 1071 bp, Artificial Sequence
  derived and/or modified sequence
atggaggagggcatgaatgtcctgcacgactttggcatccaatccacgcactacctgcaggtgaactaccaggactctcaagattggtttatactggtgagcgtgatcgctgatctgcgcaatgctttctatgtactcttccctatatggttccaccttcaggaggctgtgggtatcaagctactctgggtggcagtgatcggcgactggctgaatctcgtattcaaatggattctctttggccagcgtccttactggtgggtgctggacacagactactatagtaataccagtgtgccactgatcaaacagttccctgtgacatgcgaaactggtcctgggagcccgagtggacacgctatggggacagcaggcgtgtactacgtgatggtgacatctacattaagtattttccagggcaaaataaagcccacgtacagatttcgatgtctcaacgtgatcctatggctcggcttctgggccgttcaacttaatgtgtgcctgtcacggatatacctagcagctcatttcccccaccaggtggtggctggtgtcctttcgggcatcgcagtggctgaaactttcagccatatccacagcatttataacgcatctttgaagaaatatttcttaatcaccttttttctgttctcattcgctatcggcttttatttgttgttgaaggggctgggggtggatctattatggacgcttgagaaggcgcaacggtggtgcgagcagcccgaatgggtgcatattgacaccactccgtttgcgtccctccttaagaacctgggaaccctattcgggttgggcttggctctaaacagctctatgtacagggaatcctgcaaggggaagctatccaaatggctaccattccggttaagtagcattgtggctagtctggtccttttacacgtgttcgatagcctaaagcctccaagtcaggtggagcttgtcttctacgtgctgagcttctgcaaatccgctgtcgtgcccctggcgagtgtctctgtgatcccgtactgcctggcacaggtcctgggccagccgcacaagaagtcccta

SEQ ID NO: 3013 - DNA, 1071 bp, Artificial Sequence
  derived and/or modified sequence
atggaggagggcatgaacgtgttacacgactttggaatacagtcaacacactacctgcaggtgaactatcaggactcacaggactggttcattctcgtgtcagtaatagccgatttacggaacgcattctatgtattattccctatctggtttcatcttcaggaagcggtggggatcaagctgttgtgggtggcggtgattggtgactggctgaatctggttttcaagtggattttgttcggtcagcgcccctattggtgggtgctggatactgactactattccaatacctcggtgccgctgattaagcagttcccagtcacatgcgagactgggccaggatcaccaagcgggcacgcgatgggtaccgctggtgtctattatgtgatggtaactagtacactttcaattttccagggaaagataaagccgacttacagattccgatgtctaaacgtgatactctggctcggcttttgggctgtgcagttaaatgtgtgtctgtcgcggatctacctcgctgcacactttcctcatcaggtggtggcgggcgttctgagtgggattgcggttgccgagacattcagccacatccattctatttacaatgcttctctgaagaaatatttcttgataacattcttcctgtttagcttcgctattggcttttatctcctgctgaagggactcggagtggacctgttgtggactctagaaaaggcccagaggtggtgtgaacagcccgagtgggtccacatcgacaccaccccattcgccagccttcttaaaaaccttgggaccctgttcgggttgggcctggcgctgaattcaagtatgtatcgcgaatcttgtaagggcaagctgtcaaaatggctgccattccggcttagtagcatcgtcgcatcactggtgcttctgcacgtgtttgactcgctcaagccaccttcgcaggtggaactggtgttctatgtcttatcattttgtaagtctgctgtcgtgcccctggcctccgtatccgtcatcccatattgtctggcccaagtgctgggccaaccacacaagaagagcctc

SEQ ID NO: 3014 - DNA, 1071 bp, Artificial Sequence
  derived and/or modified sequence
atggaggagggcatgaacgtattgcatgactttggaattcaatctactcattatctccaggtaaattatcaagactctcaggactggtttattctggtgtctgtcatcgctgacttgaggaacgccttttacgtcttgtttccgatttggttccacctgcaagaggcggtgggcattaagctgctgtgggtggccgttataggcgattggctcaatctcgtgtttaaatggatattgttcggccagcgcccttattggtgggttctggacacagactattactctaatacctctgtgcctctgatcaagcagttccctgtgacctgtgagacgggtccgggctctccctcaggacacgccatggggacagcaggcgtgtactatgttatggtgacctccactctgagcatctttcaggggaagatcaaaccaacctatcggttccggtgcctgaacgtgattctttggctgggcttctgggctgttcagctgaacgtttgcctgtcacgaatttacctggccgctcacttcccacatcaggtggttgctggggtcctgtctggcatcgccgtcgctgagacctttagtcacattcattccatttacaacgcttcactcaagaaatatttcctgattaccttctttctgttctcattcgcaattggtttttacctccttttgaaaggactgggggtagatctgctctggacactcgagaaggcacaaagatggtgtgagcagcccgagtgggtgcacattgacactaccccattcgccagtctgctgaagaacctgggcacactgtttggcctcggactcgcactcaacagctctatgtacagagaaagctgcaagggcaagcttagtaagtggctgccgttccgcctctctagcatcgtggcttctctggtcctcctccatgtgtttgacagtctcaagcctccaagccaggtggaacttgttttctacgtgctcagcttttgtaagagtgcagtcgtccccctggcctctgtttccgttatcccatactgccttgctcaggtgcttgggcagccgcataaaaaatccctt

SEQ ID NO: 3015 - DNA, 1071 bp, Artificial Sequence
  derived and/or modified sequence
atggaagagggaatgaacgtcctgcatgacttcggcatccagagcacccactacctccaagtcaattaccaggattctcaggactggttcatcttggtgtctgtgatcgcggacctcagaaatgcattttacgtgctgttcccaatctggttccatctccaggaggccgtcggcatcaaactgctctgggtggccgtaatcggagattggctgaatctcgtgttcaagtggattctcttcggacagcggccatactggtgggtgctggataccgactactattcaaacacctcggtgccactcattaagcagttcccggtgacctgcgaaactggaccgggaagcccatcgggccatgctatggggaccgcgggtgtctactacgtgatggtgacgagcaccctcagcatctttcaaggaaaaatcaagccgacttaccgcttccggtgtctcaacgtcatcttgtggctgggattctgggcagtccagctcaacgtgtgtctgagccgcatctacttggccgctcatttccctcaccaagttgtggccggggtgctgtcaggaatcgctgtggcggaaaccttttcccatatccactccatctacaatgcttcccttaagaagtacttccttatcacttttttcctgttctcctttgcaatcggcttctacctgctcctgaagggtctgggggtggacctgctgtggactctcgagaaggctcaacgctggtgtgagcaaccggaatgggtgcatatcgacaccaccccgtttgcatccctgctgaagaacctcggcactctgtttggcctcggccttgctcttaatagctcaatgtacagagagtcgtgtaagggaaagctctcgaaatggctgccgttccgcctgtcctccatcgtggcctcattggtgctgcttcacgtctttgactcactcaaacccccatcccaagtcgagctcgtgttctacgtgctctcattctgcaaatcggcggtggttcctctggcgtcagtgtccgtgataccgtactgtctggcacaggtgcttggacagccccacaagaaatcactg

SEQ ID NO: 3016 - DNA, 1071 bp, Artificial Sequence
  derived and/or modified sequence
atggaagaaggaatgaacgtcttgcacgattttggaattcaatccactcattaccttcaagtgaattaccaggattcacaggactggttcatccttgtctcggtgattgcggacctgcgaaacgcattctacgtcctgtttccaatttggtttcatctccaagaagcagtgggaattaagctgctgtgggtcgcagtgattggtgactggctgaacctcgtgtttaagtggatacttttcggccagaggccctactggtgggtgctggacactgattactactcgaacacctccgtcccactcattaaacagtttcctgtgacttgtgaaaccggtcctgggtccccttcaggtcacgcgatgggtaccgcaggcgtgtactacgtgatggtgacgtccaccctttccatttttcagggcaagattaaacctacctaccgatttagatgtctgaatgtgatactttggctggggttttgggccgtgcagcttaacgtctgcctttcgcggatttacctggcagctcatttccctcaccaggtcgtggcaggtgtcctctcgggaatagcagtcgcagaaaccttcagccacatccactcgatctacaacgcgagcctcaagaaatactttcttatcactttcttcttgttctcatttgcaataggtttttacctgctcctgaagggactgggagtggatcttctgtggaccctcgagaaagcacaacgctggtgtgagcaacctgaatgggtgcatatcgatactactccttttgcgtcactgctgaagaacctcggtacgctctttggactcggactggcccttaactcctcaatgtaccgagaatcatgcaagggcaagctgagcaagtggctgccttttaggctgtcatcgatcgtcgcatcgctcgtgcttctgcacgtttttgactccctgaagcctccatcgcaagtcgaactcgtgttttacgtgcttagcttttgtaagtcggcagtggtccccctggcaagcgtctcggtaattccctactgtcttgcgcaggtgctcggccagccacacaaaaagagtctt

SEQ ID NO: 3017 - DNA, 1071 bp, Artificial Sequence
  derived and/or modified sequence
atggaagagggcatgaatgtgctgcatgactttggaatccagtccactcattaccttcaagtgaactatcaggactcccaggactggttcatcctggtgtcagtgatcgcggacctccgcaacgccttctacgtgctgttcccgatctggttccatctccaggaggctgtgggaatcaagctgctctgggtcgcggtcattggggactggcttaatctggtgttcaagtggatcctgttcggacagcggccgtactggtgggtcctggatactgactactattcgaatacctccgtgccgctgattaagcaatttccggtgacctgcgaaaccgggcctggctcacctagcggccacgccatgggaaccgccggagtctactacgtgatggtgaccagcactctgagcatcttccaggggaagatcaaaccgacctaccggttcagatgcttgaacgtcatcctctggctggggttttgggctgtacaactcaatgtgtgcctgtcacgcatctaccttgctgcccacttcccacaccaagtggtggcgggagtcctgtcggggatcgcagtcgccgaaactttcagccatattcattcgatctacaacgcgagtctgaaaaagtacttccttatcacgttcttccttttcagctttgccatcggtttctacctgctcctgaagggcctgggcgtggatctgttgtggactctcgaaaaagcccagaggtggtgcgaacagccggaatgggtccacatcgacacgactccattcgcgagccttctgaagaatctgggaactctgtttggactgggccttgccctgaattcctcgatgtaccgcgagtcctgcaaggggaaactctccaagtggctgccattccggctctcgagcatcgtggccagcctcgtgctgttgcacgtgtttgactcgctgaagccaccgtcccaggtggagctggttttctacgtcctgtccttctgcaagtcggctgtggtcccgctcgcgtccgttagcgtcatcccttactgtctggcgcaggtgctgggacaaccacataagaagtcattg

SEQ ID NO: 3018 - DNA, 1071 bp, Artificial Sequence
  derived and/or modified sequence
atggaagaagggatgaatgtcctgcacgattttgggatccagtccactcactaccttcaggtaaactatcaagattcccaagattggtttatccttgtgagcgtcattgcggaccttcgtaacgcattttacgttctgtttcccatttggtttcatcttcaggaagcagtgggtattaagctgctttgggtggcagtgataggggactggttgaaccttgtgtttaagtggattctgtttggccaaagaccttactggtgggtccttgataccgattactattccaacaccagcgtacctctgatcaaacagttcccagttacttgtgaaaccgggccggggagtccttccggccatgcaatgggcaccgcaggtgtgtattacgtgatggtgaccagcacgctctccattttccagggaaagatcaaaccaacctaccgcttcaggtgccttaacgtgattctctggcttggcttttgggctgtgcaactgaacgtgtgtctctcgcgcatttacctggcggcacattttccacaccaggtcgtggcgggcgtgctttcgggtattgcagtggctgaaactttctcacatatccatagcatctacaacgcatccctgaagaagtacttccttattaccttctttctgttttccttcgcaattggattctacctcctgctgaaagggttgggagtcgatctcctttggactcttgagaaggcacaacgatggtgcgaacaaccagaatgggtgcatattgatactactcctttcgcaagtctgctgaaaaatcttggtaccttgtttggactgggcctggcccttaactcctcaatgtacagggagagctgtaagggaaagttgagcaagtggctcccttttagattgagctctatcgtggcgtcactggttttgcttcatgtgttcgattcgctcaagccaccatcgcaggtcgagctcgtgttttacgtgctttcgttttgtaaatccgcagtggtccctctggcgtcggtttcggtgataccctattgcctggctcaagtccttggtcaacctcacaagaaatcgctg

SEQ ID NO: 3019 - DNA, 1071 bp, Artificial Sequence
  derived and/or modified sequence
atggaagaaggtatgaatgtgctgcacgattttggaattcagagcacccattacctccaagtgaactaccaggattcacaagattggtttattctcgtgtccgtcatcgcagacttgcgtaacgccttctacgtcctcttccctatctggtttcatctgcaggaggcagtcgggatcaagctgctgtgggtggccgtcatcggcgactggttgaatttggtgttcaagtggatcttgttcggccagcgcccctattggtgggtgttggacactgactactactcgaacacctccgtccccttgatcaagcagtttccggtcacttgcgaaaccgggccgggatccccatccgggcacgcgatgggaaccgccggcgtctattacgtgatggtcacctcgaccttgtcgatttttcaaggaaaaatcaaaccaacgtacagattccggtgtctcaatgtgatcctgtggctcggcttctgggcggtacagctcaacgtgtgcctcagcagaatttacctggccgcgcatttcccgcaccaagtggtcgccggagttctctcggggatcgccgtggctgaaactttttcacatattcattccatatacaacgcgtcgctgaagaagtacttccttattactttctttctgttttcgtttgcaatcggattctacttgctgctcaagggcctcggcgtggatctgctctggactctggagaaggcccaaagatggtgcgaacagcccgagtgggtccacatcgatactacccccttcgcatcactgctgaagaatctgggcaccctgttcggactcggtcttgcgctgaacagcagcatgtaccgggagagctgcaaagggaagctgtcgaaatggctgccgtttagactctcgtcaatcgtggcatcacttgtgctcttgcacgtgtttgactcactgaagccgccgtcgcaagttgaacttgtgttctacgtgctgtccttctgtaagtctgccgtggtgccactggcatccgtctcggtgattccgtactgcctggcccaggtgctgggacaaccccacaagaaatcgctc

SEQ ID NO: 3020 - DNA, 1071 bp, Artificial Sequence
  derived and/or modified sequence
atggaggaaggaatgaacgttctgcatgacttcggaatccaatcgacccactacctgcaggttaactaccaggattcccaagactggtttatactggtgagcgttatcgctgatctccgcaacgccttttacgtgctgtttccgatctggtttcaccttcaggaggctgttggaattaagttgctgtgggtggcagtgattggagattggctcaatttggtgttcaaatggatactcttcggtcaaagaccttactggtgggtgcttgatacggattactacagtaataccagcgtgcctctcatcaaacagtttcctgtgacttgtgaaaccggtccagggtcccctagcggacatgcaatgggaaccgcaggtgtgtactacgtgatggtcacttccactttgagcatttttcaaggcaagattaaacctacgtacaggttccgctgccttaacgtcatactctggcttggattttgggcggtgcaacttaacgtgtgcctctcacgcatttatctggcagcacattttcctcatcaagtcgtggcgggtgtcctcagcgggatcgctgtcgcagaaacgttttcgcatatccactcgatatacaacgcatcacttaagaaatactttctgatcaccttttttcttttcagcttcgcaatcggcttctaccttctgctcaagggcctcggcgtcgacctgctgtggacgcttgagaaggcccagaggtggtgcgaacagcccgaatgggtccatatagataccactccatttgcatcgctgctgaagaacttgggaactctgttcggtcttgggttggcccttaactcgtcaatgtatcgggaatcgtgcaagggcaagctctccaagtggcttccattccggctctcgtcgatagtcgcctcccttgtcctgctgcatgtgttcgactctcttaaacctccttcccaggtcgagcttgtgttctacgtgctttcgttctgtaaatcagcagtcgttccccttgcaagcgtgtccgtgatcccttattgtctggcacaagtgttgggccagccacacaagaaatcactg

SEQ ID NO: 3021 - DNA, 1071 bp, Artificial Sequence
  derived and/or modified sequence
atggaggaaggcatgaatgtgctccatgattttgggatccagtcaacccactatctgcaggtcaactaccaagatagccaggattggtttattctcgtctccgtgatagctgatctgagaaatgcgttttacgtgctcttcccgatttggttccatctccaggaagccgtggggattaagctgctgtgggtggccgttattggggattggctgaatttggtcttcaaatggatcctgtttgggcaacgaccctactggtgggtcctggataccgactattacagtaacaccagcgttccgctgatcaagcagttccccgttacttgtgaaactggccccggatccccctccggtcacgcaatgggcactgcaggcgtctactacgtgatggtaacatctaccctgtctatcttccagggcaaaatcaagccaacctacagatttcgctgtcttaatgtcatactgtggcttgggttctgggccgtgcagttgaatgtctgcctgtccagaatttatctcgccgcgcacttccctcatcaggtggtagccggagtactatcaggaatagctgtggccgagactttctcacatattcacagtatctacaacgctagcctgaagaagtacttcctcatcacatttttcctgttttcttttgccattgggttctacctcttacttaaagggctaggagtcgaccttttgtggactctggagaaggcccagcgctggtgtgaacagcccgagtgggtacatattgataccaccccgttcgcatccctcctgaagaacctcgggaccttattcggcctcggattggccctgaattcaagtatgtacagagaatcctgtaaaggcaagctgtccaagtggctgcctttcaggctcagttcaattgtcgcatcactggtcctcctgcacgtcttcgatagtttgaagcccccctcacaggttgaactagtattctatgtattatctttttgcaagtcagctgttgtgcccctcgcgagtgtcagtgtgattccttattgtcttgcacaggtgctcggtcagcctcataagaagagtctt

SEQ ID NO: 3022 - DNA, 1071 bp, Artificial Sequence
  derived and/or modified sequence
atggaggaaggtatgaatgtgctacacgacttcggtattcaaagcactcactatctgcaggtaaattaccaggactcccaggactggttcattctggtctccgttatagcggacctgaggaacgcattctatgtgctcttcccaatatggtttcacctacaggaagccgtcggaataaagctgttatgggtggccgttatcggggactggcttaaccttgtctttaagtggattctattcgggcagcgaccctactggtgggttctggacacagattactactccaatacgtcagtcccccttatcaagcagtttcccgtaacatgtgaaactgggcctggctcacctagcgggcatgccatggggacggccggcgtgtactatgtgatggttacatcaacactgtccatctttcaaggaaagattaagccaacttaccggttcagatgtctgaacgtaattttgtggctgggcttctgggccgtgcagctgaatgtctgtttgtcccgaatatatctggcagcccatttcccccatcaagttgttgccggggtgctgtctgggatcgctgtggccgagaccttctctcatatccattccatttataatgctagcctcaagaaatatttcctaattacattcttcttgttcagtttcgcgattggcttttatctgttacttaagggcttgggcgtagatctgttatggaccctcgaaaaggcacaaaggtggtgtgaacaacctgaatgggtgcacattgacaccacaccttttgcatccttgttgaaaaacttaggaacgctatttggactaggactcgctctcaattccagcatgtatagggaaagctgtaaagggaagctgtctaaatggttaccgtttagattgtcttcaatcgtggcttcacttgtgcttttgcatgtgttcgattccttgaaacccccaagccaggtggagctcgtcttctacgtcttgtcattctgcaaaagtgcggtcgtgcccctggcatcagtatctgtgataccatactgcctcgcacaagtgttgggacagccccacaagaaatccctc

SEQ ID NO: 3023 - DNA, 1071 bp, Artificial Sequence
  derived and/or modified sequence
atggaggaaggaatgaacgtgttgcatgactttggaatacagtccacacactacctgcaggtaaactatcaggatagtcaggattggtttatactagtttccgtgatcgctgatctccggaacgctttctacgtcctgttccccatctggtttcacttgcaggaagccgtaggaatcaaattgctttgggtggcagttataggagattggctcaatcttgtgttcaaatggattctctttgggcagagaccctattggtgggtcctcgatacagattactattccaatacatcagttccactaatcaaacagtttcccgtcacatgtgaaacagggcctgggtccccttcagggcatgctatgggaactgcaggggtctattatgtaatggtaacaagtacactctctatattccaggggaagattaagcctacttataggtttcgctgccttaacgtgatcttatggctgggattctgggccgtacagctcaatgtatgcttaagtagaatctatcttgctgcccatttccctcatcaggtggtggccggggtattgtctggaatcgcagtggccgagactttttctcacatacatagtatatataatgcctccctcaaaaagtatttcctgattacatttttccttttttcattcgctatcggattttatttgttacttaaagggttgggagtggatctgctgtggacactcgaaaaagctcagcgatggtgcgaacaacctgaatgggttcatattgatacaactcccttcgcttccctcttaaaaaacctggggactttgttcgggctcgggctggctctgaactcatctatgtatcgagaatcatgtaagggaaaactctcaaagtggcttccctttagactttcttctatagttgcatctctggtactgcttcacgtttttgattcccttaaacctccttcccaggtcgaactagtgttctatgttctgagtttttgcaagtcggccgtggtgcctctggcgtccgtgtctgtgatcccttattgtctagctcaggtcctaggacagccacacaagaaatcacta

SEQ ID NO: 3024 - DNA, 1071 bp, Artificial Sequence
  derived and/or modified sequence
atggaagaaggaatgaatgttcttcacgacttcggtattcaaagcactcattatcttcaagttaactaccaagattcgcaagactggtttattttggtatcagtgattgcagacctgcggaatgctttctacgttcttttcccaatctggtttcacctccaagaggctgttggaatcaagctgctttgggttgctgtcattggagactggcttaacttagtgtttaaatggatcttatttggacaaaggccatattggtgggtcctcgacacagactactattctaatacatcagtaccattgatcaaacaattcccagtcacatgtgagacgggtccagggtccccatctggacacgcaatgggtacagcaggagtttattacgtcatggtgacttctactttgtcaatattccaaggaaagattaaaccaacttatcgtttcaggtgcctgaacgtgattctgtggcttggtttctgggctgtgcaattgaacgtatgtttatcgcgaatttacttggccgctcattttccgcaccaagttgttgctggcgtgttatcaggcatagctgtcgcagaaacattttctcacatccactctatttacaatgcttcactcaagaagtactttctgataactttctttttgttctcatttgctatcggcttttatcttttgcttaaaggcttgggagtagacctcctctggacattggaaaaggcacaaaggtggtgcgagcaaccagagtgggttcacatcgacacaacgccgttcgcttcactccttaagaatctgggaaccttgttcggactgggactcgcactcaactcgtccatgtatcgggaaagttgtaaaggcaagctttctaaatggcttccttttcgcttaagctcaattgttgcgtccctggttttgcttcatgtttttgactccctaaaacctcctagccaagtggagctggtcttctacgttttgtctttttgtaagtccgcggttgtcccactcgcttctgtaagcgtcattccatattgtctggcacaagttttgggccaaccacataagaagtctctc

SEQ ID NO: 3025 - DNA, 1071 bp, Artificial Sequence
  derived and/or modified sequence
atggaagagggaatgaacgttctccacgattttgggatccagagcacccactatttgcaggtgaactatcaggattcccaggactggttcatattggtgtccgttattgccgacctgcgtaatgcattctatgtcttgtttcccatctggttccatctgcaagaagcagtcggcattaagctgctgtgggtggctgtgatcggagattggttgaacctcgttttcaagtggatactgtttggccagcgtccttattggtgggtgcttgatacagactactactctaacacttctgtccccctgattaagcagtttcctgtcacctgtgaaaccgggccaggttctccttctgggcatgctatgggaactgctggagtctattatgtcatggtgactagcactctgtccatcttccaggggaagattaaacccacctatcgtttcagatgccttaacgttatcctgtggctgggtttctgggcagtgcagctgaacgtgtgtctgagcagaatctacctggccgctcattttccccatcaggtggtggcaggggttctgtctggcatagctgtcgccgagactttcagtcacatccactccatctataacgcctctctgaagaaatactttctcataacctttttcttgttttcattcgctatcggcttctacctgctgctcaaagggctcggagtggaccttctgtggactctggaaaaggcacaacgctggtgcgaacagccagaatgggtccacattgacaccaccccgttcgctagccttctgaagaacctgggcaccctgttcggcctcggactcgctctgaacagctctatgtatagagagagctgcaaggggaagctctctaagtggctcccctttcggttgagttctatcgttgctagcctcgttctgctgcatgtgttcgactcccttaagccaccaagtcaagtagagctggtgttttatgtcctgtcattttgtaaaagcgctgttgtccccctcgcttcagtgtccgtgatcccttattgcttggcccaagtgcttggacaacctcacaagaagagcctt

SEQ ID NO: 3026 - DNA, 1071 bp, Artificial Sequence
  derived and/or modified sequence
atggaggaagggatgaacgtactgcacgatttcggtatacaatccacacactacctgcaggtcaactaccaggattcgcaggactggtttatcttggtgagtgtgatcgccgatttgcgcaatgccttctatgttctgttccctatttggtttcacctccaagaggcagtcggtattaaacttctttgggtcgccgttataggtgactggctgaacctggtgttcaaatggatcttattcggacagaggccctactggtgggtactggacactgactattacagcaatacaagcgtgccattaatcaagcaatttcccgtgacatgcgagaccggacctgggtcaccctccggtcatgcaatgggcactgctggcgtgtattatgttatggtgaccagcaccctgagcatcttccaaggaaagattaagcctacctaccggtttcgctgtctgaatgtgattctttggctcggcttctgggctgtgcagttgaatgtttgcctctcaaggatctacttggctgcccatttcccacaccaggtcgtcgccggggtgctgagtgggatcgccgtcgccgagactttcagccatattcatagcatctacaatgccagcctgaagaaatacttcttaatcacattcttcttgttcagcttcgcaatcggtttctaccttcttctcaaagggctgggcgtggatctactttggaccctcgaaaaagctcagcggtggtgtgaacagccagagtgggtccacatcgatactacgccattcgcttctctgctcaaaaacctgggtaccctgttcggcttaggcctggctttaaacagcagcatgtaccgggaaagctgcaaaggcaagctgagcaaatggctgccatttcgcctgagcagtatcgtggcaagcctggttttgctacatgtcttcgacagcctgaaacctccaagtcaggtcgaacttgtattttatgtgctgagcttctgcaagtctgccgtggtgccactcgcgtctgtgtccgtgatcccctactgcctggctcaggtcctggggcagccccacaagaaatcactg

SEQ ID NO: 3027 - DNA, 1071 bp, Artificial Sequence
  derived and/or modified sequence
atggaagaaggtatgaacgtgctgcatgatttcggtattcagtcaactcactacctccaagtgaattaccaagacagccaggattggttcatcctcgtgagcgtcatcgcagatctgagaaacgcgttttatgtgctcttccctatttggtttcacctgcaggaggcagtcggcattaaactgctgtgggtggctgtgattggtgattggcttaacctggttttcaagtggatcctgttcggtcaaaggccctactggtgggtcctggatacggactactactcaaacactagcgtccctctgatcaaacagtttccagtcacttgtgaaaccggaccaggctcgcctagcggccatgccatgggtacggccggagtctactatgtgatggtgacctcgactttgtcgatatttcagggaaagatcaaacctacctaccgttttcgctgcctgaacgtgatactgtggcttgggttttgggcggtgcagctgaacgtgtgtctttcaagaatatacctggcagcgcactttccgcatcaagtggtcgcaggtgtgctttccggcattgccgttgccgaaacgttctcccatattcattcaatttacaacgcgtccttgaaaaagtacttccttataaccttctttttgtttagctttgcaataggattttaccttctgcttaaggggctcggcgtcgatcttctgtggactctggaaaaagctcagcgctggtgcgaacagcctgaatgggtccatattgacaccaccccatttgcaagcctgctgaagaatttggggactctgtttggacttggccttgcactgaactcgtcaatgtaccgtgaatcatgcaagggtaagttgtcaaaatggctcccgtttcggctttcatctatcgtggcatcacttgtgctgcttcatgtgtttgactcgctcaaacctccatcgcaggtcgagctggtgttctacgtcctgtcattttgcaagtcggcggtggtcccccttgcatccgtgtcagtgattccctactgtctggcccaggttctcggccaaccgcataagaagtcactc

SEQ ID NO: 3028 - DNA, 1071 bp, Artificial Sequence
  derived and/or modified sequence
atggaggagggcatgaacgtactccatgatttcggaatccagtcaacacactacctccaggtcaattatcaggattcccaggactggttcatactggtgagtgttatcgccgacttgcgaaatgcgttttatgtactgtttccaatttggttccaccttcaggaagcggtgggcataaagctcctctgggtggccgtcatcggcgactggctcaacctcgtttttaagtggatcctgtttggccaaaggccctactggtgggtgctagatactgattactactcgaacacatcagtgccactgattaagcagttccctgtgacgtgtgagaccgggcccggatcgccatcggggcacgctatgggtactgcaggcgtgtactatgtcatggtgacaagtacactctcgatattccaggggaaaattaagcctacatacaggtttagatgcttaaatgtaattctttggcttggattctgggcagtacagcttaacgtgtgtctgagccgcatataccttgctgcccacttcccccaccaggtggtggctggcgtgcttagcggtatcgccgtcgctgaaacttttagccacatccatagcatttacaatgcttccttgaaaaagtattttcttataactttttttctgttcagctttgccattggcttttacttgctgcttaagggtttaggggtggacctcctgtggactcttgagaaagcacagcgttggtgcgaacagccagagtgggtgcatatcgatacaacccctttcgcttccctgttgaagaatcttggcaccttgtttggtttggggctcgctctcaactccagcatgtacagggaatcttgtaagggcaaactgagcaaatggttgccgtttcgactcagctcaatagtggcgagcctggtgttactgcatgtgtttgactcactcaagccaccatctcaggtggagctcgtgttctacgttctgtcattttgtaaatcggcagtagttcccctggcctccgtctcggtgataccatattgcctggcccaagtcctcggacagcctcataagaaatctctc

SEQ ID NO: 3029 - DNA, 1071 bp, Artificial Sequence
  derived and/or modified sequence
atggaggagggaatgaacgttctgcatgactttggcatccagagtacacattacctgcaggtcaactaccaggactcccaggattggttcatcctggtgtctgtgattgcagacctcagaaacgctttctacgtcctgttccccatctggttccacttgcaagaggcagtgggaattaaactcctttgggtagctgtcatcggagactggctcaatctcgtgttcaagtggatcctctttggtcaacgcccctattggtgggtgctggatactgactactatagcaacacctcagtacccttgataaaacagttcccggtcacttgcgagacaggacctggctctccctctggtcatgccatgggaaccgccggtgtgtactacgtcatggtcacctccacactttccatttttcaaggaaaaatcaaacctacctaccgctttaggtgcctcaacgtcatcctgtggctgggtttttgggcggtgcaattgaatgtgtgtctgagtagaatctacctggctgctcacttccctcaccaggtggtggctggagtgctgtccggtatcgctgtagctgagaccttctcccacattcacagcatttataacgcctctctgaaaaaatacttcctgataacattttttctgttttccttcgccatcggtttttacttgctcctgaagggactgggcgtggacctcttgtggaccctggagaaggcccagcgctggtgtgagcaaccagagtgggtgcacatagacacgacgccttttgcaagcctgttgaaaaatctcggcacactgttcggcttgggcctggctctcaactccagtatgtatagggaaagctgtaaaggcaagctgtccaagtggctcccattccgcctctctagcatagtggcttccctcgtgcttctgcacgtttttgattctcttaagccaccttcccaggtggaattggtgttctatgttctgtccttctgcaagtctgcagtcgtgcctctggccagtgtatccgtgatcccttattgcttggcgcaggttctgggccaaccccacaagaaatctttg

SEQ ID NO: 3030 - DNA, 1071 bp, Artificial Sequence
  derived and/or modified sequence
atggaggagggtatgaacgtgttgcatgacttcggcattcagtccactcattacctccaggtgaactaccaggactcgcaagactggtttatcctcgtgagcgtcatcgccgatctccggaatgccttctacgtcctgttccctatctggtttcatctccaagaggcggtcggaatcaagctgctctgggtggcagtcattggcgattggctgaatttggtctttaagtggatactgtttggccagaggccgtactggtgggtccttgatactgattactacagcaatacctcagtgccgttgatcaaacaattcccagtgacgtgtgaaactggccccggcagcccgtcgggacatgctatgggcactgccggagtgtactacgtcatggtgaccagcaccctctcgatctttcagggaaagatcaagccgacctaccgcttccggtgcctgaatgtgatcctttggctcggattctgggccgtccagctcaacgtgtgcctctcgcgcatctacctggctgcccactttcctcaccaggtagtagccggagtcctgagcggtatcgccgtggccgagactttctcccacattcattcgatctacaatgcatcacttaagaagtacttcctgatcaccttcttcttgttcagcttcgccattggattctaccttctgctgaaggggctcggcgtggacctcctctggactctggagaaagcacagaggtggtgcgagcaaccagaatgggtgcatatcgatactaccccgttcgcgagcctcctgaagaacctcggaactttgtttggcctgggtctggccctcaactcgagcatgtatcgggaatcctgtaaggggaaactctcaaagtggctgcccttcagactgagctccattgtcgccagcctggtgctgctgcacgtgttcgattcactgaagcctccatcgcaggtggaacttgtgttttacgtcctctccttctgcaagagcgccgtggtgcccctggcgagcgtgtccgtgatcccgtactgcttggctcaggtgctggggcaaccacacaaaaagtcgttg

SEQ ID NO: 3031 - DNA, 1071 bp, Artificial Sequence
  derived and/or modified sequence
atggaagaaggaatgaacgtgcttcacgattttgggatccagagcactcattatctccaagtcaactatcaggacagtcaagattggtttatccttgtgtcggtgattgccgacctcagaaatgcgttctacgtccttttccctatctggtttcacctgcaggaggcggtgggcatcaaacttctttgggtggccgtgatcggggattggttgaacctcgtgttcaagtggattttgttcggccaaaggccatactggtgggtcctggacaccgactactactccaatacctcagttccgctgattaagcagtttccggtgacctgcgaaacgggaccgggatcgccatcgggtcacgccatgggcactgctggagtgtactacgtcatggtcaccagcacgctgagcatctttcagggtaaaatcaagcccacttaccggttccgctgtctgaatgtgatcctgtggctggggttctgggcagtgcaactcaacgtctgcctttcccggatctaccttgccgcacactttccccaccaggtagtggccggagtgctgtctggcatagccgtggccgaaaccttctcgcatattcattcaatctacaatgcgtcgcttaagaaatacttcctgatcacgtttttcctgttttcctttgcaatcgggttctacctcctgctcaagggattgggcgtcgacctgctctggactctggagaaggctcagagatggtgcgagcagccagaatgggtgcatatcgacactactccgttcgcatcgctgctgaagaacctcggcaccctcttcggactgggcctcgcgttgaactcctccatgtaccgcgaatcgtgtaagggcaagctgtcgaaatggttgccattccgcctttcctcgatcgtcgcctcactcgtcctcctgcacgtgttcgacagccttaagcccccgagccaggtggagctggtattctacgtgttgtcattctgcaagtccgcggtggtgcctctggcctcagtatcggttatcccttactgcctcgcccaagtgttgggtcagccgcacaagaaaagcctc

SEQ ID NO: 3032 - DNA, 1071 bp, Artificial Sequence
  derived and/or modified sequence
atggaagagggtatgaacgtcttgcacgactttggaatccagtccacgcattacctccaagtcaactaccaggattcgcaggactggttcatactggtgtcggtgattgctgatctgcggaacgcgttttacgtcctgtttccgatatggttccatctccaagaagcagtggggattaagctgctgtgggtcgccgtgataggagactggctgaaccttgtctttaagtggatacttttcggacaaagaccttactggtgggtgctcgatactgattactactccaatacctcagtgcccctgatcaagcaatttcctgtcacctgcgagactgggccaggatcaccttccgggcatgcaatgggaaccgcgggtgtgtactacgttatggtgacctctacgctctcaatattccaaggaaagattaagccaacttaccggtttcgctgcctgaacgtgatcctctggctgggtttttgggccgtgcaacttaacgtttgtctgtcccgaatctatcttgcagcacattttcctcatcaagtggtggcaggagtgctgtcgggtatagcagtggcagagacttttagccatatccactcaatttacaacgcttccctcaagaagtacttcctgattaccttcttcctcttttcattcgctattggattctatctgctcctgaaggggcttggggtggaccttctttggactcttgagaaggctcaaagatggtgtgagcagccagaatgggtccatattgatactaccccctttgcatccttgctcaagaatctgggtaccctttttgggcttggtcttgcattgaactcgtccatgtaccgtgagtcgtgtaaggggaagctgtcgaagtggcttccttttagacttagctccattgtggcgtcacttgtgctccttcatgtgtttgattcactcaagccgccatcccaggtagaactggtgttctacgtgctttccttttgtaaatcggcagtcgtgccactggcgtcagtgagcgtgattccctattgcctggcacaggtcctgggacaaccgcataagaagagcctc

SEQ ID NO: 3033 - DNA, 1071 bp, Artificial Sequence
  derived and/or modified sequence
atggaggagggcatgaacgtgctccacgacttcggaattcagagcactcattaccttcaagtcaactaccaggacagccaggactggttcattctcgtgtcagtaattgccgacctgaggaatgcattctatgtactcttccctatctggttccacctgcaggaagctgttgggattaaactgctgtgggttgccgtgatcggagactggctcaacctggtcttcaagtggattctcttcggacagcggccttactggtgggtgttagacactgattattattcgaatacctctgtacctttgataaagcagttccctgttacatgtgagactggccccggctccccatccggacacgccatggggacagcgggcgtatactacgtgatggtgaccagtaccctgtcaatatttcaggggaagattaagcccacctatcgctttagatgcttgaatgtgattttatggcttgggttttgggccgttcagctcaatgtttgcctttcccgaatttatctggctgcgcacttcccccatcaagtcgtcgccggagtgctttccgggattgctgtagcagagacattctcacacatccactccatatacaatgcttcactgaagaaatactttctgatcacgtttttcctgttctcctttgccataggcttttacctgttgctgaagggtcttggggtagatttgttgtggaccctcgaaaaggcgcagaggtggtgtgagcagcctgaatgggtacacatagataccaccccatttgctagtctgctcaagaatttaggtaccctctttgggctgggtctcgccctgaatagctccatgtacagagagtcatgtaagggcaaactctccaagtggttgccatttcggctaagctcaatagtcgcctccttggtattgctgcatgtctttgactccctgaaacccccgtcccaggtggaactcgtgttctacgttcttagcttctgtaagtctgctgtcgtccccttagccagtgtgagcgtcatcccgtattgcctggcccaggtgctaggacagccacacaaaaagagtttg

SEQ ID NO: 3034 - DNA, 1071 bp, Artificial Sequence
  derived and/or modified sequence
atggaagaaggaatgaatgtgctccatgattttggaatccagtcaacccactaccttcaggtgaattaccaggactcacaggattggttcatattggtatcggtcatcgcagatcttaggaacgcattttacgtgctctttcccatttggtttcacttgcaggaggccgtcggtataaagctgctctgggtggcggtaatcggcgattggctcaatctggttttcaaatggatactttttggacaaaggccttattggtgggtgctcgacacggactactactctaatacctccgtgccactgattaagcagttccctgtgacctgcgaaactggaccagggtccccctccgggcatgctatgggtactgcaggcgtgtattacgtgatggtgacctccactctttcgatttttcaggggaagattaagcctacctacagatttcgctgtctcaacgtgatcttgtggcttggtttttgggccgtccagcttaatgtgtgtctgtccagaatatacctcgcagcacattttccacatcaagtggtcgcaggagtgctctcgggaattgcagtggcagagacgttctcacacattcacagcatatacaatgcaagccttaagaaatacttcttgatcactttcttcctcttctcgtttgcgattggcttttaccttcttctcaagggactgggcgtggatctgctgtggactctggagaaggcccagcgctggtgtgaacagcctgaatgggtccatattgatacgaccccctttgcatcgctgttgaaaaatctgggaactctttttggcctgggtcttgcgctgaactcgagcatgtaccgtgaatcatgtaagggaaaactgtcgaaatggctcccctttcggctttcatcaattgtcgcgtcacttgtccttctgcatgtgtttgacagccttaagcccccatcgcaggttgaacttgtgttttatgttttgtcgttctgcaagagcgcagtggtgcctcttgcctccgtgtcggtgattccttactgtctcgcccaggtcctcggtcagccacacaagaagtcactc

SEQ ID NO: 3035 - DNA, 1071 bp, Artificial Sequence
  derived and/or modified sequence
atggaagagggaatgaatgtccttcatgatttcggaatacaatcgacgcattatctacaagttaactaccaagatagtcaggattggtttatccttgtgtctgtaattgcggacctccgaaacgccttctatgtacttttccctatttggttccatctgcaagaagccgtggggattaagttattgtgggttgctgtcattggagattggcttaatttagtcttcaaatggatattgttcgggcaacgaccttactggtgggtgcttgacacagactattacagcaacactagcgtgcctctgatcaaacaattccccgttacctgtgaaacagggcccggcagtccctcagggcacgcaatgggtacggccggtgtttactacgtcatggtaacatccacgcttagtattttccagggcaagatcaaaccgacttacagattccgttgtttgaacgttatactttggctcgggttttgggctgtccaactgaatgtttgtctctctcggatctatctcgccgctcacttcccccatcaagtcgttgcaggcgtgttatctggaatagcagtggcggaaacttttagccacatccatagtatatataacgctagtcttaagaagtactttctgatcaccttcttcctctttagtttcgctatcggcttctacttgttgttaaagggactgggagtggacttgctatggacgctcgagaaggctcagagatggtgtgagcagcccgaatgggtccatattgataccacgccattcgcgtctctgctaaagaatctggggactcttttcgggctgggtcttgccctcaattcgagcatgtaccgggagtcatgcaaaggtaagttatccaagtggttgccctttcgcctctcttcgatcgtggctagtcttgtcctgctccatgtattcgattcgcttaagcctcccagtcaagttgaattggtcttctatgtcctatccttttgcaagtcggccgtagtgccgctcgcttcagttagcgtcattccctactgtttggcgcaggtgctcggccagcctcataagaaatccctt

SEQ ID NO: 3036 - DNA, 1071 bp, Artificial Sequence
  derived and/or modified sequence
atggaggaaggaatgaatgttcttcacgactttggaatacagtctactcattatctccaggttaattaccaggacagtcaggactggttcatcctggtttcagtgattgctgatttaaggaatgctttctatgtgttatttcccatttggttccatctgcaggaggccgtgggcatcaaactgttatgggtagcggtaatcggtgattggctgaatctggtgtttaagtggattctgttcggacaacggccttactggtgggtcctcgacaccgactattacagcaatacaagcgtccctctaatcaagcagttccccgtcacatgcgagaccggaccaggctccccatctggacacgcgatgggtaccgccggggtgtactacgttatggtgacttcaacactcagcatcttccagggaaaaatcaagccaacttataggttccggtgtctcaatgtgattctgtggctgggattctgggcggtgcaactgaacgtgtgcctgtcgaggatctaccttgcagcacacttcccacaccaggtagtcgccggggtgctcagtgggattgctgtcgccgaaaccttcagtcatatacattctatatacaacgcctccctaaagaagtattttctcatcacctttttcttattctcgtttgctattggtttttatctgctcttgaaagggttgggggtagatttgctatggacactcgagaaggcacagcgatggtgcgagcagccagaatgggtccacatcgacacaaccccctttgcatctttgctgaaaaacctcgggacactattcggtctgggtttggccttaaactcctcaatgtatcgagaatcatgcaaagggaagctgtctaaatggcttccatttagattgtcctctatcgtggcctctttggtcctcctgcacgtgttcgattccttaaaaccaccgagccaggtggagctggttttctacgtgttgagtttctgcaaaagcgccgtggttcccctggccagcgtaagtgttattccttactgtctcgcgcaagtcttggggcaaccccacaaaaagtcactg

SEQ ID NO: 3037 - DNA, 1071 bp, Artificial Sequence
  derived and/or modified sequence
atggaagaaggcatgaatgtgctacacgattttggaatccagtcaactcattatctacaggtcaattaccaggattcccaggattggtttattctagtgagcgtcattgctgatctgaggaacgctttttacgtgctgttccctatctggttccacctgcaggaggccgtcggtatcaaactgctgtgggttgccgtcattggcgattggttgaatctggtgtttaagtggatactgttcggtcagcggccttactggtgggtcctggatactgattattacagtaatacatcagtccccctcataaaacagttccccgtaacctgcgagacaggtccaggatctccttcaggacatgccatgggcaccgccggagtgtactacgttatggtgacatccaccctgagcatattccagggtaagataaaacccacttaccgcttcaggtgcctcaacgtgatcctgtggctcggcttctgggctgtgcagctgaatgtttgtttgagtcgcatttacttagctgctcatttcccccaccaggtggtggccggggtcctgagtggcatagcagtggccgagacattcagccacatccattccatttataatgctagcctgaagaagtactttctgataaccttttttttattctccttcgcaatcggcttttatctgctactcaaaggcctgggcgttgatctcctgtggaccttagagaaggctcagcgctggtgtgagcagcctgagtgggtgcatatcgacaccacaccatttgctagtctgctgaaaaatcttggaactcttttcgggttaggcctcgcccttaatagcagtatgtaccgcgaatcatgcaaaggtaagctcagcaagtggctgccatttagattaagctctatagtggctagcctggttctcctgcatgtgttcgattctctgaagcctccatcccaagtggaactggtcttctatgtgctgtcattctgcaagagcgccgtggtccccctagcctccgttagcgtgattccatattgtctcgcccaggttcttggccagccacataaaaaaagtctg

SEQ ID NO: 3038 - DNA, 1071 bp, Artificial Sequence
  derived and/or modified sequence
atggaagaagggatgaacgtgctgcatgacttcggaatccagtctacgcactatctccaagtgaactaccaggatagccaggattggttcattctggtatccgtgatcgcggatctgcgcaatgcattctacgtgctgtttcctatctggttccatctgcaggaagcagtaggtattaagttactttgggtcgctgtgatcggagattggttgaatctggtgtttaaatggatcctgtttggacagcgtccctattggtgggtgctagacactgattattacagtaatacctcggtgcccctgattaaacagttcccagtaacctgcgagactggtcctgggagcccctccggacacgcaatgggcaccgccggggtatattatgtgatggtcacgagtaccctcagtattttccagggaaagatcaaacccacataccggttccgctgcttgaatgttatcttatggctcgggttctgggccgttcagcttaacgtctgtttgtcacggatctacctggcagcccatttccctcaccaggtcgtggcgggagtgctttctggtatcgctgtggccgaaaccttttctcacatacatagcatatataatgcctcgctcaaaaagtactttctgatcaccttctttttgttcagtttcgctatcggattctacctactattgaagggactgggagtggatctgttgtggacattagagaaagcccaaaggtggtgcgaacagcctgagtgggtgcacatagatactactcctttcgcctctctacttaagaatctgggcaccctattcggcctgggactagccttgaattcaagcatgtacagagagtcatgcaaagggaagctgagtaagtggttgccattccggttgagctccattgtcgcctctctggtgcttctgcacgtgtttgatagcttgaaacccccttcacaggtggaactggttttttatgtgctgtcgttctgcaagtccgctgtggtgcccctggcctctgtgtctgtgatcccctactgcttggcccaggtgttgggacagccccataaaaagagtcta

SEQ ID NO: 3039 - DNA, 1071 bp, Artificial Sequence
  derived and/or modified sequence
atggaggagggcatgaatgttttgcacgattttgggatccagtcgacccactatctacaggtcaactaccaagatagccaagactggttcatcttggtgtccgttattgcagaccttagaaatgcattttacgtcttatttcccatctggttccatctgcaggaggcagtcggcatcaaactcctgtgggtggccgtcataggagactggttaaatttagttttcaagtggatcttgtttggacagcggccatattggtgggtgctcgataccgactactactccaataccagcgtaccacttatcaagcagtttcctgtgacttgtgagactggcccaggttccccatccggacacgccatggggacagcgggcgtttactatgtcatggtcacttcgacgctttctatctttcagggaaagatcaagccgacgtataggtttcgttgtttaaatgtcatcttgtggctgggcttttgggcagtacaacttaatgtctgcctctcccgcatctacctggccgcccattttccacaccaagtggtggccggtgtactgtctgggattgcagtggcagagaccttcagccacatccactccatctataacgccagcctcaagaagtacttcctgataacctttttcctcttcagctttgcaattggtttctatctccttctcaaaggcttaggtgtagatctcttatggacactggaaaaagctcagcgctggtgcgagcagcccgaatgggttcacatagatacaactccttttgcctccctgttgaagaaccttggaacactgtttggcctggggctggctttgaattcgagcatgtatcgagagagctgcaagggcaagttatcaaagtggttaccattccggttgtcctcgatagttgcaagtctggtcttgctccacgtgtttgattcactaaagccaccatcccaggtggaactggtgttttacgtgctgagtttttgtaagtctgcggtggtcccactggcaagtgtttctgtaatcccgtattgcctggcccaggtgcttgggcagccccacaagaagagcctc

SEQ ID NO: 3040 - DNA, 1071 bp, Artificial Sequence
  derived and/or modified sequence
atggaggaggggatgaatgtactgcatgacttcggaattcaatctacacattacttgcaagtgaattatcaggacagtcaagattggtttatactcgttagcgtgatcgcagatctgaggaatgctttctacgtcttattcccaatctggttccatctgcaggaagccgtgggaattaagttgctctgggtcgcagtgattggcgactggctgaatctcgtattcaagtggattcttttcggacaaaggccatattggtgggttctggatacagactactactccaacacctcagtgcccctaattaagcagtttcctgttacgtgtgaaaccggaccgggaagcccaagcgggcacgctatgggcacagcaggagtttactatgtgatggtcacctctactcttagcatcttccagggaaagatcaaaccgacttatcggttccgctgtctgaacgtcatcttgtggttaggcttttgggctgttcagctgaacgtatgtctttcgaggatctatctcgcggcccatttcccacaccaagtggtggcaggagtgttgagcgggattgctgtggccgaaaccttttcacacattcattcaatttacaacgcaagcctaaaaaaatatttcctcattactttcttcctgtttagcttcgcaattggcttctacctactcctcaagggcctgggcgtggatctcctgtggactctggagaaggcacagaggtggtgcgagcagcctgagtgggtgcacatcgatactaccccttttgcctcattgctgaagaatttgggcacactttttggcttgggcctggccttgaacagctctatgtaccgcgagtcatgtaaagggaagctttccaagtggttgccattccgcctgtcaagtatcgtggcctctttggtgctgctccatgtcttcgattccctgaaaccaccctcccaggtggagttagttttctacgtcctgtcattctgcaagtccgccgtggtgccattggccagcgtgtccgtaatcccatattgtctggcgcaggtgctgggacagccccacaaaaaatctctc

SEQ ID NO: 3041 - DNA, 1071 bp, Artificial Sequence
  derived and/or modified sequence
atggaggaaggcatgaatgtgctgcatgacttcggaatacagtccacacactacctgcaggtcaactatcaagactctcaggactggtttattctggtgagcgtaatcgccgacttgagaaacgccttctacgtcctgtttcccatatggtttcacctccaagaggccgtgggaatcaagctgctgtgggtcgccgtgatcggcgattggcttaatctggtcttcaagtggattctgttcggtcagaggccctactggtgggttctggacactgattactactctaacactagtgtacccctcattaaacagtttcccgtgacctgcgaaactggccctggcagcccgagcggtcatgctatgggaaccgcaggcgtctactatgttatggtaaccagcacattgtctatcttccagggcaaaataaagccgacgtacaggttcaggtgtctcaacgtcattctttggttgggcttctgggctgtccagctgaatgtctgtctgtcccgcatttatctcgctgcacatttccctcaccaggtagtcgccggtgtcctctctggaattgccgtggccgagacttttagccatatacattcaatctataatgcttctcttaagaagtacttcctgataacattcttcctgttttcttttgcaataggtttctatctgctcctgaaaggcttgggagtagacctcctttggacgctggagaaggcacaaagatggtgcgaacaacccgaatgggttcacatcgacaccaccccattcgcctccctcttgaagaacctgggcaccctgtttggtctgggcctggcccttaattcttccatgtacagggaatcatgcaagggtaaattgtctaaatggctgccctttaggctctcctccattgtagcctccctcgtactgctccacgtttttgattcattgaagccgccctcccaggttgagcttgtgttctatgtgcttagcttctgcaagagcgctgtcgtcccacttgcctccgtgtccgtgatcccctattgcctggcgcaggttctcggacagccacataagaagtccctg

SEQ ID NO: 3042 - DNA, 1071 bp, Artificial Sequence
  derived and/or modified sequence
atggaagagggtatgaacgtcctacatgacttcgggatccagagtacccactacttgcaagttaactaccaggatagccaggattggtttatccttgtcagtgtcattgccgacttacgtaacgccttctacgtgttattccctatttggttccatcttcaggaggcggtcggtattaagttgctttgggtcgcagtgattggtgactggcttaatctggtattcaagtggatccttttcggtcagcggccatactggtgggtcctggatactgactactacagtaacacctctgtccctctcatcaaacagtttcctgttacgtgcgagacgggccccggctctcccagcggccacgctatgggcacggccggagtgtattatgtgatggttaccagcaccctgtcaattttccagggaaagattaaacccacttaccgttttagatgcctcaacgttatcctctggcttggtttctgggcggttcagctgaacgtctgtctgtcacgtatctacttggctgcacattttccgcatcaggtcgtggcgggtgttctttcgggtatcgccgtcgcggagacgttctcccacatccactccatctataatgctagccttaagaaatatttcttgatcacttttttcctattctcctttgctatcggcttctaccttctcctgaagggtctgggcgtggatctgttgtggaccctggagaaggcgcagcgctggtgcgaacagcctgagtgggtccacattgacaccacaccctttgcctcccttttgaagaaccttggcaccttgttcgggcttggcctcgcccttaattcctccatgtaccgcgaatcctgcaagggcaagctgtcgaagtggcttcctttccggctttcttcgattgtcgcttccctcgtcctgttgcatgtttttgatagcctaaagcctccttcgcaggttgagctcgtcttctacgtgttgtctttctgtaagtccgcagtggtgcctctcgctagcgtctcggttatcccctactgcctcgcccaggtgctcggtcagccccacaagaagtctctt

SEQ ID NO: 3043 - DNA, 1071 bp, Artificial Sequence
  derived and/or modified sequence
atggaggagggtatgaacgtgctgcacgatttcgggattcagtcaacccactacctgcaggtgaattatcaggattctcaggattggttcatcctggttagtgtgatcgccgacctccggaatgccttttacgtcctgttccccatttggttccacttgcaggaggccgtgggaattaaactactatgggtggcggttattggcgattggttaaatctggtgtttaagtggattttgtttggccagcggccatactggtgggtacttgataccgattactacagcaacacaagcgttccgctgatcaaacagttccccgtgacttgcgagacagggccagggagcccttccggacacgcaatgggcaccgctggggtatactatgtgatggttacctccaccctcagtatatttcagggcaaaatcaagccaacataccggttccgctgtttgaatgtgatattgtggctcgggttttgggcagtacagctgaacgtctgccttagccggatttatctggctgcccactttcctcatcaggtcgttgcaggagtcctcagcggcatcgccgtggctgagacattttctcatattcacagtatctataacgcctccctgaagaaatacttcctcatcaccttctttctgttcagctttgccatcggcttctaccttctcctcaagggactgggagtcgacctgctctggactctggagaaggcccaacggtggtgtgagcagcctgagtgggtgcatatcgatacaaccccttttgcatctctgttgaagaacctgggaactcttttcggcttaggcctcgctctcaatagtagtatgtatagggagagctgcaaaggcaagctcagcaaatggctgccatttcgtttgagtagcatcgttgcctctcttgttctgctgcacgtcttcgatagtctcaagccaccctcgcaggtggagctggtgttctacgtcctaagcttctgcaagagtgcagtggtccctcttgcctcagtatcggtcattccgtactgtttggcgcaggttttgggccagcctcataagaagagtctt

SEQ ID NO: 3044 - DNA, 1071 bp, Artificial Sequence
  derived and/or modified sequence
atggaggagggaatgaatgtcctgcatgacttcggcatccagtcgacccactatctccaagtgaactaccaagattctcaagactggtttatcttggtgtcagtgattgcagatctgcgcaatgccttctatgtgctgttccccatctggtttcacctgcaggaagccgttgggatcaagctgctgtgggtggccgtgatcggcgactggctgaatctggtgtttaaatggattctttttggccaacgcccctactggtgggtcctggatactgattactattcaaacaccagtgtgccccttataaagcagttcccagtgacctgtgaaacagggccaggcagcccctccgggcacgcgatgggcactgccggcgtgtactacgttatggtgacaagcacgctaagtatctttcagggtaaaatcaagcccacgtacaggttccgctgcctcaacgtgatcctctggctcgggttttgggcagtgcagctaaacgtgtgtctgagcaggatctatctggctgcacactttcctcatcaggtggtcgctggcgtcctcagcggaatcgccgtagccgagaccttctcccatatccactctatttataacgctagcctgaagaagtactttctgatcactttcttcttgttcagttttgcgataggattctatctgctgctcaagggacttggagtagacctgctgtggactctggagaaagctcagcggtggtgtgagcagccagagtgggtccatatcgataccaccccattcgctagtttacttaaaaacttggggacgctgtttggtctaggcttagcactgaattctagcatgtatagagagtcatgcaaaggcaagctatctaagtggctgccctttcgactgtcttctattgtcgcaagcctcgtgctgctgcatgtctttgactcgctcaagcctcctagtcaggtcgagcttgtcttctacgttctgagtttctgtaagtctgccgtggtgccactcgcctccgtgagtgtgatcccatattgcctggcccaagtcctgggccagccccataaaaagtccctg

SEQ ID NO: 3045 - DNA, 1071 bp, Artificial Sequence
  derived and/or modified sequence
atggaggaggggatgaatgtgctgcacgactttggcattcagtctactcattacctgcaggtgaactatcaagacagtcaagattggtttattttggtctctgttatagctgacctaaggaacgccttttacgtactgtttccaatctggtttcatctgcaggaagcggttggtatcaaactgctgtgggtcgctgttattggggattggctaaacttggtgtttaagtggatactgttcggtcaaaggccctattggtgggtgttagacactgactattattcaaacacgtcagtgccgcttatcaagcagttccccgtgacctgcgaaaccgggcccggttcaccgagtgggcacgctatgggcacggcaggagtctattacgtcatggtgacctctactctgagcatatttcaaggcaaaatcaaaccaacttataggtttcgctgtctgaacgtcattctttggctaggcttttgggctgttcagctgaacgtttgtctgtctagaatctatcttgcagctcacttcccacaccaagtggttgctggggtgttaagtggaatcgccgtagcggagacctttagccatatccactccatctataatgcctctctcaaaaaatacttcttgataacctttttcctattctcgttcgccatcggcttttacttactcctcaagggcctgggtgtggacttgctatggaccctagagaaagcccaacgatggtgtgaacagcccgagtgggttcatatcgacaccacaccgtttgccagtcttctcaagaacctgggtacgcttttcgggctcgggttggcactgaactcctcaatgtacagggaatcctgtaagggtaaactgagcaaatggttgccttttcgcctgtccagcatcgttgcttctctagtattgctccacgtgttcgatagtctgaaacccccaagccaggtagaattggtgttttacgttctgagtttctgcaaatcggctgttgttccactggcctctgtctctgtgataccttactgtctcgcacaggtgctgggccagccacataagaagtctctg

SEQ ID NO: 3046 - DNA, 1071 bp, Artificial Sequence
  derived and/or modified sequence
atggaagaaggcatgaatgttcttcatgattttggcattcaatctacacactatttgcaggttaattatcaagattcacaggattggtttattctggtatcagtgatcgcagatttgcgtaacgccttttacgttttgtttccgatctggtttcatttgcaggaagcagtcggcatcaaactcttgtgggtcgctgtcattggagattggctcaacctggtgtttaagtggatcctgtttggacaacgcccatactggtgggttcttgatacagattattattccaacacctctgttccgctgataaagcaatttcctgtcacttgcgaaacagggccgggcagtccgagtgggcatgcaatgggcaccgcgggtgtatactacgtcatggttacgagcacattatcgatctttcaaggcaagattaagcctacatatcgctttcgatgcttaaatgtgattttatggttaggattctgggcggtgcaattaaatgtctgtctttcaagaatttatttggcggctcacttcccgcaccaagtcgtagctggagtattatcgggtattgctgttgccgagacgtttagccatattcattctatctacaatgcctcgcttaaaaaatacttcctgattacattttttctcttttcctttgctattggtttttatcttttgctaaaaggtcttggtgttgacttattatggacacttgaaaaggctcagagatggtgtgaacagccggaatgggtgcacattgatacgacaccctttgcatctctccttaaaaatctgggtacactctttggattgggattagcgctgaattcaagcatgtatcgggaatcatgtaagggaaaattatccaaatggcttccgtttcggctatcatcaattgtagcctccttagtgctgttgcatgtatttgacagcctcaagccccctagtcaggtagaattggtcttttatgtgctttccttttgtaaatcagctgtcgttcccttggcttccgtgtccgtcattccttattgcctggcacaagttcttggtcagcctcataagaaatctttg

SEQ ID NO: 3047 - DNA, 1071 bp, Artificial Sequence
  derived and/or modified sequence
atggaagagggcatgaacgtcctccatgacttcggcatccagtcgacgcactatctccaggtgaattatcaggattcacaggattggttcatactcgtatccgtcattgccgatttgcgaaacgccttctacgttctgttccccatatggttccacctgcaggaggcagtaggtatcaagttattatgggtggcggtgatcggagactggctcaacctggtgtttaaatggatactctttggccaaagaccgtactggtgggttctggatactgattactattccaatacctctgtgcctttgattaagcagtttcccgtgacatgtgaaactggcccaggcagtcccagtgggcatgctatggggacggctggggtctactacgtgatggtcacaagcacactgagcattttccaaggaaaaataaaacccacctacaggtttagatgcttaaacgtaatcctgtggctggggttttgggctgtgcagctgaacgtgtgcctgtctcgtatctatttagccgcccactttcctcaccaggttgtggctggcgtgctatccgggattgcagtggccgagacctttagtcacatacactctatctataacgcatcacttaaaaagtatttccttatcactttcttcctgttttcttttgccattggtttttatcttttgctgaaaggattaggcgttgatttactgtggaccttggagaaagcccagagatggtgtgagcagcctgagtgggtgcacattgataccacccctttcgcttcacttttaaagaatctgggaacgctatttggactcggcctggctctgaactcgtcaatgtatcgtgaaagctgcaagggtaaattgtccaagtggctgccctttcggctcagctctattgttgcttcacttgttttgttacacgtgtttgatagcctcaagcccccgagtcaggtggagctggttttttacgtgctttctttttgtaagtccgctgtggtccccctcgcaagcgtttcagtaataccttactgccttgctcaggtcctgggacagccccataaaaaatccctt

SEQ ID NO: 3048 - DNA, 1071 bp, Artificial Sequence
  derived and/or modified sequence
atggaggagggaatgaacgttcttcatgacttcggaatccagtccacccattatcttcaggtgaactatcaggactctcaagattggtttatcctggtcagtgtcatcgccgatctcagaaatgcgttttatgtactgtttcccatctggttccatcttcaagaggcagtgggcattaagttgctttgggtcgcagtgatcggagactggctgaaccttgtctttaagtggatcctttttggtcagcgcccgtattggtgggtgctggataccgactactatagtaataccagcgttccattaatcaagcaattcccagtgacatgtgagaccggaccagggtcccctagcgggcacgccatgggcaccgccggcgtatactacgtgatggtgaccagcaccctgagtatctttcagggcaaaatcaaaccgacatatcgctttaggtgcttgaacgtcattctgtggctgggattttgggctgtgcagttaaacgtgtgcctcagcagaatctacctcgcagctcattttccacatcaggtcgtggcaggcgtgttgtcaggtattgcggtggccgagacatttagccatatccacagtatttataacgcctcgctgaagaaatatttcttgattaccttcttcctgttcagtttcgcaattggattttatttgctgttgaaaggactgggagtggatctcctatggacattggaaaaagctcagagatggtgcgagcagcctgaatgggtgcatatcgatactactccatttgcctctctgctgaaaaacctgggcacactgttcggcctgggcctggcgttaaactcaagcatgtatcgcgagtcttgcaaaggtaagcttagtaaatggctcccatttagactcagctcaattgttgcttccctggtcctgctgcacgtcttcgactctctcaagccacccagtcaggtggagctcgtgttttacgtgcttagcttctgcaagagcgccgttgtgccactcgcaagtgtctctgtcatcccctactgcttggcacaagtgcttggacagccccacaaaaaatcgctc

SEQ ID NO: 3049 - DNA, 1071 bp, Artificial Sequence
  derived and/or modified sequence
atggaggaaggaatgaatgttctgcatgatttcggaattcagtctactcactatctccaagtgaattaccaggatagccaggactggttcattctggtgtcagtgattgccgatctgcgtaatgctttctatgtgttattccccatttggttccatcttcaggaggccgtgggaatcaaactcctgtgggttgctgtaatcggtgactggttaaacctggtcttcaagtggatcctatttggccagcgcccatattggtgggtcctcgacacagattactattctaacacctccgtcccgctcattaagcagttccctgtgacttgtgagaccggccccggtagtccctcggggcacgctatgggaaccgcaggcgtttattacgtgatggtgaccagcaccctgtctatttttcagggaaagataaaacccacctaccgctttcgatgcctcaacgtgattctttggctgggcttctgggctgtacagcttaacgtgtgcctcagccgtatttacctggctgcgcactttcctcaccaagtggtggccggcgtcctctcaggaatcgcagttgccgagacgttttcccatatccattcaatttataatgcgtctcttaaaaagtatttcctgatcacattcttcctgttttcttttgccattggattttatcttttgcttaagggcttaggagtggacctgctgtggacactggaaaaggcccagcgttggtgtgaacagccggagtgggtgcatattgacacgacgccattcgcctctctcctcaaaaatctcgggactctgttcggcttaggcctggccctgaactcgtccatgtacagagagagttgtaagggaaaactgtccaagtggctccctttcagactgagctcgatcgtggccagtttagtcctcctccacgtgttcgacagtcttaagccacccagtcaggttgaactagtcttctacgtactctccttttgcaaatcagctgtagtgccacttgccagtgttagtgtgatcccatattgtttggcccaggtccttgggcagccccataaaaagtcactc

SEQ ID NO: 3050 - DNA, 1071 bp, Artificial Sequence
  derived and/or modified sequence
atggaagaaggcatgaatgtacttcacgattttggaatacagtccacacactacctgcaagtgaactatcaggatagccaagactggttcatattggtgtctgtgatcgcagacctccgaaatgctttttacgtcttgttccccatctggttccaccttcaagaggctgtagggatcaaactcctgtgggtcgcagtgattggtgattggctgaacttggtgtttaagtggatcctgttcggccaacggccgtattggtgggttcttgatactgactactacagcaacacctctgtaccgctgattaagcagtttcccgtcacctgtgaaactggccccggttccccatccggtcacgccatggggacggcaggggtgtattacgtgatggttacgtcaactttgagcattttccagggaaaaattaaacctacgtaccggttccggtgtcttaatgtgatcctttggctgggattctgggcggtacagttgaacgtgtgtctgagtaggatctaccttgctgcccatttcccgcatcaggtggttgctggcgtactctctgggatcgccgtggcggaaacattcagccacatccatagtatttataatgcctccctgaaaaagtacttcctcattaccttctttctgttctcatttgccattggcttctacctgcttctgaagggactcggcgttgacctcttgtggacgctcgagaaagcacagcggtggtgcgagcaaccagaatgggtccacatcgatacgaccccgtttgcctccttgttgaaaaacctggggactctctttggactgggactcgctttgaactcttccatgtatcgcgagagctgcaagggaaagctgagtaagtggctgcctttcagactcagtagtatcgtggcgagcctcgtcctcctccacgtcttcgactctctcaagccacctagccaagtggaattggtgttctatgtcctgtctttctgtaaatcagcagtggtgccactggcatccgtatccgttatcccgtattgtttggcccaggtccttggacagccccacaagaaatctctt

SEQ ID NO: 3051 - DNA, 1071 bp, Artificial Sequence
  derived and/or modified sequence
atggaggaaggcatgaacgtgctacacgattttggaatccagagcacacactatctccaggtaaattaccaggatagccaggattggtttatcttggtttccgtgatcgccgatctaaggaatgctttctatgttctgtttcctatctggttccacctgcaagaggccgtgggcataaagctgttgtgggtggccgtaatcggagactggttgaatttggtgttcaagtggatacttttcggacagaggccttactggtgggtgctcgacactgattattatagtaatacttctgttccactcatcaagcaatttcccgtgacatgcgaaactgggcccggtagccccagcggacatgctatgggcacagcgggagtgtattacgtaatggttacctccaccctgagtattttccagggtaagatcaagcctacttaccgattccggtgtctcaacgttattctttggttaggattttgggctgtccaactgaatgtttgcttgtctcgtatctatcttgcggctcacttccctcatcaggtcgttgctggagtgttgtccggaatagccgtggctgagacgttcagccacatccacagtatctataacgctagtctcaagaaatatttcctgattacattttttctctttagtttcgccatcgggttttacttattgctgaaagggttgggtgtggacctcttgtggactctcgaaaaggctcaacgatggtgtgagcaaccggagtgggtccacatcgatacaactccattcgcctctctgctcaaaaatttagggaccttgttcgggctgggactggctctaaacagtagtatgtatcgtgaatcatgcaaaggaaaattatctaagtggctgccttttcgtctcagtagcattgtggcatcacttgtgctcctccatgttttcgatagtctcaagcccccttcacaggtggaactggtattctacgttcttagcttctgtaagtcagccgtagtcccactagcatcagtgagcgtgattccttactgcctggctcaagttcttggccagcctcacaagaagagcttg

SEQ ID NO: 3052 - DNA, 1071 bp, Artificial Sequence
  derived and/or modified sequence
atggaggaaggaatgaacgttttacacgactttggaatccagtctacccactaccttcaagttaattatcaggacagccaggactggttcattctagtgagtgtcattgccgacctccgaaacgcgttctacgtcctgtttcctatctggtttcatttgcaagaggcagtaggcattaagttgctttgggtagccgtcataggcgactggctgaatctggtctttaaatggattctctttgggcagcgaccatattggtgggtcctggataccgattactattccaacacaagcgtgccactgattaaacaattccccgtaacctgtgagactgggcccggctctccttccggacacgcaatgggtacggcgggggtgtattacgtgatggtcacctcaactctgagtatctttcaagggaaaattaaacccacttatcgcttcagatgtctgaatgtcatcctctggttaggattctgggccgtccagctgaatgtctgtctgagccgcatctacctggcagcccacttccctcatcaggtagtcgctggtgtcctgtccggcatcgcagtagctgaaaccttctcacatatccactctatctacaatgcttccctcaaaaaatactttctgatcacgttttttctattctccttcgccatcggattttatttgcttcttaaggggctgggggttgatttgctgtggactctggaaaaggcccagaggtggtgcgagcaaccggaatgggtgcacatcgatactacaccctttgcttccctgttaaaaaacctggggacactgtttgggttgggcctggcgctgaatagcagcatgtacagagaatcgtgcaagggaaagttgtccaagtggcttccgttcagactgtcttcaatagtggccagcctggtcctgctgcatgttttcgattcactgaagccacccagccaagtggagctggttttttacgtgctatcattttgcaagagcgctgtggtgcctttggcatcggttagtgttatcccgtactgcctcgcccaggtgttaggacagccacacaaaaaatctctc

SEQ ID NO: 3053 - DNA, 1071 bp, Artificial Sequence
  derived and/or modified sequence
atggaggaagggatgaacgtcctgcatgatttcggtatacagtcaacacactacctccaagtgaattatcaagatagtcaggactggttcatcttggtttcagtgatcgctgacctccgcaatgccttttacgtgctgtttcccatttggtttcacctgcaggaggcagtggggataaagctgctgtgggtggctgtcatcggcgattggctcaacttagtgtttaagtggatactgtttgggcagaggccctactggtgggttctggacacagattactacagtaatacaagtgtgccacttatcaagcagttccctgtaacttgcgaaaccggccctggcagccctagcggtcacgctatggggactgccggcgtctattacgtgatggtgacctccaccctgtctatcttccagggtaaaatcaaaccaacctaccggtttcgttgccttaatgttattctgtggttgggattttgggcagtgcaattaaacgtatgtctgtcaagaatttacctggccgcacatttcccccatcaggtggttgccggtgtactgtcagggattgccgtggctgagacctttagtcacatacatagtatatataatgcaagcttaaaaaaatattttttaatcacattcttcctgttctcttttgccataggcttctatctgctgctcaagggcctcggggtggatctactgtggacactggaaaaagcccaacggtggtgtgaacaacctgagtgggttcacatagacaccactccattcgcttctctgctgaagaatctgggcaccctcttcggactgggcctggccctgaacagttctatgtaccgcgagtcctgcaagggcaagctctcaaaatggctgccatttcggttaagctctattgtggcttccctggtcctgttgcacgtgttcgatagcctgaaaccaccatctcaggtcgagctagtgttctatgtgctgtccttttgtaagtccgccgtcgtgcctttagctagtgtgagtgttatcccatattgcctggctcaggtgttaggccagccccataaaaaaagcctg

SEQ ID NO: 3054 - DNA, 1071 bp, Artificial Sequence
  derived and/or modified sequence
atggaggaggggatgaacgtcctgcatgattttgggatccagagtactcattacctccaggttaattaccaggattcccaggactggttcatattggtgtctgtgattgctgacctgcggaatgccttctatgttctcttccccatctggtttcacctgcaggaggctgttggaattaagctgttgtgggttgccgtcatcggcgattggcttaacctcgtgtttaaatggatccttttcggacagcgcccttattggtgggtactcgacaccgattactactccaacacctcagttcctttaatcaagcaatttccagtgacttgtgaaaccggtccaggcagtcctagtgggcacgcgatgggtaccgcaggcgtgtactacgtcatggtgacctctaccctgtccattttccaggggaagattaagcccacatataggttccgctgtttgaacgtgattttatggctggggttttgggcagttcagcttaacgtctgtttgagccgcatatatctcgccgcccactttccccaccaagtggtggctggcgtcctctctggtattgctgtggctgagactttcagccatatccattctatttataatgcgtctctcaagaagtacttccttataaccttcttcctgttctcattcgcaatcggcttctatttgttactcaagggattaggggtagaccttctgtggaccctggagaaggcccagcggtggtgcgaacagcctgagtgggttcacatcgatacgaccccattcgcatcactgctgaagaatctgggtacccttttcgggcttggattggctctcaactcctctatgtaccgtgaaagctgtaaaggtaaattatccaagtggctgccattcaggctgtccagcatagttgctagtttggtgttgcttcacgtgttcgatagcctcaagccacctagccaggtggagctggttttctatgttttgagcttctgtaagagtgcggtggttcctctagcctctgttagcgtcattccttattgcctggcgcaagtactgggacagcctcacaagaaaagtctt

SEQ ID NO: 3055 - DNA, 1071 bp, Artificial Sequence
  derived and/or modified sequence
atggaggagggaatgaacgtactgcacgacttcggaattcagtccacccactatcttcaagtcaattatcaggatagccaggattggttcatcttagtgtctgtgattgcggacctcagaaatgctttttatgtacttttccccatatggttccatctacaggaggctgttggcatcaaactgctgtgggtggccgtcatcggggactggctgaacttggtgtttaaatggatccttttcggacaaagaccctactggtgggtactggatactgattactactctaatacatctgtgccgctgatcaagcaattcccggtgacctgtgaaactgggcccggctcaccgtcaggccatgccatgggcaccgcaggcgtatattatgtgatggtgacgagtactctctcgatatttcaaggcaagataaagccaacttatagatttagatgtctcaacgtaatactgtggctcgggttttgggccgttcagctgaacgtatgtctgagccgaatttatctagccgcgcacttcccacaccaggtagttgccggggttttgagtgggatcgcagtggccgaaacattttctcacattcacagcatctacaatgctagcctcaagaagtactttctgatcacgttttttctattctcttttgccatcggattttatctgttgctcaaagggctaggggtggatttgctctggacactggagaaggctcagcgttggtgcgagcagcctgagtgggtacatattgataccaccccattcgcctctctactcaagaacctggggaccttattcggcctgggactggcgctcaatagctcgatgtaccgagaatcatgtaagggaaagctgtctaagtggttgcctttccgactaagttcaattgtcgccagcctggtcctgcttcacgtcttcgactctcttaagcccccatctcaagttgagttggtcttctacgtacttagcttttgtaagtccgctgtcgtccccctggccagtgtcagcgttattccctactgcctggctcaggtgctgggccagccccataagaagtctctg

SEQ ID NO: 3056 - DNA, 1071 bp, Artificial Sequence
  derived and/or modified sequence
atggaagagggaatgaatgttttacatgattttggaattcaatcaacacattatttacaagttaactatcaagattcacaagattggttcattttagtttctgttattgctgacttacgtaatgcattttatgtcctttttccaatatggtttcatttacaagaagcagttggaatcaaattactttgggtcgctgttataggagattggttaaacttagtttttaaatggatattatttggtcaaagaccatattggtgggttttagatacagattattattctaatacatcagtaccattaattaaacaatttcctgttacttgtgaaacaggaccaggatcaccttctggacatgctatgggtactgctggagtttactatgttatggtaacctctactttatcaatttttcaaggtaaaattaaaccaacttacagatttagatgtcttaatgttattctttggttaggattttgggcagttcaacttaatgtatgtttaagtagaatttatttggctgctcattttccacatcaggttgttgctggagtactttctggtattgctgtagcagaaaccttttctcatatccattcaatttataatgcttcactcaaaaagtattttttaattactttttttttattctcttttgcaattggattttatcttttattaaagggattaggggttgacttattatggactttagaaaaagctcaaagatggtgtgagcaaccagaatgggttcatattgatactactccatttgcatctcttttaaaaaatttagggacattgtttggattaggacttgctttaaatagtagtatgtatagagaatcttgtaaaggaaaattatctaaatggttaccttttcgtttatcatcaattgtagcatctttagttttattacatgtttttgattctttaaaaccaccatcacaagttgaattagtattttatgttttaagtttttgtaaatctgcagttgttccattagcttctgtttctgttattccatattgtcttgcacaggtcttaggtcaacctcataagaaatctctt

SEQ ID NO: 3057 - DNA, 1071 bp, Artificial Sequence
  derived and/or modified sequence
atggaagaaggcatgaatgtcctacatgattttggaatccaaagcacacattacttgcaggtaaactatcaagattcacaggattggttcatccttgtgtctgttatagcagatctgcggaacgctttctacgtgttgtttcctatctggttccatctgcaggaggccgttggaatcaaactgttgtgggtcgcagtgataggagattggcttaaccttgtcttcaaatggatccttttcggccagcggccttattggtgggtgctggacactgattactattctaacacttccgtgccgcttattaagcagtttccagtaacttgcgagacaggacccggcagcccatcagggcatgctatgggtacagccggtgtctactacgttatggtcacatctacactgagcatcttccaaggcaagataaaacctacatatagattccgttgcctcaacgtgattctgtggctcgggttctgggccgtacaactgaatgtctgcctgagccggatctaccttgccgcgcatttcccacaccaagttgttgctggagtgctgtccggaatagccgttgccgagaccttttcccatatacattccatttacaacgccagcctgaagaagtacttcttgataaccttcttcttattcagctttgcaataggattttacttgctgctgaaaggccttggagtggacctcctatggacactagagaaggcccagcgctggtgcgaacagcctgaatgggtccacattgacactacaccgttcgcaagcttactgaagaacctgggcaccctctttggactggggctcgccctaaacagcagtatgtaccgcgagtcgtgcaaaggaaaactctccaaatggctcccgtttagattgtcttcgattgtggccagtctcgtgctgcttcatgtgttcgacagtctaaaaccgcccagccaggtggagttggtattctacgtactcagcttttgcaagtctgctgtggtgccccttgcgtcggtatctgttattccctactgcctggcccaggtcctgggacaaccccacaaaaagtcactc

SEQ ID NO: 3058 - DNA, 1071 bp, Artificial Sequence
  derived and/or modified sequence
atggaggaagggatgaacgtgctccacgatttcgggatacagagtactcactacctgcaggtgaattatcaggatagtcaggattggtttattcttgtctcagtgattgcggatcttaggaacgctttctatgtcttattcccaatatggttccatttacaggaagctgtaggaatcaaactgctctgggtggccgtgattggagactggcttaacctagtgtttaaatggattctgttcgggcagagaccttattggtgggtcctggatacagactactactcaaacacttcggtgcccctgatcaaacagttcccagtaacttgtgaaactggacctggaagtccatctggacacgccatggggactgctggagtatattatgtgatggtgacttccacactgtccatctttcagggaaagattaagccaacttatcggttcagatgtctcaatgtgattctttggctcggattctgggccgttcagctgaacgtgtgtctgtcaaggatttatttagctgcccattttccacatcaggtcgtcgccggagttttgtcagggatcgccgtcgccgaaacattttctcatattcacagtatttataatgccagtctcaaaaaatattttctaatcacattttttttgttctcatttgctataggattttatcttctccttaaagggctcggagtggatctgctgtggacacttgagaaggctcagcggtggtgcgaacagcccgaatgggtacacattgatacaacaccattcgcttctctgttaaaaaatctcgggactctttttggattaggacttgctctgaattcttccatgtaccgcgaatcctgcaagggaaaattgtccaaatggctcccctttcgactctcttctatagtcgcttcactggtgctccttcatgtctttgactcccttaagcctccttcccaggtagaactcgtgttttacgtcctaagtttctgcaaatccgctgtggtacctctcgcttcggtttctgtcatcccttattgcttagcccaggttctagggcagccccataaaaaatcttta

SEQ ID NO: 3059 - DNA, 1071 bp, Artificial Sequence
  derived and/or modified sequence
atggaagagggcatgaacgtcctccacgatttcgggatacagagcacccattatcttcaagtcaactatcaggatagtcaagactggttcatcctggtttccgtgatagcagatctccgaaacgctttctacgtcctgttccccatttggttccacctgcaagaggcagttggtattaaacttctctgggtggccgtcatcggagactggctgaacctggtgtttaagtggatactcttcggacagaggccatactggtgggtgctcgacaccgactattattccaacacaagtgttcccctgatcaaacagttccctgtcacctgtgagacggggcctggttccccttcaggccacgccatgggcacagccggtgtgtattatgttatggtgacatctaccttgtccatatttcagggaaaaatcaagcctacctatcggtttcgctgcctcaatgtgattctctggctggggttctgggcagttcagcttaatgtttgtctttctcgcatttatctggccgcccacttcccacaccaggtggtcgccggagttctctctgggattgccgtcgctgaaaccttttcccatatccactctatctataatgctagcttgaaaaaatatttcctcatcaccttcttcctgttctcattcgccattggattttacctcctgctgaaaggcctcggcgttgacctcctgtggaccttggagaaggcccagcggtggtgcgagcagccagaatgggttcacattgacacaaccccttttgcttctctgctcaagaacctgggtaccctgtttggactggggctggcgctgaactcttctatgtacagggagtcctgcaaggggaaattgtccaaatggctgccgttcagactgtccagtatcgtggcttctctcgtcctgttgcatgtgttcgatagtctcaagcccccaagtcaggttgaacttgtattttatgtgcttagcttctgtaagtctgccgtggttcccttggctagcgtaagcgttatcccgtactgtctggcccaggtgctcgggcaacctcacaagaagtcactc

SEQ ID NO: 3060 - DNA, 1071 bp, Artificial Sequence
  derived and/or modified sequence
atggaagagggcatgaatgtactgcacgattttggcattcagtctacccactacctgcaggttaactaccaagatagccaggattggttcattttggtgtccgttattgcggacctgcgcaatgctttttatgtccttttcccaatctggttccatctgcaggaggcggtggggatcaaacttctgtgggtggccgtgataggagactggctgaacctggtgtttaagtggatcctcttcggtcagaggccttattggtgggtgctggacaccgactattactctaatacctcagtgcctcttataaagcagtttccggttacttgtgagaccggaccaggttctccctcgggccatgcgatgggaacggccggtgtgtactatgtcatggtcacaagcactctgtcaatcttccaaggcaagatcaagcccacttacagattccgctgtctcaacgtcatcttgtggctgggattttgggctgttcagttaaacgtgtgcctgtctaggatctaccttgctgcacacttcccgcatcaagtggtggccggcgtactctctgggattgccgtggccgaaaccttttcacatatccactcaatctataacgctagcctgaagaaatactttcttattacctttttccttttttccttcgccatcggtttttacttgttactaaaaggcctgggtgtggacctcctgtggaccctggaaaaggcacagaggtggtgcgagcagccggaatgggtccatatcgataccactccgtttgcttcattgctgaagaatttgggtacactgtttggactcgggcttgcattgaacagctcaatgtatcgggagtcttgtaaagggaaactttccaaatggctgccatttaggctctcgtccattgtggctagcttggtgttgctgcacgttttcgattctctgaaaccgccgtcgcaggtagagttagtcttttacgtgttgtcattttgcaagagcgctgtggttccactcgcaagtgtgagtgtcatcccctactgcttggctcaggtgctgggccagccccataagaagagcttg

SEQ ID NO: 3061 - DNA, 1071 bp, Artificial Sequence
  derived and/or modified sequence
atggaggaaggaatgaacgtcttgcacgacttcggaattcagagcactcactatctgcaagtgaattatcaggactctcaggattggttcatcctggtgtctgtgatagctgatttgcggaatgctttttacgtgttatttcccatctggttccacttgcaggaagcagtgggcattaagttactctgggtcgctgtgattggggattggctcaacctcgtttttaaatggatcttattcggacagcgcccctattggtgggtgctagataccgattattacagcaatacctcagtacctttgatcaaacagttcccagtgacgtgcgaaaccggtcccgggtcaccaagcggacatgccatgggcacagccggtgtgtactatgtgatggttactagcactttatctatcttccagggcaagatcaagccaacctataggtttagatgtcttaacgtcattctgtggctgggcttttgggcggttcagctgaacgtatgtctgtcaagaatttatctcgccgcccacttcccacatcaggtcgtcgctggcgtgctttccggtattgctgtagcagagaccttcagccacatacacagtatttacaacgcgtccttgaaaaagtatttcctgatcacgttttttctgtttagttttgccataggtttttaccttttgctgaaggggcttggggttgacctgctctggacactggaaaaagcccagaggtggtgtgagcagcctgaatgggtgcacatcgacaccacaccgttcgcgagcctcctcaagaacctaggaactttgttcggactgggcctggctctcaacagctcaatgtaccgagaatcatgcaagggcaagctgtctaagtggctcccgtttcgactgtcgtctattgtcgccagcctggtcttgctccacgttttcgattctttgaagcccccctcacaggtggagttggtgttttacgtactcagcttttgtaagagcgctgtggtccccctcgcttccgtgagtgtaataccctattgcctggcgcaggtcttgggacagcctcataagaaatctcta

SEQ ID NO: 3062 - DNA, 1071 bp, Artificial Sequence
  derived and/or modified sequence
atggaagaaggcatgaatgtgctacacgacttcggaattcagtctacccactatttgcaggttaactatcaggactctcaggactggtttatccttgtgtctgttattgctgacctgcggaacgccttctatgtcttgttcccgatctggttccacttgcaggaagccgttgggatcaagctactgtgggtggcagtgattggcgactggctgaacttggtgttcaagtggatcttgtttggccagcgaccgtattggtgggtgctggacaccgactactatagtaataccagtgtcccacttatcaagcagttcccggttacctgtgagacagggcctggaagcccgagcggccatgccatgggaactgctggtgtttactacgtgatggtaacatccacactgtcgatcttccagggcaaaataaagccaacataccgcttcagatgcctgaacgtcattctgtggttgggcttctgggctgttcagcttaatgtttgcttgtctaggatctacctggcggcacacttccctcaccaggtggttgcaggcgttttgtcaggtatagccgtggctgaaactttctctcacattcatagtatttataacgcctctctcaagaagtatttcttgatcaccttcttcctgttcagtttcgctatcgggttctacctccttcttaaaggactcggtgtggacctgctttggacactggagaaggcccagaggtggtgtgagcagcctgagtgggtccacatcgacaccacgccattcgcctctctgttaaagaatctgggcaccttatttgggctcggactggccctgaactcctccatgtaccgcgagtcatgtaagggaaagctttccaaatggctgccttttcggctgagttccattgtggcaagtcttgttcttctgcacgtgtttgactccctgaaaccgcccagtcaggtggaactcgttttctacgtcctgtcattctgcaagtccgccgtcgttcctctcgctagcgtctcagtgatcccctactgcctggcccaagtcctcggccagccgcataagaagagtttg

SEQ ID NO: 3063 - DNA, 1071 bp, Artificial Sequence
  derived and/or modified sequence
atggaagaagggatgaacgtccttcatgattttggaatccagtctacacactacctgcaggtaaattatcaagattctcaggattggtttatcctggtgtctgtgatagcagatctccggaacgctttttatgtcttgtttcccatatggttccacctccaggaggccgtggggatcaaacttctttgggtggcggtgataggggattggcttaacttggtgtttaaatggattctctttggacagcggccctattggtgggtactcgatacagattattactccaacacatcagtgccactcatcaaacagttccccgtaacttgcgaaactgggccaggatctccttccggacacgctatgggaacagccggggtgtattatgttatggttacatcaactctatccatcttccaggggaagataaaaccgacatataggtttaggtgtttaaacgtgatactctggctcgggttctgggccgtgcagctgaacgtatgcctctccagaatatacctcgctgcccactttccccaccaggtggttgccggagtgctgtctggaatcgcagttgctgagactttctcacatatccattctatctataatgcctcccttaaaaagtattttcttatcacgtttttcctgttcagttttgccataggattctatcttctcctcaaggggttaggggtagatctgctgtggacactcgaaaaagctcagcggtggtgcgagcagcctgaatgggtacacatcgatacgactcccttcgcctcacttctgaaaaacctggggacactctttggacttggactcgccctgaattcatccatgtaccgggaatcttgcaaaggaaaactctcgaaatggctaccattccggctgtcttctatagtcgcttcccttgtgctgctccacgtattcgatagtctgaaacccccttctcaggttgaactagtcttctatgttttgtccttctgcaaaagtgctgttgtccccttggcttctgtttctgtaataccatattgcctcgcccaggtccttggacagccccacaagaaatccctc

SEQ ID NO: 3064 - DNA, 1071 bp, Artificial Sequence
  derived and/or modified sequence
atggaggaagggatgaacgtccttcatgatttcgggatccaatctacccactacctgcaggtaaactaccaagattctcaggactggtttattctggtatcggttatcgcagacctcaggaacgcattttacgtgctgtttcccatttggttccaccttcaggaggctgttggaatcaagctactctgggttgccgtgattggagactggctaaatctagtttttaagtggatcttatttggccagcgaccttactggtgggtactggacacggactattattctaatacgtccgtccccttaatcaagcaattccccgtgacatgcgagacaggccccgggagcccatcaggacacgccatgggtaccgcgggcgtatattatgtcatggtcaccagtacactgagtatattccagggcaagattaagccgacctaccgatttcgctgtttgaacgttatactgtggctcgggttctgggccgtccagctaaacgtgtgcctcagccgcatctatttggcagctcacttcccgcatcaggtagtcgctggggtcttatctggcatcgctgtggccgaaacgttctctcacatccactcaatatacaatgcttccttgaagaaatactttctgatcacattctttttattttcctttgccatcggcttctacttgcttctgaaaggtctgggggtcgacctgttgtggacgctcgagaaggcacagcgttggtgtgagcagccagaatgggtccacattgatactacacccttcgcctctctattgaagaatctcggaaccctgttcggcctcggacttgcactcaatagctcaatgtaccgagagagctgcaaggggaaactgagcaaatggctccccttccggctttcctccatagttgcctcactggtactgctgcatgtttttgactcactgaaacctccctcccaggtcgaattagttttctacgtgctctcattctgcaagtcggctgtggtgccgctggcgtcggtgtccgttattccatattgcctggcccaggtgctcggccagccccacaaaaaatcatta

SEQ ID NO: 3065 - DNA, 1071 bp, Artificial Sequence
  derived and/or modified sequence
atggaagagggtatgaacgttctgcacgatttcggtattcagtcgacgcactatctccaagtcaattatcaggatagccaggactggttcatcttggtctcggttattgcggatttgaggaatgccttctacgtgctattcccaatctggttccatctgcaggaagcggtcggaataaagttgctctgggtggccgtgattggcgattggttgaatctcgtgttcaagtggatactgttcggacagagaccttattggtgggttttagacacagactattactctaacacgagtgttccgctgataaagcaattcccagtgacttgcgaaaccggcccgggcagtccctctggccacgccatgggcacggcaggagtgtactacgtgatggtgaccagtacgctgtccattttccagggaaaaataaagcccacctatcggttccgctgcctaaatgtgatcctgtggctcggcttttgggccgttcagttaaacgtctgcctgagcaggatctacttggctgctcacttcccccatcaggtggtggctggcgtcttgagcggtatcgcagtggccgagacattttcccacatccattcgatttacaatgcgtcactgaagaagtattttttgattacgttctttctcttttcgtttgccataggtttttacttgcttctcaagggactgggcgtggatctactgtggacgttagaaaaggcgcagcgatggtgtgagcagcccgagtgggttcatattgacacaaccccgtttgcgagtttgctgaagaatctggggacactcttcggacttggccttgccttgaacagtagcatgtaccgggaatcgtgtaagggcaagttgtccaaatggttgccgtttagactgagctcaattgtcgcctccctcgttctgctacacgtgttcgacagtctcaagcctccgtcccaagtcgaactggtcttctacgtgctaagcttttgtaaatccgcggtggtcccgttggcctcagtgtcggtcatcccgtactgcttggcccaagtgctaggccaaccccataagaaatccctc

SEQ ID NO: 3066 - DNA, 1071 bp, Artificial Sequence
  derived and/or modified sequence
atggaggagggtatgaacgtgctccatgatttcggaattcaatccactcactatctgcaggtgaactaccaggattcccaggactggttcatcttggtgagcgtgatcgcggacctgaggaacgcattttatgttcttttccctatctggttccatttgcaagaggccgtcggtattaagttgctctgggtcgcggtcatcggagactggctgaacttggtctttaagtggatcctcttcggacagcggccatactggtgggtgctggacactgattactactcgaatacttccgtgccgcttatcaagcagttcccagtcacctgcgaaactggacccggctcgccatcgggacacgcgatgggaaccgccggagtctactacgtgatggtgacctcgaccctgtcaatctttcaaggtaaaatcaagccgacgtaccgctttagatgccttaatgtcatcctctggctgggcttttgggctgtgcagttgaacgtgtgtctgtcacgcatctacctggccgcccatttcccacaccaagtcgtggccggggtgctgagcggcattgcggtcgctgaaaccttcagccacatccactcaatctacaacgcaagcctgaaaaagtacttcctcatcacgttctttctgttttccttcgctattggattctacctgctccttaagggcctgggcgtggatctcctgtggaccctggagaaggcacagagatggtgcgaacaacccgagtgggttcatatcgacaccactccgttcgcctccctcctgaagaatctggggactctcttcggcctcggactcgcgctgaatagctcgatgtaccgggaaagctgcaagggaaagctctcgaaatggctgccgttccgcctgtcctcgatcgtggccagtctggtgctgctccacgtgttcgactcactgaagcctccgtctcaggtggaactggtgttctacgtgctgtcattctgcaaatccgccgtggttccgttggcatcggtgtccgtcatcccttactgtcttgctcaggtgctcgggcaaccgcacaaaaagagcctg

SEQ ID NO: 3067 - DNA, 1071 bp, Artificial Sequence
  derived and/or modified sequence
atggaggagggcatgaacgtcctccatgattttggcattcaatccactcactatttgcaggtgaactaccaagatagtcaagactggtttatcctggtttctgtcattgccgatctgcgcaacgccttctatgtgctgttcccgatttggttccacctgcaggaagcggtcggcatcaagctgctgtgggttgctgtgattggcgactggctgaacctcgtgtttaaatggattctctttgggcagcgaccgtactggtgggtcctggacaccgattactacagcaacaccagcgttcctctgatcaagcagtttccagtgacgtgcgaaaccggccctggaagtccaagcggtcatgcaatgggcaccgctggcgtatattatgttatggttaccagcactctgtccattttccagggcaagattaaaccgacctatcgttttcggtgtcttaatgtgatcctgtggctgggcttctgggctgtgcaactgaacgtgtgtctgagccggatttatctagcagcccattttccgcatcaggtagtggcaggtgttctcagcggtatagcagttgcagaaacctttagccacattcactcaatctataatgcgagcctgaaaaagtacttcctgataaccttcttcttatttagctttgcaatcggtttttatctgttgttgaagggactgggtgtcgacctgctgtggaccctagagaaggcccaacgttggtgtgagcaaccagagtgggtccacatcgatactactccatttgcaagcctgctgaagaatctggggactctgttcggactaggcctggctctgaacagcagcatgtaccgggagagctgcaagggcaaactctcaaagtggctgccttttagattgtccagcatcgtggcctctctggtactgctccacgtgtttgacagcttgaagccgccgagccaggttgaacttgtgttctatgtgctgagcttttgcaaaagcgcggttgtccctctggctagcgtttccgttatcccgtactgtctcgcccaggttctgggtcagccacacaaaaaaagcctg

SEQ ID NO: 3068 - DNA, 1071 bp, Artificial Sequence
  derived and/or modified sequence
atggaagaagggatgaacgtgcttcacgactttgggatccagtccacccattacctccaggtgaactaccaggactcgcaggactggttcattctggtctctgtaatcgcggatctgaggaacgcgttctatgtgctgtttccgatctggttccatctgcaagaggccgtcgggatcaaactgctttgggtggctgtgatcggtgattggctgaatctcgtgttcaaatggatactgtttgggcaacggccatactggtgggttttggacactgattactattccaatactagtgttcctctaatcaaacagttcccagtaacttgcgagaccgggccagggtccccaagcggccacgccatggggactgcaggcgtctactatgtgatggttactagcactttgtctattttccagggcaaaatcaaaccgacatatagatttaggtgcctgaatgtgatactgtggctggggttctgggcagtgcagctgaacgtgtgcctatcccggatttacctggccgctcatttcccacaccaggttgtcgcaggcgtcctgtccggtatcgcggtggccgagactttctctcacatccactcgatctataacgcatccctcaagaagtattttctgatcacgtttttcttgttctcattcgccatcgggttttatctgctgctgaaaggcttaggggtggacctcctctggactttggagaaggctcagcgatggtgtgaacagcccgaatgggtgcacatcgacaccaccccctttgcaagcctgctgaagaacctgggtaccctattcggactgggcttagccttgaatagtagcatgtatagagaatcgtgcaagggcaaattgtctaagtggctgccattccgcttgagctctattgtggcatcactagtactgttgcacgtctttgatagcctcaagcccccaagtcaggtcgagcttgtattctatgtcctgtctttctgcaaatccgcagtcgtccccctcgctagtgtgtccgtcatcccttattgcctggcccaggtcctcggtcaaccccataagaagtctttg

SEQ ID NO: 3069 - DNA, 1071 bp, Artificial Sequence
  derived and/or modified sequence
atggaggaggggatgaatgtgctgcacgattttggaattcaatctacgcactacttgcaggtgaactaccaggactctcaggactggttcatcctggtctccgtgatcgcggatctgcgcaacgccttttacgtcctcttcccgatctggtttcacctccaagaagccgtgggcataaagctgctgtgggtcgccgttatcggggattggctgaatctcgtgtttaagtggattttgttcggccagcgcccttattggtgggttctggataccgattactattctaacacaagtgtccccctgatcaaacagttccctgtcacatgcgagacaggcccgggctcccccagtggacacgccatgggtaccgccggagtttactatgtgatggtgacctccaccctctctatctttcaaggaaagataaaacccacctacaggttccgctgtctgaatgtgatactttggctgggtttctgggctgttcagctcaatgtgtgcctgtcacggatttatttagccgcgcacttcccgcatcaggttgtggccggagtgttgtccggcatcgctgtggcagagactttttcacacattcactctatttacaacgcctccctgaaaaaatatttcctcatcaccttctttctctttagtttcgcaattgggttttacctgctgctgaaggggctgggcgtggacctcctgtggacactcgaaaaagcacagaggtggtgtgaacagcctgaatgggtacatattgacaccacacctttcgccagtttattgaaaaatctgggcacactgttcgggttgggcctggctttgaacagtagcatgtacagagagagctgtaaggggaagttgagtaaatggctccccttccgcctgagtagcatagtagcatctcttgtgctgctgcatgtgtttgatagcctcaagccgcccagccaggttgaacttgtattctacgtgctctctttttgcaagagtgcggtggtgccactggcatctgtctccgtgatcccctactgcctggctcaggtactcggacagcctcacaaaaagtcactt

SEQ ID NO: 3070 - DNA, 1071 bp, Artificial Sequence
  derived and/or modified sequence
atggaagaggggatgaatgtgttacatgattttggcatacagtcaacccattacctccaagttaattatcaggatagtcaggattggtttatcctagtaagtgttatcgccgatttgcgaaacgctttctatgtgctgtttccgatctggtttcacctgcaggaagctgttgggatcaagctcctgtgggtggcagtaattggcgactggctaaatttggtattcaagtggatactcttcggccagaggccttattggtgggttcttgacacagactattactccaacacgagcgttccgctgattaagcagttccctgtgacgtgcgagaccggccctgggtcccccagcgggcacgccatgggaacagccggagtatactacgtaatggtcacaagtaccctgtctatcttccagggcaaaatcaagcctacatacaggtttcggtgcctgaacgttatcctgtggctggggttctgggccgtacagctcaacgtgtgtctgtcccgcatctatctggcggcacacttcccacatcaggtcgtcgcgggcgttttaagtggtatcgcagtggctgagaccttctcccacatccactctatttacaacgcttctctcaaaaagtactttctgatcaccttctttctattcagcttcgcgatcggcttttacctcctcctgaaaggcctgggcgtggacctgctctggactctcgagaaggcgcaacgttggtgcgagcagcccgagtgggtccatattgataccaccccatttgcttccctgcttaaaaacctgggaactctcttcggactgggtctggcactcaattcctctatgtaccgagaatcttgcaaaggaaaactctcaaaatggctcccgtttagactgtcctccatcgttgccagtctggttctcttacatgtctttgatagcctgaaacctccctcgcaggtcgaactggttttctatgttttgagcttttgcaaatcggccgtggtgcccctggcatctgtcagcgttatcccctattgtctcgcccaggtcttgggacaacctcacaaaaagagtctg

SEQ ID NO: 3071 - DNA, 1071 bp, Artificial Sequence
  derived and/or modified sequence
atggaagaaggtatgaatgttctacatgattttggtatacaatcgacgcattatttacaagtaaattatcaagattcgcaagattggtttatattagtatcggtaatagcggatttacgaaatgcgttttatgttttatttccgatatggtttcatttacaagaagcggttggtataaaactactatgggtagcggttataggtgattggttaaatctagtatttaaatggatattatttggtcaacgtccgtattggtgggttctagatacggattattattcgaatacgtcggtaccgttaataaaacaatttccggttacgtgtgaaacgggtccgggttcgccgtcgggtcatgcgatgggtacggcgggtgtttattatgttatggttacgtcgacgttatcgatatttcaaggtaaaataaaaccgacgtatcgatttcgatgtctaaatgttatactatggctaggtttttgggcggtacaattaaatgtatgtttatcgcgtatatatttagcggcgcattttccgcatcaagttgtagcgggtgttttatcgggtatagcggtagcggaaacgttttcgcatatacattcgatatataatgcgtcgttaaaaaaatattttttaataacgttttttctattttcgtttgcgataggtttttatctactactaaaaggtctaggtgtagatttattatggacgttagaaaaagcgcaacgatggtgtgaacaaccggaatgggtacatatagatacgacgccgtttgcgtcgttactaaaaaatttaggtacgctatttggtttaggtttagcgttaaattcgtcgatgtatcgtgaatcgtgtaaaggtaaattatcgaaatggttaccgtttcgtctatcgtcgatagttgcgtcgttagtattattacatgtatttgattcgctaaaaccgccgtcgcaagttgaattagttttttatgtactatcgttttgtaaatcggcggtagttccgctagcgtcggtttcggtaataccgtattgtttagcgcaagtactaggtcaaccgcataaaaaatcgtta

SEQ ID NO: 3072 - DNA, 1071 bp, Artificial Sequence
  derived and/or modified sequence
atggaggaaggaatgaacgtccttcacgattttgggatacagtctacccactaccttcaggtgaactatcaggattcacaggattggtttatattagtttcagtaatagccgatctccggaatgctttttacgtgctcttccccatctggtttcacctgcaggaggcagtcggcataaagctcctgtgggtcgcagtgatcggagactggctgaatctggtcttcaagtggattttgttcgggcagcggccctattggtgggtattggatactgactactatagcaacaccagcgtgcccctgataaagcaattccctgtgacgtgcgagaccggacccgggagcccgtctggccatgccatgggtactgccggggtctactatgtgatggtaacatcaaccttgtcaatcttccaagggaagatcaagcctacttatcggttcaggtgtctgaacgtgattctctggctcggtttctgggccgtccagctgaatgtttgcctgtctcgtatttacctcgctgctcacttcccacatcaggtagtggccggggtgctgagtggaattgcagtagcggagactttctcccatatccacagcatctacaatgcaagcctcaaaaagtacttcctaatcaccttctttcttttcagcttcgccatcggattctatctgctgttgaagggtcttggcgtcgatctgttatggaccttggagaaagcccagagatggtgtgagcaacctgagtgggtacacatcgatactactccttttgcatcactactgaaaaatctgggcaccctattcggactggggctggccctcaatagcagcatgtaccgcgaaagttgcaaagggaaattgtctaaatggctaccattccgtctgagttccattgtggccagtctggtgttactgcacgtgtttgacagtcttaaaccccctagtcaggtggagcttgtattttatgtgttgtccttctgcaagtcggcagtggtgccactagcctccgtgtctgtgattccctactgcctcgcccaggtgctagggcagccacacaagaagtctttg

SEQ ID NO: 3073 - DNA, 1071 bp, Artificial Sequence
  derived and/or modified sequence
atggaggaggggatgaatgtgctgcacgattttgggatccaatcaacgcactatctgcaagttaactaccaagacagccaggattggttcatcctggtgtcagtcattgccgatctgagaaatgccttctacgtgctgtttcccatctggttccatttgcaggaggctgtcggaatcaagctcctctgggtggctgtcattggcgattggctcaacctcgtgttcaagtggattctgtttggccaacgcccatactggtgggttctggacactgactattattctaatacctctgtcccactcatcaaacaattccctgtcacttgcgagactgggccaggctcacctagcggtcacgcaatgggcactgccggggtgtactacgtaatggttactagtacgttgagcatcttccagggcaaaataaagcccacatatcggttcaggtgcctgaacgttattctctggctgggattttgggctgtgcagctgaacgtgtgcttatcgagaatctaccttgccgctcattttccccatcaggtggtggccggagtactttctggaattgctgtagccgaaactttcagtcatatacacagtatttacaacgcctccttaaagaaatacttccttatcaccttctttctcttcagtttcgccattggtttttacctgctgctgaaaggcttaggcgtcgatctactgtggacattggagaaggcccaaagatggtgcgaacagccggaatgggtacatatagatacaactcctttcgccagtctccttaaaaatctggggacactgttcggtctggggctggccctgaactccagcatgtaccgcgagagctgtaaaggaaaactgtccaagtggctgcccttccgcctgagtagcattgtcgcatccctcgtgctcttacacgtctttgattcgctgaagcccccgtcccaggttgagctagtgttttatgtgctgtccttctgcaagagcgccgtggttcctctggctagcgtctccgtgattccatactgccttgcacaagtactggggcaaccccacaagaaaagtctg

SEQ ID NO: 3074 - DNA, 1071 bp, Artificial Sequence
  derived and/or modified sequence
atggaagagggtatgaacgtcttgcacgacttcggcatccagtctacacactatctgcaggttaattaccaggacagccaggactggttcatcttggtgtctgtgattgccgacctacggaatgccttctatgtgcttttccctatttggtttcacctgcaggaggccgttggaattaaattgctctgggtcgctgtgattggcgattggcttaacttagtgttcaaatggatcctgtttgggcaaaggccctattggtgggtgctggatacggattattactccaacacttccgttcccctgattaagcaattccctgtgacatgtgaaacaggtccaggatcacctagcggccacgctatggggaccgccggagtttactatgtgatggtaacctctactctctcgatatttcagggcaagattaagccgacttacagattccgctgtctgaacgttatcctgtggctggggttctgggctgtgcagctgaacgtgtgcctctcccgaatttaccttgccgcgcatttcccacaccaggtcgtcgcaggtgttctgagcgggatcgccgtcgcagagactttctctcacatccattctatctataacgcctctctgaaaaaatactttctgatcacctttttcctattctccttcgcaataggcttttacctattgctgaagggtctcggggtcgatctgttgtggactctggagaaggcgcagagatggtgtgagcagcccgaatgggtgcacattgacaccactccatttgcttccctgctgaaaaatcttgggactttattcggcctgggtttagctcttaacagctccatgtatcgcgagagctgcaagggaaagcttagcaagtggttgccattcaggctgtcctctatagttgctagtctggtgctgctccacgtcttcgatagcttaaagcccccctctcaggtcgaactggtgttttatgttctgtccttctgcaaatccgcagtggttcctttagcctccgtgagtgtcataccgtactgccttgctcaagtcctgggccagccccacaagaagtccctg

SEQ ID NO: 3075 - DNA, 1071 bp, Artificial Sequence
  derived and/or modified sequence
atggaggaagggatgaacgttctgcatgactttggcattcaatctacccactatctgcaggttaactatcaggactcccaggactggttcatcttggtcagcgtgatagctgatctcagaaacgccttttatgtgctgttccctatctggtttcacttgcaggaggccgtaggcatcaaactgctttgggtcgcagttatcggggactggctcaatctcgtgttcaagtggattctgttcggccagagaccgtattggtgggtgctggacacagattattattctaatacatccgttcccctcataaagcagttcccagtcacatgcgagactggcccaggaagcccctccgggcatgcaatgggcaccgccggagtgtactacgtcatggtgaccagtaccctcagtattttccaaggaaagatcaagcctacctatcgcttcaggtgcctcaatgtaattttgtggctcggattttgggcagtccaactgaacgtttgtctctctaggatctacttggctgcacactttcctcaccaggttgtagctggtgtcttgtctggaatcgctgtggcggagacattcagccacatccattccatctataatgcttctttgaaaaagtactttctcattaccttcttcctgttctcattcgccattggtttctacctgctgctgaagggactgggggtcgacctgctgtggacactggaaaaagcccagaggtggtgcgagcagccggagtgggtgcacatcgacaccaccccattcgcctcattgctcaaaaacctcggaactcttttcggtttgggactggctttgaactctagcatgtaccgggagtcttgtaagggcaagctgtcaaagtggctcccctttcggttgtcaagcattgtcgcgtcacttgtgttgctccacgttttcgattctctcaagccgccaagccaggtggagctggtcttttacgtgctgtccttttgtaaatctgccgtcgtcccactcgcaagcgtttccgtcatcccatattgtttggcccaagtcctgggccaacctcataagaaaagtctg

SEQ ID NO: 3076 - DNA, 1071 bp, Artificial Sequence
  derived and/or modified sequence
atggaagaggggatgaatgtgttgcatgactttgggattcagtcgacccattatctccaggtgaactatcaggactcgcaggactggttcattctagtatccgtcattgccgatctgcggaatgcattttacgtactcttccccatctggttccacctgcaagaggcggttggtataaaactgctgtgggtggcggtgatcggggactggttgaatcttgtcttcaaatggatcctattcgggcagcgcccttattggtgggtgctggataccgactattactctaacacctctgtgcctcttattaagcagtttcctgtgacatgtgaaaccggtcctggcagtccttccggccacgccatgggaactgcaggcgtttattacgtcatggtgacaagcacactgagcatttttcagggaaaaatcaagccaacatatcgcttccgttgcttgaacgttatcctatggctcggcttctgggccgtccagctgaatgtgtgcttgtcacgaatctatctcgcagcgcatttcccacaccaagtggtcgctggtgtcttaagcggcatagccgtggctgagactttttcacacatccattccatctataacgcatctttaaaaaaatatttcctcatcacattctttttattttcctttgctattgggttctatctgctgctcaaggggctgggagttgacctgctttggacgctggagaaggcacagaggtggtgtgaacagccagagtgggtgcacattgataccacacctttcgcgtccttgttaaagaacctcggtactctgtttggcctgggactggcccttaattcaagtatgtatcgcgaatcctgcaagggcaagctatctaaatggcttcctttccggctgtccagcattgttgccagtctagttttactgcatgtctttgacagcctgaaaccccccagtcaagtggaattggtcttctatgttctctcattctgtaaatccgcggtggttccattggctagcgtgagtgtgattccctattgtcttgcccaggtgctgggccagcctcacaaaaaatctctt

SEQ ID NO: 3077 - DNA, 1071 bp, Artificial Sequence
  derived and/or modified sequence
atggaagagggaatgaacgttcttcacgacttcggtatccagagcacgcactaccttcaagtgaactaccaagactcacaggattggttcatcctggtgtctgtgattgctgacctgagaaacgcgttttatgttttgttcccaatctggtttcatcttcaggaggccgtgggaattaagctactgtgggtagctgtgatcggcgactggctcaacctggttttcaaatggatactcttcggacagcggccatattggtgggtattggacaccgactactacagcaatactagcgtgccactaattaagcagttcccggtgacatgcgagaccggaccaggctcgccctccggtcatgcaatggggacagcgggtgtttattatgtcatggtgacatctaccttgagcatttttcagggcaagattaagcctacttatcgctttcgatgcctcaatgtgatattgtggcttgggttttgggccgtccaattgaatgtgtgcctttctaggatttaccttgcggcccatttccctcaccaggtggttgcaggcgtgctctccgggattgcagtcgctgagactttcagtcatatacatagcatctacaacgctagcctcaagaaatatttcctgatcaccttttttctctttagttttgccattgggttctacctattactgaaaggcttgggcgttgaccttctctggacactcgagaaagctcagagatggtgcgagcaacccgagtgggtgcacatcgatactaccccattcgcctcccttctgaagaatctcggcacactgtttggcctggggcttgcactcaattcgtctatgtatcgggagtcgtgcaagggcaagttaagcaaatggttgccattccggctgagctcaattgtggcttccctcgttttgctccatgtttttgactccctgaagcctccctcccaggtggaattggttttctacgtgctgagcttctgtaaatccgcggtcgtgcctctggcatccgtgagtgttatcccctattgtcttgcccaggtcctaggtcagccccataaaaagagcctg

SEQ ID NO: 3078 - DNA, 1071 bp, Artificial Sequence
  derived and/or modified sequence
atggaagaggggatgaatgtattgcacgactttggaatccagagcacacactacctgcaggttaactatcaggacagccaggattggtttattcttgtgtcggtgatcgctgacctgagaaatgctttctatgtcttgtttcctatctggttccatctgcaagaggcggtgggcattaagctactttgggttgctgttatcggggattggctgaacctggttttcaaatggattctgtttggccaaaggccctactggtgggttttggacacagattactattctaacacgagcgtgccactgatcaagcaatttccagtaacatgcgaaaccggtcccgggtctccttctggccatgccatgggcactgcgggagtgtattatgtgatggtgaccagcaccctttcaatatttcagggaaagatcaaacctacctatcgatttcgctgcctgaacgtgatcttgtggctcggattctgggctgtccagctgaacgtgtgccttagtaggatatacctggctgctcacttcccccaccaggtagtcgccggggttttgagtggcattgcagtcgccgagactttttcccacatccactcaatttataatgcttctctgaagaagtactttcttatcacttttttcctattctcattcgccatcgggttctacctgttgctgaagggtctcggggttgatctgctttggacccttgagaaagcccaaaggtggtgtgaacagccggaatgggtgcatatcgatacaaccccgttcgcctcccttctgaagaacttgggcactcttttcggtctgggtcttgctctcaactcttcgatgtatcgagagagctgcaagggtaagttgtctaagtggctgcccttcaggctatctagtattgtggcatcattagtgctgttgcatgtcttcgatagcttgaaacctccaagccaggtggagctagtattttacgtactatcattttgcaagagcgccgtcgtacctttggctagcgtgtccgtcatcccctactgcctggcacaggttttagggcaaccccataagaagtcactg

SEQ ID NO: 3079 - DNA, 1071 bp, Artificial Sequence
  derived and/or modified sequence
atggaggaaggtatgaacgtcttgcacgactttggcatacagagcacacactacctgcaggtgaactaccaggatagtcaagactggtttatcttagtgagcgtgattgctgatctgcgcaacgctttctacgtcctctttcccatatggttccatctgcaggaggctgtcggcatcaagctactgtgggttgccgtcatcggcgactggctgaatctggttttcaaatggattctgtttggtcagagaccctactggtgggtcctggacacagattattactccaacacatctgtgcccctgatcaagcagtttccagtgacctgcgagactggaccgggcagtcccagcggccacgctatgggcactgctggagtatattacgtcatggtgactagcaccctgagcatcttccaaggcaagatcaagccgacatataggtttagatgtctgaatgttatactgtggcttggcttttgggccgtacaattaaacgtttgtctcagtaggatctaccttgccgcacacttcccacatcaagtggtggctggcgtgctttcaggaatcgcagtggctgagacattcagtcacatccatagcatctacaacgcaagcctcaaaaagtattttctgatcacctttttcttgttcagcttcgccatcggtttttatttgctcctgaagggactgggagtcgacttgctgtggacactcgagaaggcacaaaggtggtgtgagcagccagaatgggtgcacattgacaccactcctttcgccagcctgctgaaaaacctggggaccctttttggcttgggactcgcgttgaacagctcaatgtatcgggaatcttgcaaaggaaaactttcgaagtggttgccttttcggctgtcaagcattgttgccagcctcgttctgctacatgtctttgatagcttaaagcctcctagtcaagtagaactggtgttctacgttttaagtttttgcaagtctgcggttgtcccactggcctcagtgtctgtaatcccatactgcctcgcccaagtgttgggccagcctcacaaaaaatctctg

SEQ ID NO: 3080 - DNA, 1071 bp, Artificial Sequence
  derived and/or modified sequence
atggaggaaggcatgaatgtccttcacgatttcggtatccaatctacccattacttgcaggtgaactatcaggattctcaggactggttcatactcgtaagcgtgatcgctgatctccggaacgctttttatgtgctttttcccatttggtttcaccttcaggaggcggtgggcatcaaacttctatgggttgccgtgattggcgactggttaaatctggtcttcaaatggattttatttggccagcgaccctattggtgggtgcttgacacagattactactccaacacttctgtgcccctcatcaaacagttccccgtgacttgtgagaccgggccaggatccccaagcggtcacgccatgggaacagcaggagtttactatgtgatggtaacttctacgctgtctatattccaagggaaaattaagccaacatacaggtttcggtgcttgaacgttattctctggctgggcttttgggcagtccagctgaacgtgtgtttgtcaaggatctacctggcagctcactttcctcaccaagtcgttgcaggcgttttgagtgggattgccgttgccgagaccttttctcatattcactccatatacaacgcgtcccttaaaaaatatttcttgatcaccttttttctatttagctttgctatcggtttttacctcctcctgaaaggtctgggagtcgatctgctgtggactttagagaaagctcagcgctggtgcgagcagccggaatgggtgcacatagacacgacacctttcgcgtcactgctgaaaaatcttggtacattattcggtcttggcctggctctcaactcatctatgtatcgggagagctgtaaaggtaagctgtccaaatggcttccttttcgactgtcatcaattgtcgctagtctcgtgctgctgcatgtcttcgactcgcttaaaccccccagtcaggttgaactggtgttttatgtgttatcgttctgtaaaagcgcagttgtacctctggcatcagtttccgtcattccctattgtttggcccaggtgctgggccaaccacacaaaaaatccctc

SEQ ID NO: 3081 - DNA, 1071 bp, Artificial Sequence
  derived and/or modified sequence
atggaagagggcatgaacgtcttgcatgacttcggtattcagagtacccattatcttcaggtgaactaccaagattctcaggactggtttatcttagtgtctgttatcgccgatctgcgtaacgcattctacgtgctcttcccaatctggttccaccttcaggaggcggtggggatcaagttattgtgggttgcggtgatcggagattggcttaatctggtcttcaaatggattctgtttggacagcggccttactggtgggttctcgacacagactactatagcaacacatccgtaccgctgataaaacagttcccagtgacatgtgaaacagggccagggagcccctcaggccatgctatggggaccgctggcgtgtattatgtaatggtcacttctaccctgtcaatatttcaggggaaaattaaaccgacttatcggtttaggtgcctgaatgtgatcctgtggctcgggttttgggccgtgcaacttaatgtgtgtctgtcgcgcatttacctggcagcccacttcccccaccaggttgtcgccggcgtgttatccggtatcgccgtggcggaaacattcagccatatccattccatatataatgcatctttgaagaagtacttcctgattaccttttttctcttcagctttgctataggtttttatctgttgctgaaagggcttggagtggacctcctgtggaccctggagaaagcccagcgctggtgtgagcagccagagtgggttcacattgacactactccctttgcttcattgttgaagaacctcggtacgttgttcgggttgggcctggctttgaatagtagtatgtaccgggagtcatgtaagggaaagctctctaagtggctgccctttcggctgtccagtattgtagccagccttgtgctattgcatgtctttgactctcttaagcccccttcgcaggtggagttggtattttacgtgctatctttttgtaagagtgcagttgtgcctctcgcaagcgtctcggtgatcccctattgcctggctcaggtgctgggacagccacacaagaagtctctc

SEQ ID NO: 3082 - DNA, 1071 bp, Artificial Sequence
  derived and/or modified sequence
atggaggagggtatgaatgttctgcatgacttcggcattcaatcaacccactatttgcaggtgaactaccaggacagccaggattggttcatcctagtgagcgtcatcgctgacctgaggaacgccttttatgtattgtttccaatctggtttcacctccaggaggctgtgggtatcaaactgctgtgggtagcagtcattggtgactggcttaaccttgtatttaaatggattcttttcggccaacggccctattggtgggtactcgacacagactattattctaatacaagtgtgcccttgatcaagcagttccctgtcacatgtgagacggggccgggctcaccttctgggcatgccatgggaactgccggtgtgtactacgtcatggtgaccagtaccttgtctatctttcagggaaagattaaacccacatacaggttcagatgtctgaacgttattctctggctgggattttgggctgtgcagctgaatgtctgcctcagccggatatatcttgccgctcatttcccccatcaggttgtggcaggagtgctctcagggattgccgtcgctgagactttttcgcatattcactctatttacaacgcatcactcaaaaagtatttcctgattaccttttttctgtttagtttcgccatcggtttctatctcctgttaaaaggacttggcgttgacttactgtggactttggaaaaggctcagcgatggtgcgaacagccagagtgggttcatatcgacaccactccattcgcttccctcttgaaaaatttaggcaccctgtttggactggggctagctctgaacagttcaatgtaccgggaaagctgtaaaggcaaactgtctaagtggttaccgtttagactgtcatcaatcgtggcttcactggtactgctgcacgtcttcgatagcctgaagccccctagccaggtggagctcgtgttttacgttctgtcattttgtaagtccgcagtcgttccccttgcttccgtgtccgtgataccatattgcctggcgcaggtgctcggccagcctcacaagaaaagtttg

SEQ ID NO: 3083 - DNA, 1071 bp, Artificial Sequence
  derived and/or modified sequence
atggaagagggaatgaatgtgcttcacgattttgggattcagagcacgcactatctacaagtcaactaccaggattctcaggattggttcatcctagtaagcgtcatcgctgaccttcgaaatgccttttacgttctatttccaatctggttccatttgcaggaggcggtaggtattaaactcctttgggtcgcggtgataggagattggcttaacctcgtgtttaaatggattttgttcggacaacggccttactggtgggtccttgatacagactactattcgaatacctctgtcccactaatcaagcaatttccagtcacttgcgagacgggtcctggttctccctccgggcatgcaatgggcactgctggagtgtattacgtgatggttaccagtactctctctatctttcaagggaagattaagcctacctatcgattcagatgtctgaacgtcatactctggctggggttttgggctgtgcaattgaacgtctgtctctctcgcatttaccttgcagctcactttccacatcaagtcgttgcaggggtgttgtcagggatcgctgttgcagagactttctcacatattcattcaatttacaacgcgtcactgaagaagtatttcttgatcacattttttttgttctcgttcgctatcgggttttacctgctgctcaaaggtctgggagtagatcttctttggaccctcgagaaggctcaacgatggtgcgaacaaccagaatgggtccatattgacacaacgcccttcgcgtcattattaaagaacctcggaacgctgttcggcctgggtcttgccctcaattccagtatgtacagggaatcctgtaaggggaagttatctaaatggctaccatttaggctctcttctatagtcgcatctctcgtgttgcttcatgtgtttgactctttgaaacctccttctcaggtggaacttgtcttctatgttctttcgttctgtaagtccgccgtcgtccccttggcctcagtatctgtgattccgtattgtttagcgcaagtgctgggccagccccataaaaagtcgttg

SEQ ID NO: 3084 - DNA, 1071 bp, Artificial Sequence
  derived and/or modified sequence
atggaagaagggatgaacgtgttgcatgattttggtatacagtccacccactaccttcaggtaaattaccaggattcccaagactggtttatactcgtgtcagtgatcgcagacttaaggaatgctttctacgtgctgttcccgatttggtttcacttgcaagaggcagtggggatcaagttgctttgggtcgcagtgatcggggattggctgaacctagtgtttaaatggatcctgtttggccagagaccatactggtgggtgttggacactgattattactctaacacaagcgtgcccctcatcaagcagtttccagtcacttgtgaaactgggccaggatcaccctccggacatgctatgggcactgccggcgtgtactatgtcatggttacctctaccctaagcatcttccagggaaaaatcaagcccacgtaccggttcagatgcctcaatgtgattctttggctaggattctgggccgtgcagctgaacgtatgtctgagtagaatttacttggccgcccattttccgcaccaagtcgtggctggcgtgctgtcgggtatcgcagttgcggagacattctcacacatccactcaatctataatgcatctctcaaaaagtattttcttattacattctttctgttctcctttgccataggattctacttgctgctcaaaggcctcggagtcgacctgctctggacccttgagaaagctcagaggtggtgcgaacagcccgagtgggtgcacattgataccacgccgttcgcttcactgcttaagaatctcggtacactcttcgggttagggttagccttgaacagttctatgtatagggagagctgcaaaggcaagttaagtaaatggctcccttttaggctctcgagcattgtagccagcctggtgttgctacatgtcttcgacagcctaaaacccccatcacaggttgaactagtattctacgtcctctctttctgcaagtctgctgtggtgccgctggctagcgtttccgtcataccatactgcctggctcaggtgctcggccaaccacacaaaaaatccctc

SEQ ID NO: 3085 - DNA, 1071 bp, Artificial Sequence
  derived and/or modified sequence
atggaggagggcatgaacgtgcttcacgactttggaattcaatccactcactacctccaggttaattaccaggattcacaggattggttcatcctggtttcagtgatcgcagatctgaggaacgcattttatgtgctatttccaatctggttccacctgcaggaggctgtggggatcaagctcttgtgggtggctgtgattggcgactggttgaatctggtcttcaagtggatactattcggacagcggccgtactggtgggtgctggacaccgattattactccaataccagtgtgcctcttatcaagcagtttccggttacatgcgagaccggccccggctcccctagtggccacgccatgggaaccgcaggagtctattacgtcatggtgaccagtacactctcaatttttcaggggaaaatcaagccaacctatcggtttcggtgcctgaatgtgatattgtggctgggcttttgggctgtacagttgaacgtgtgtttgagccgaatctacctggccgcccatttcccccaccaggtcgtcgcaggcgtgctcagcggaatcgccgttgcagagactttcagccatatccattccatctacaacgccagccttaagaaatactttctgatcacctttttcctcttttcattcgcaattgggttctacctgctgctgaagggtcttggggtcgacctcctttggactctcgagaaggcacagcggtggtgtgaacaaccagagtgggtccatatcgacacaactccattcgccagcctgctgaagaatctgggtacgctctttggactaggcctcgccctgaactctagcatgtatagagaaagttgcaaaggtaaactgtccaaatggctgcctttcaggctcagtagcatagtggcttcactggtcctgctgcatgtgtttgactccctgaagcctccctcacaggtcgagctcgtcttctatgtgctatccttttgcaagagtgccgtggtgccattggcttctgtttcggtcataccatattgcctcgctcaagtcctgggacagccacataaaaaaagtttg

SEQ ID NO: 3086 - DNA, 1071 bp, Artificial Sequence
  derived and/or modified sequence
atggaagagggtatgaacgtcttgcatgactttggcatccagagcactcactatctccaggtgaattatcaggattctcaggattggttcatccttgtatccgtcatcgctgatctgcgcaatgctttctatgttttgttccctatatggttccatcttcaggaggccgtgggcatcaaactgctttgggtcgctgtgatcggcgattggctgaatctcgtcttcaagtggatcctgttcggacaaagaccctattggtgggtcttggatacagactattactcaaatacttctgtcccattgatcaagcagttccccgtgacctgcgagactggtccaggctctccctctggtcacgccatgggaaccgctggagtctactacgttatggtgactagtaccttgtctatcttccagggtaagatcaagcccacataccgtttccgctgcctcaacgtgatcctgtggctcggcttctgggccgtccagttgaacgtgtgcctgtcccgtatctatctggccgctcactttccacaccaggtcgtcgctggtgttctttctggaatagcagttgccgagacatttagtcatattcactccatatacaacgcttctttgaagaaatactttcttattacattcttcttgttttctttcgccatcggcttttacctgctgctgaagggtttgggagtggatcttctctggaccctggagaaagcccagcgctggtgtgagcagcccgagtgggtccacatcgatactacaccctttgcttcactgctcaaaaacctcggcaccctgttcggtctgggcttggccctcaactctagtatgtatagggagtcctgtaaaggtaagctgtctaagtggctgccttttcgtctgagctccattgttgcttcactcgtcctgctgcacgtcttcgattccttgaagcctccatcacaagttgagttggtgttctatgttttgagtttctgtaaatcagctgtagtaccactcgcctccgtaagcgttattccttattgtctcgcacaggtcctgggacagccccacaaaaagtccctc

SEQ ID NO: 3087 - DNA, 1071 bp, Artificial Sequence
  derived and/or modified sequence
atggaagaagggatgaacgtgttgcacgacttcggcattcaatccactcattacctccaggttaattaccaagattcacaagattggttcatactcgtttcagttattgcagatttaaggaacgctttctacgtgctgtttccgatttggtttcatcttcaagaagcagtgggaatcaagcttttatgggttgctgtcatcggtgattggctcaatctggtgtttaagtggatcttatttggtcagagaccttactggtgggtcctcgacacagattattactctaatacatcagttcccctaattaaacagtttccagtgacatgtgagaccggtcctggttctcccagtggccacgcaatgggcaccgcaggtgtgtattatgttatggtgacttcgactctgagcatcttccaaggtaagattaagcctacctatagatttcgctgtctgaacgtgattttgtggctgggcttttgggctgttcaacttaacgtttgtctttcaagaatttatcttgccgcacatttccctcatcaggtagttgccggagtcctctcgggcatagctgttgcagaaacatttagccatatacattccatttacaacgcctcactaaaaaaatatttcttgatcactttcttcctgttctcgtttgctatcggcttttatctgttacttaagggtttgggtgtggatcttttgtggacccttgagaaggctcagagatggtgtgagcagccagaatgggtgcacatagatacaactcctttcgcctctttattaaagaatcttgggactctattcgggcttggactcgctctgaatagtagcatgtaccgtgagagctgtaaaggtaaattgtctaagtggcttccattccgtttgtcttcgatcgtggcctcacttgtactactgcatgttttcgactccctcaagccaccttcccaagtagaattggtattctatgtgctttcattttgcaaatccgctgttgttcctttggcttcagtatcagtcatcccatattgtttggcacaggttcttggacaacctcataaaaagtccctg

SEQ ID NO: 3088 - DNA, 1071 bp, Artificial Sequence
  derived and/or modified sequence
atggaggaaggcatgaatgtcctgcacgactttgggatccagtccacccactatctgcaggtgaattaccaggatagccaggactggtttatattggtgtcagtgatcgccgacttgagaaatgcattttacgtcctcttccctatttggttccacctacaggaagccgtcggcattaagctgctgtgggtggccgtgatcggggactggctgaacctcgtctttaagtggatcctgttcgggcagagaccttactggtgggttctagataccgactactacagcaacacttcagtgcccctcataaaacagttccccgtcacctgcgagaccggtccaggaagccctagcggccatgctatgggcacggctggcgtttactatgtgatggtgacaagtactctgtccatcttccagggaaagatcaagcccacatacaggtttcgatgcctgaatgtgattttatggctgggattctgggccgtgcaattgaatgtgtgcctcagcagaatatacctcgctgcccactttcctcatcaggtcgtagctggcgtcttaagcggaattgccgttgcagagactttcagtcatatacactctatctataatgcttccctcaaaaagtatttcctcataacctttttccttttctccttcgccattggattctatcttttgctgaaggggctcggcgtggatctactttggacactcgagaaggcccagaggtggtgcgaacagccagagtgggttcacattgacacgacgcccttcgcatcacttctgaagaaccttggcaccctgttcggactggggctggctcttaacagctctatgtaccgcgaatcatgtaaaggtaagctctccaaatggctgcctttccgcttgtcaagtatcgtggcatctcttgtgttgctacacgtgtttgactcactcaagcccccctcccaagtggaattggtcttttacgtactgtccttctgtaaatctgcggtggtacccctggccagtgtttctgtgattccatactgcctggctcaagtactgggacagccacacaaaaagtccctc

SEQ ID NO: 3089 - DNA, 1071 bp, Artificial Sequence
  derived and/or modified sequence
atggaagaaggtatgaacgttttgcatgattttggaattcaatcgacgcactatctgcaagtgaattatcaagattctcaagattggtttattcttgtatcggttattgctgatctccgtaatgcgttttacgttctcttcccaatttggtttcaccttcaagaggcagttggtatcaagttattgtgggtagcagtcatcggagactggctgaatcttgtgttcaagtggattctcttcgggcaacgaccatactggtgggtgctcgacactgattattacagcaacacctcagtgccgctcattaaacaattcccagtgacttgtgaaacaggtccaggtagtccatctggacatgctatgggcacagcgggtgtttactatgtgatggttacttctacgctttcaatttttcagggcaaaattaaacctacgtatcgattccgctgtcttaatgtaatattatggcttggcttttgggctgttcagttaaatgtttgtttgagtagaatttatcttgcagcacattttcctcatcaggttgtcgctggagtcctttcaggcatcgcagtggccgaaacattcagccatattcattcaatttataatgcttcactgaaaaaatattttttgatcactttcttcttattctcatttgccattggattctatctgttactcaagggcctgggagttgatctgctctggacacttgaaaaggcacagagatggtgcgagcaaccagagtgggttcacatagatacgacaccgttcgcaagcctgctcaaaaacctcggaacacttttcggactcggattagccttgaactcctcaatgtaccgagaaagttgcaaaggaaaacttagcaagtggctcccgtttcgcttatctagcatagtagcgagcctggtgttgttacatgtctttgacagtttgaagccaccatcccaggtcgaacttgttttttatgtcctatctttttgtaagtcagctgtggtaccgcttgcaagcgtctccgttattccttattgtttggcgcaggtattgggacagccccataaaaagtcactt

SEQ ID NO: 3090 - DNA, 1074 bp, Artificial Sequence
  derived and/or modified sequence
atggaggagggcatgaacgtgctgcacgacttcggcatccagagcacccactacctgcaggtgaactaccaggacagccaggactggttcatcctggtgagcgtgatcgccgacctgagaaacgccttctacgtgctgttccccatctggttccacctgcaggaggccgtgggcatcaagctgctgtgggtggccgtgatcggcgactggctgaacctggtgttcaagtggatcctgttcggccagagaccctactggtgggtgctggacaccgactactacagcaacaccagcgtgcccctgatcaagcagttccccgtgacctgcgagaccggccccggcagccccagcggccacgccatgggcaccgccggcgtgtactacgtgatggtgaccagcaccctgagcatcttccagggcaagatcaagcccacctacagattcagatgcctgaacgtgatcctgtggctgggcttctgggccgtgcagctgaacgtgtgcctgagcagaatctacctggccgcccacttcccccaccaggtggtggccggcgtgctgagcggcatcgccgtggccgagaccttcagccacatccacagcatctacaacgccagcctgaagaagtacttcctgatcaccttcttcctgttcagcttcgccatcggcttctacctgctgctgaagggcctgggcgtggacctgctgtggaccctggagaaggcccagagatggtgcgagcagcccgagtgggtgcacatcgacaccacccccttcgccagcctgctgaagaacctgggcaccctgttcggcctgggcctggccctgaacagcagcatgtacagagagagctgcaagggcaagctgagcaagtggctgcccttcagactgagcagcatcgtggccagcctggtgctgctgcacgtgttcgacagcctgaagccccccagccaggtggagctggtgttctacgtgctgagcttctgcaagagcgccgtggtgcccctggccagcgtgagcgtgatcccctactgcctggcccaggtgctgggccagccccacaagaagagcctgtag

SEQ ID NO: 3091 - DNA, 1074 bp, Artificial Sequence
  derived and/or modified sequence
atggaggaaggcatgaatgtgctccacgatttcggaattcaatccactcattaccttcaggtcaactaccaagacagtcaggactggttcatcctggtgagcgtgatcgctgacttacgcaatgccttctacgtacttttccctatctggtttcatcttcaggaagctgtgggtatcaagttactttgggtggctgtgattggggattggctaaatctggtcttcaaatggatcctatttggccaacgcccatattggtgggttctggacaccgattactattcaaacacctctgtccccctgattaaacagtttccggttacatgcgagactggacccggttccccaagcggccacgccatgggaaccgccggcgtgtactacgtgatggtgacaagcaccctttctatcttccaaggtaaaatcaagccaacctaccggttccgctgtctgaatgtaattctgtggctcggattctgggcagttcaactaaatgtttgcctgtcacggatctacctcgcagcacacttcccccaccaagtggtggcgggcgtgctgagtgggattgccgtggcagaaacgttttcccacattcacagcatatacaacgcctccctgaaaaagtattttttgatcactttcttcctgttttcctttgctattggattctatctgctccttaagggactgggcgtggatcttctgtggactctggagaaggctcagcggtggtgtgaacagcctgagtgggttcatatcgatacgacccccttcgcttccctcttgaagaatctcggtacgttgtttggcctaggcctggcccttaattcttctatgtaccgagagtcgtgcaaaggaaagttaagcaagtggctgccatttcgcctgagcagcatcgtcgcctcccttgtgcttctgcatgtgttcgacagcctcaagccccccagccaggtcgagctagttttctacgtgctgtctttctgtaagagtgccgtggtccccctggcctccgttagcgtaattccctattgcctcgcgcaggtgctagggcagccccacaaaaaatccttatag

SEQ ID NO: 3092 - DNA, 1074 bp, Artificial Sequence
  derived and/or modified sequence
atggaggagggcatgaatgtgctgcatgactttggcatccagagcacccactacctgcaggtgaactaccaggacagccaggactggttcatcctggtgtctgtgattgctgacctgagaaatgccttctacgtgctcttccccatctggttccacctgcaggaggccgtgggcatcaagctgctgtgggtggccgtgattggagactggctgaacctggtgttcaagtggatcctgtttggccagaggccctactggtgggtgctggacacagactactacagcaacacctctgtgcccctcatcaagcagtttcctgtgacctgtgaaacaggccctggcagccccagcggccacgccatgggcacagctggggtgtactacgtgatggtgaccagcaccctgagcatcttccagggcaagatcaagcccacctaccgcttccgctgcctgaatgtcatcctgtggctgggcttctgggccgtgcagctgaatgtgtgcctgagccgcatctacctggccgcccacttcccccaccaggtggtggccggcgtgctgtctggaattgctgtggccgagaccttcagccacatccacagcatctacaatgccagcctgaagaagtacttcctgatcaccttcttcctgttctcctttgccatcggcttctacctgctgctgaagggcctgggcgtggacctgctgtggaccctggagaaggcccagcgctggtgtgagcagcctgagtgggtgcacatcgacaccaccccatttgccagcctgctgaagaacctgggcaccctgtttggcctgggcctggccctgaacagctccatgtaccgggagagctgcaagggcaagctgagcaagtggctgcccttccggctgagcagcatcgtggccagcctggtgctgctgcacgtgtttgacagcctgaagccacccagccaggtggagctggtgttctacgtgctgtccttctgcaagtctgctgtggtgcccctggcctctgtgtctgtcatcccctactgcctggcccaggtgctgggccagccccacaagaagagcctgtag

SEQ ID NO: 3093 - DNA, 1074 bp, Artificial Sequence
  derived and/or modified sequence
atggaggagggcatgaacgtgctgcacgacttcggcatccagagcacgcattatctgcaggtgaattaccaggactcacaggattggtttatcttggtttcagtaatcgccgatctgaggaacgccttctatgtgctgttccccatatggttccatctccaagaggcggttgggatcaagctgctctgggtggccgtaatcggagattggcttaatctcgtcttcaaatggatcctgttcggccagcgcccttactggtgggtcctcgatacagactactacagtaatactagtgtccctttaatcaagcaattccccgtaacttgtgagaccggaccaggcagccccagcggacatgctatgggcacagccggcgtatactatgtgatggtaacaagcacactttccattttccaagggaaaattaagcccacctacaggtttcgctgtttaaacgttatcctctggcttggtttttgggcagtgcaactaaacgtttgcctctccaggatctaccttgccgcccattttccccatcaggtcgtagctggtgtactgtccgggattgcagtcgccgaaacctttagtcatatacactcaatatacaatgcctccctgaaaaagtatttcctgatcacctttttcttattcagtttcgccattggattttatcttctcctcaaaggtctcggggtggacctcctctggacactcgagaaggcccagcgctggtgtgaacagccagaatgggtgcatatagacacaacacccttcgccagtttactgaagaatttaggaacgctgtttggcttgggcctggccctcaatagctcgatgtaccgggaatcatgtaaggggaagctgtccaagtggttacctttccgcctgagtagtattgtggcaagcctggtgttactgcacgtgttcgatagtctcaaaccccccagccaggtggaactggtgttctacgtgctttcgttctgtaagtctgccgtggtgccgctggcctctgtatcggtgataccctattgccttgcgcaggtactcggacagcctcacaagaagagtctgtag

SEQ ID NO: 3094 - DNA, 3096 bp, Artificial Sequence
  derived and/or modified sequence
tagcagagcaatcaccaccaagcctggaataactgcaagggctctgctgacatcttcctgaggtgccaaggaaatgaggatggaggaaggaatgaatgttctccatgactttgggatccagtcaacacattacctccaggtgaattaccaagactcccaggactggttcatcttggtgtccgtgatcgcagacctcaggaatgccttctacgtcctcttccccatctggttccatcttcaggaagctgtgggcattaaactcctttgggtagctgtgattggagactggctcaacctcgtctttaagtggattctctttggacagcgtccatactggtgggttttggatactgactactacagcaacacttccgtgcccctgataaagcagttccctgtaacctgtgagactggaccagggagcccctctggccatgccatgggcacagcaggtgtatactacgtgatggtcacatctactctttccatctttcagggaaagataaagccgacctacagatttcggtgcttgaatgtcattttgtggttgggattctgggctgtgcagctgaatgtctgtctgtcacgaatctaccttgctgctcattttcctcatcaagttgttgctggagtcctgtcaggcattgctgttgcagaaactttcagccacatccacagcatctataatgccagcctcaagaaatattttctcattaccttcttcctgttcagcttcgccatcggattttatctgctgctcaagggactgggtgtagacctcctgtggactctggagaaagcccagaggtggtgcgagcagccagaatgggtccacattgacaccacaccctttgccagcctcctcaagaacctgggcacgctctttggcctggggctggctctcaactccagcatgtacagggagagctgcaaggggaaactcagcaagtggctcccattccgcctcagctctattgtagcctccctcgtcctcctgcacgtctttgactccttgaaacccccatcccaagtcgagctggtcttctacgtcttgtccttctgcaagagtgcggtagtgcccctggcatccgtcagtgtcatcccctactgcctcgcccaggtcctgggccagccgcacaagaagtcgttgtaagagatgtggagtcttcggtgtttaaagtcaacaaccatgccagggattgaggaggactactatttgaagcaatgggcactggtatttggagcaagtgacatgccatccattctgccgtcgtggaattaaatcacggatggcagattggagggtcgcctggcttattcccatgtgtgactccagcctgccctcagcacagactctttcagatggaggtgccatatcacgtacaccatatgcaagtttcccgccaggaggtcctcctctctctacttgaatactctcacaagtagggagctcactcccactggaacagcccattttatctttgaatggtcttctgccagcccattttgaggccagaggtgctgtcagctcaggtggtcctcttttacaatcctaatcatattgggtaatgtttttgaaaagctaatgaagctattgagaaagacctgttgctagaagttgggttgttctggattttcccctgaagacttacttattcttccgtcacatatacaaaagcaagacttccaggtagggccagctcacaagcccaggctggagatcctaactgagaattttctacctgtgttcattcttaccgagaaaaggagaaaggagctctgaatctgataggaaaagaaggctgcctaaggaggagtttttagtatgtggcgtatcatgcaagtgctatgccaagccatgtctaaatggctttaattatatagtaatgcactctcagtaatgggggaccagcttaagtataattaatagatggttagtggggtaattctgcttctagtattttttttactgtgcatacatgttcatcgtatttccttggatttctgaatggctgcagtgacccagatattgcactaggtcaaaacattcaggtatagctgacatctcctctatcacattacatcatcctccttataagcccagctctgctttttccagattcttccactggctccacatccaccccactggatcttcagaaggctagagggcgactctggtggtgcttttgtatgtttcaattaggctctgaaatcttgggcaaaatgacaaggggagggccaggattcctctctcaggtcactccagtgttacttttaattcctagagggtaaatatgactcctttctctatcccaagccaaccaagagcacattcttaaaggaaaagtcaacatcttctctctttttttttttttttgagacagggtctcactatgttgcccaggctgctcttgaattcctgggctcaagcagtcctcccaccctaccacagcgtcccgcgtagctgggactacaggtgcaagccactatgtccagctagccaactcctccttgcctgcttttctttttttttctttttttgagacggcgcacctatcacccaggctggagtggagtggcacgatcttggctcactgcaacctcttcctcctggttcaagcgattctcatgtctcagcctcctcagtagctaggactaccggcgtgcaccaccatgccaggctaatttttatatttttagaattttagaagagatgggatttcatcatgttggccaggctggtctcgaactcctgacctcaagtgatccacctgccttggcctcccaaggtgctaggattacaggcatgagccaccgcaccgggccctccttgcctgtttttcaatctcatctgatatgcagagtatttctgccccacccacctaccccccaaaaaaagctgaagcctatttatttgaaagtccttgtttttgctactaattatatagtataccatacattatcattcaaaacaaccatcctgctcataacatctttgaaaagaaaaatatatatgtgcagtattttattaaagcaacattttatttaagaataaagtcttgttaattactatattttagatgcaatgtgatc

SEQ ID NO: 3095 - DNA, 1074 bp, Artificial Sequence
  derived and/or modified sequence
atggaggagggcatgaacgtgctccacgactttggtatccagagcacccattacctgcaggtgaattaccaggattctcaggactggtttatcctggtctctgttatagccgacctgagaaacgcgttctacgtgctgtttcccatttggttccatctccaggaagcagtgggaattaagcttttgtgggttgcagtgattggagactggctgaatctggtgtttaagtggatcttattcggccagcgcccatactggtgggtgctggacacagactactacagcaacacatcagtgcccctgattaaacaattccctgtgacttgtgagaccgggcctggcagtccatcaggccacgcaatggggaccgccggagtctattacgtcatggttacaagcacattgtcaatttttcaggggaagataaaaccgacataccgcttcaggtgcctgaatgtgatcctatggctcggattctgggccgtgcagctgaacgtatgcctctcacgtatctatcttgctgctcactttcctcaccaggtagtggccggagtgctctctggtatcgctgtagccgagacctttagccatattcatagcatttacaatgcttcccttaagaagtacttccttatcactttctttctcttcagctttgctatcggattttatctgctgttgaaaggcttgggggtggatctattgtggacactcgaaaaggcccaacgatggtgcgaacagccagagtgggtgcacatagacacaacaccatttgcatccttactaaagaatctgggcacactcttcggcctaggactagccctgaatagttcgatgtaccgcgaatcatgcaaggggaaattgagcaagtggctcccatttcgcctcagctcgattgtggcaagtttagttctgctgcacgtgtttgatagcctcaagcccccttctcaggtagagctcgtattctacgtcttgtctttttgcaaatcagcagtggtgcctctggccagcgtatctgttattccatattgtcttgcccaggtcctggggcagccgcataagaagagcctctag

SEQ ID NO: 3096 - protein, 685 aa, Artificial Sequence
  derived and/or modified sequence
MAEWLLSASWQRRAKAMTAAAGSAGRAAVPLLLCALLAPGGAYVLDDSDGLGREFDGIGAVSGGGATSRLLVNYPEPYRSQILDYLFKPNFGASLHILKVEIGGDGQTTDGTEPSHMHYALDENYFRGYEWWLMKEAKKRNPNITLIGLPWSFPGWLGKGFDWPYVNLQLTAYYVVTWIVGAKRYHDLDIDYIGIWNERSYNANYIKILRKMLNYQGLQRVKIIASDNLWESISASMLLDAELFKVVDVIGAHYPGTHSAKDAKLTGKKLWSSEDFSTLNSDMGAGCWGRILNQNYINGYMTSTIAWNLVASYYEQLPYGRCGLMTAQEPWSGHYVVESPVWVSAHTTQFTQPGWYYLKTVGHLEKGGSYVALTDGLGNLTIIIETMSHKHSKCIRPFLPYFNVSQQFATFVLKGSFSEIPELQVWYTKLGKTSERFLFKQLDSLWLLDSDGSFTLSLHEDELFTLTTLTTGRKGSYPLPPKSQPFPSTYKDDFNVDYPFFSEAPNFADQTGVFEYFTNIEDPGEHHFTLRQVLNQRPITWAADASNTISIIGDYNWTNLTIKCDVYIETPDTGGVFIAGRVNKGGILIRSARGIFFWIFANGSYRVTGDLAGWIIYALGRVEVTAKKWYTLTLTIKGHFTSGMLNDKSLWTDIPVNFPKNGWAAIGTHSFEFAQFDNFLVEATR

SEQ ID NO: 3097 - protein, 474 aa, Artificial Sequence
  derived and/or modified sequence
MLNYQGLQRVKIIASDNLWESISASMLLDAELFKVVDVIGAHYPGTHSAKDAKLTGKKLWSSEDFSTLNSDMGAGCWGRILNQNYINGYMTSTIAWNLVASYYEQLPYGRCGLMTAQEPWSGHYVVESPVWVSAHTTQFTQPGWYYLKTVGHLEKGGSYVALTDGLGNLTIIIETMSHKHSKCIRPFLPYFNVSQQFATFVLKGSFSEIPELQVWYTKLGKTSERFLFKQLDSLWLLDSDGSFTLSLHEDELFTLTTLTTGRKGSYPLPPKSQPFPSTYKDDFNVDYPFFSEAPNFADQTGVFEYFTNIEDPGEHHFTLRQVLNQRPITWAADASNTISIIGDYNWTNLTIKCDVYIETPDTGGVFIAGRVNKGGILIRSARGIFFWIFANGSYRVTGDLAGWIIYALGRVEVTAKKWYTLTLTIKGHFTSGMLNDKSLWTDIPVNFPKNGWAAIGTHSFEFAQFDNFLVEATR

SEQ ID NO: 3098 - DNA, 3897 bp, Artificial Sequence
  derived and/or modified sequence
actcaaaatggcggcggcggcgtcagcatcagcggcctcctgcccgtatctatcgtggcggcgacgggacccgcctccctgggcgccggagtcatgtgacccacacaatggctgagtggctactctcggcttcctggcaacgccgagcgaaagctatgactgcggccgcgggttcggcgggccgcgccgcggtgcccttgctgctgtgtgcgctgctggcgcccggcggcgcgtacgtgctcgacgactccgacgggctgggccgggagttcgacggcatcggcgcggtcagcggcggcggggcaacctcccgacttctagtaaattacccagagccctatcgttctcagatattggattatctctttaagccgaattttggtgcctctttgcatattttaaaagtggaaataggtggtgatgggcagacaacagacggcactgagccctcccacatgcattatgcactagatgagaattatttccgaggatacgagtggtggttgatgaaagaagctaagaagaggaatcccaatattacactcattgggttgccatggtcattccctggatggctgggaaaaggtttcgactggccttatgtcaatcttcagctgactgcctattatgtcgtgacctggattgtgggcgccaagcgttaccatgatttggacattgattatattggaatttggaatgagaggtcatataatgccaattatattaagatattaagaaaaatgctgaattatcaaggtctccagcgagtgaaaatcatagcaagtgataatctctgggagtccatctctgcatccatgctccttgatgccgaactcttcaaggtggttgatgttataggggctcattatcctggaacccattcagcaaaagatgcaaagttgactgggaagaagctttggtcttctgaagactttagcactttaaatagtgacatgggtgcaggctgctggggtcgcattttaaatcagaattatatcaatggctatatgacttccacaatcgcatggaatttagtggctagttactatgaacagttgccttatgggagatgcgggttgatgacggcccaggagccatggagtgggcactacgtggtagaatctcctgtctgggtatcagctcataccactcagtttactcaacctggctggtattacctgaagacagttggccatttagagaaaggaggaagctacgtagctctgactgatggcttagggaacctcaccatcatcattgaaaccatgagtcataaacattctaagtgcatacggccatttcttccttatttcaatgtgtcacaacaatttgccacctttgttcttaagggatcttttagtgaaataccagagctacaggtatggtataccaaacttggaaaaacatccgaaagatttctttttaagcagctggattctctatggctccttgacagcgatggcagtttcacactgagcctgcatgaagatgagctgttcacactcaccactctcaccactggtcgcaaaggcagctacccgcttcctccaaaatcccagcccttcccaagtacctataaggatgatttcaatgttgattacccattttttagtgaagctccaaactttgctgatcaaactggtgtatttgaatattttacaaatattgaagaccctggcgagcatcacttcacgctacgccaagttctcaaccagagacccattacgtgggctgccgatgcatccaacacaatcagtattataggagactacaactggaccaatctgactataaagtgtgatgtatacatagagacccctgacacaggaggtgtgttcattgcaggaagagtaaataaaggtggtattttgattagaagtgccagaggaattttcttctggatttttgcaaatggatcttacagggttacaggtgatttagctggatggattatatatgctttaggacgtgttgaagttacagcaaaaaaatggtatacactcacgttaactattaagggtcatttcacctctggcatgctgaatgacaagtctctgtggacagacatccctgtgaattttccaaagaatggctgggctgcaattggaactcactcctttgaatttgcacagtttgacaactttcttgtggaagccacacgctaatacttaacagggcatcatagaatactctggattttcttcccttctttttggttttggttcagagccaattcttgtttcattggaacagtatatgaggcttttgagactaaaaataatgaagagtaaaaggggagagaaatttatttttaatttaccctgtggaagattttattagaattaattccaaggggaaaactggtgaatctttaacattacctggtgtgttccctaacattcaaactgtgcattggccatacccttaggagtggtttgagtagtacagacctcgaagccttgctgctaacactgaggtagctctcttcatcttatttgcaagcggtcctgtagatggcagtaacttgatcatcactgagatgtatttatgcatgctgaccgtgtgtccaagtgagccagtgtcttcatcacaagatgatgctgccataatagaaagctgaagaacactagaagtagctttttgaaaaccacttcaacctgttatgctttatgctctaaaaagtatttttttattttcctttttaagatgatacttttgaaatgcaggatatgatgagtgggatgattttaaaaatgcctctttaataaactacctctaacactatttctgcagtaatagatattagcagattaattgggttatttgcattatttaatttttttgattccaagttttggtcttgtaaccactataactctctgtgaacgtttttccaggtggctggaagaaggaagaaaacctgatatagccaatgctgttgtagtcgtttcctcagcctcatctcactgtgctgtggtctgtcctcacatgtgcactggtaacagactcacacagctgatgaatgcttttctctccttatgtgtggaaggaggggagcacttagacatttgctaactcccagaattggatcatctcctaagatgtacttactttttaaagtccaaatatgtttatatttaaatatacgtgagcgtgttcatcatgttgtatgatttatactaagcattaatgtggctctatgtagcaaatcagttattcatgtaggtaaagtaaatctagaattatttataagaattactcattgaactaattctactatttaggaatttgtaagagtctaacataggcttagctacagtgaagttttgcattgcttttgaagacaagaagataagtgctagaataaataagattacagagaaaattttttgttaaaaccaagtgatttccagctgatgtatctaatattttttaaaacgaacattatagaggtgtaatttatttacaataaaatgttcctactttaaatatacaattcagtgagttttgataaattgatatacccatgtaaccaacactccagtcaagcttcagaatatttccatcaccccagaaggttctcttgtatacctgctcagtcagttcctttcactcccaattgttggcagccattgataggaattctatcactataggttagttttctttgttccagaacatcatgaaagcggcgtcatgtactgtgtattcttatgaatggtttctttccatcagcataatgatttgagatttgtccatgttgtgtgattcagtggtttgttccttcttatttctgaagagttttccattgtatgaatataccacaatttgtttcctccccaccagtttctgatactacaattaaaactgtctacatttacaaaaaaaaaaaaaaaa

SEQ ID NO: 3099 - DNA, 3883 bp, Artificial Sequence
  derived and/or modified sequence
actcaaaatggcggcggcggcgtcagcatcagcggcctcctgcccgtatctatcgtggcggcgacgggacccgcctccctgggcgccggagtcatgtgacccacacaatggctgagtggctactctcggcttcctggcaacgccgagcgaaagctatgactgcggccgcgggttcggcgggccgcgccgcggtgcccttgctgctgtgtgcgctgctggcgcccggcggcgcgtacgtgctcgacgactccgacgggctgggccgggagttcgacggcatcggcgcggtcagcggcggcggggcaacctcccgacttctagtaaattacccagagccctatcgttctcagatattggattatctctttaagccgaattttggtgcctctttgcatattttaaaagtggaaataggtggtgatgggcagacaacagacggcactgagccctcccacatgcattatgcactagatgagaattatttccgaggatacgagtggtggttgatgaaagaagctaagaagaggaatcccaatattacactcattgggttgccatggtcattccctggatggctgggaaaaggtttcgactggccttatgtcaatcttcagctgactgcctattatgtcgtgacctggattgtgggcgccaagcgttaccatgatttggacattgattatattggaatttggaatgagaggtcatataatgccaattatattaagatattaagaaaaatgctgaattatcaaggtctccagcgagtgaaaatcatagcaagtgataatctctgggagtccatctctgcatccatgctccttgatgccgaactcttcaaggtggttgatgttataggggctcattatcctggaacccattcagcaaaagatgcaaagttgactgggaagaagctttggtcttctgaagactttagcactttaaatagtgacatgggtgcaggctgctggggtcgcattttaaatcagaattatatcaatggctatatgacttccacaatcgcatggaatttagtggctagttactatgaacagttgccttatgggagatgcgggttgatgacggcccaggagccatggagtgggcactacgtggtagaatctcctgtctgggtatcagctcataccactcagtttactcaacctggctggtattacctgaagacagttggccatttagagaaaggaggaagctacgtagctctgactgatggcttagggaacctcaccatcatcattgaaaccatgagtcataaacattctaagtgcatacggccatttcttccttatttcaatgtgtcacaacaatttgccacctttgttcttaagggatcttttagtgaaataccagagctacaggtatggtataccaaacttggaaaaacatccgaaagatttctttttaagcagctggattctctatggctccttgacagcgatggcagtttcacactgagcctgcatgaagatgagctgttcacactcaccactctcaccactggtcgcaaaggcagctacccgcttcctccaaaatcccagcccttcccaagtacctataaggatgatttcaatgttgattacccattttttagtgaagctccaaactttgctgatcaaactggtgtatttgaatattttacaaatattgaagaccctggcgagcatcacttcacgctacgccaagttctcaaccagagacccattacatgggctgccgatgcatccaacacaatcagtattataggagactacaactggaccaatctgactataaagtgtgatgtatacatagagacccctgacacaggaggtgtgttcattgcaggaagagtaaataaaggtggtattttgattagaagtgccagaggaattttcttctggatttttgcaaatggatcttacagggttacaggtgatttagctggatggattatatatgctttaggacgtgttgaagttacagcaaaaaaatggtatacactcacgttaactattaagggtcatttcacctctggcatgctgaatgacaagtctctgtggacagacatccctgtgaattttccaaagaatggctgggctgcaattggaactcactcctttgaatttgcacagtttgacaactttcttgtggaagccacacgctaatacttaacagggcatcatagaatactctggattttcttcccttctttttggttttggttcagagccaattcttgtttcattggaacagtatatgaggcttttgagactaaaaataatgaagagtaaaaggggagagaaatttatttttaatttaccctgtggaagattttattagaattaattccaaggggaaaactggtgaatctttaacattacctggtgtgttccctaacattcaaactgtgcattggccatacccttaggagtggtttgagtagtacagacctcgaagccttgctgctaacactgaggtagctctcttcatcttatttgcaagcggtcctgtagatggcagtaacttgatcatcactgagatgtatttatgcatgctgaccgtgtgtccaagtgagccagtgtcttcatcacaagatgatgctgccataatagaaagctgaagaacactagaagtagctttttgaaaaccacttcaacctgttatgctttatgctctaaaaagtatttttttattttcctttttaagatgatacttttgaaatgcaggatatgatgagtgggatgattttaaaaatgcctctttaataaactacctctaacactatttctgcagtaatagatattagcagattaattgggttatttgcattatttaatttttttgattccaagttttggtcttgtaaccactataactctctgtgaacgtttttccaggtggctggaagaaggaagaaaacctgatatagccaatgctgttgtagtcgtttcctcagcctcatctcactgtgctgtggtctgtcctcacatgtgcactggtaacagactcacacagctgatgaatgcttttctctccttatgtgtggaaggaggggagcacttagacatttgctaactcccagaattggatcatctcctaagatgtacttactttttaaagtccaaatatgtttatatttaaatatacgtgagcgtgttcatcatgttgtatgatttatactaagcattaatgtggctctatgtagcaaatcagttattcatgtaggtaaagtaaatctagaattatttataagaattactcattgaactaattctactatttaggaatttgtaagagtctaacataggcttagctacagtgaagttttgcattgcttttgaagacaagaagataagtgctagaataaataagattacagagaaaattttttgttaaaaccaagtgatttccagctgatgtatctaatattttttaaaacgaacattatagaggtgtaatttatttacaataaaatgttcctactttaaatatacaattcagtgagttttgataaattgatatacccatgtaaccaacactccagtcaagcttcagaatatttccatcaccccagaaggttctcttgtatacctgctcagtcagttcctttcactcccaattgttggcagccattgataggaattctatcactataggttagttttctttgttccagaacatcatgaaagcggcgtcatgtactgtgtattcttatgaatggtttctttccatcagcataatgatttgagatttgtccatgttgtgtgattcagtggtttgttccttcttatttctgaagagttttccattgtatgaatataccacaatttgtttcctccccaccagtttctgatactacaattaaaactgtctacatttacaa

SEQ ID NO: 3100 - DNA, 2058 bp, Artificial Sequence
  derived and/or modified sequence
atggctgagtggctgctgtccgcttcctggcagcgccgcgctaaggccatgacagctgcggctggctccgccggaagagccgcagttcctctattactgtgcgcgctgctcgcacctggcggtgcctatgtacttgacgactctgacgggctgggcagagagtttgacggcattggtgcagtgagcggggggggcgccacttcacgcttgctcgtgaactaccccgaaccttatcgatcacagattctcgactacttattcaaacctaactttggggctagtctgcacatactcaaagtggagattgggggagacggccagaccacagacgggactgagcccagccacatgcactatgccctggacgaaaactattttagaggatatgaatggtggctgatgaaggaggctaaaaagcggaatccaaatatcaccctcatcggactgccctggagcttcccgggctggctgggtaaaggcttcgactggccctacgtcaatctgcaattaacggcctattacgtggttacttggatcgtgggagccaaacgctatcacgatctcgacatcgactacatcggaatttggaatgagaggtcatacaatgcaaactatatcaagatcctgaggaagatgttgaactatcagggactccagcgggtgaagattatagccagtgacaatctgtgggagtcaatctcagccagcatgcttctggacgccgagctattcaaggtcgtggacgtcataggtgcccattatcctggcactcactctgcgaaagacgctaaactaaccggtaaaaagctttggtcaagcgaggacttctcaaccctgaactcagatatgggtgctggctgctggggaaggatcctcaaccagaattacatcaatggttatatgacctcaaccatcgcgtggaacctggtggctagttactatgagcagttaccgtacggtcgatgcggtctcatgacagctcaagagccttggagcggccactatgtggtcgaaagtccagtctgggtgagcgcccacacgacacagttcacacagccaggatggtattacctcaagaccgtgggacatcttgaaaagggcggatcatacgttgctctcaccgatggcctcggcaacttaacgatcattattgagacaatgtcgcacaagcactctaaatgcattcgtcctttcctgccgtacttcaatgtatcccagcagtttgccacatttgtccttaaaggtagctttagtgaaatccctgaactgcaagtgtggtataccaaattggggaagacaagtgaaaggttcttattcaagcagctggactccttgtggctgctggacagtgatgggtcatttactctcagtctccatgaggacgaactgtttacactgaccacacttaccaccggacggaaagggtcttatccactgccgcccaagtcccagccatttccgtctacttataaggatgatttcaacgtggactatcctttcttttcagaagctccgaactttgctgatcagaccggtgtatttgagtactttaccaacatcgaggatcccggtgagcaccatttcacactcaggcaagtactcaaccagcggcccatcacttgggctgccgatgcctctaataccatctctattatcggagactacaattggacaaatttgactatcaaatgcgacgtatatatcgagacccctgatacgggaggggtatttatagcgggacgggtcaacaaggggggtatactgattcgatctgccaggggcattttcttttggatcttcgcgaatgggtcttatcgagtcacaggtgatcttgcaggctggataatttacgccctgggacgagtcgaggtaactgccaaaaaatggtacaccctgaccctgactatcaaaggtcactttacgagcgggatgcttaatgacaaatctctgtggactgacattcccgtaaatttccccaaaaacggttgggccgccattggaacacacagcttcgagttcgcccagttcgacaattttctcgtagaggcaacccgttag

SEQ ID NO: 3101 - DNA, 2058 bp, Artificial Sequence
  derived and/or modified sequence
atggccgagtggctgctgagcgcctcctggcagaggcgggccaaggccatgacagctgctgctggcagcgctggccgggctgctgtgcccctgctgctgtgtgccctgctggcccctggaggagcctacgtgctggatgacagtgatggcctgggccgggagtttgatggcatcggggctgtgtctgggggcggggccaccagccggctgctggtgaactacccagagccctaccgcagccagatcctggactacctgttcaagcccaactttggagccagcctgcacatcctgaaggtggagattggaggagatggccagaccacagatggaacagagcccagccacatgcactacgccctggatgagaactacttccggggctatgagtggtggctgatgaaggaggccaagaagaggaaccccaacatcaccctgattggcctgccctggagcttccctggctggctgggcaaaggatttgactggccctacgtgaacctgcagctgacagcctactacgtggtgacctggatcgtgggcgccaagcgctaccatgacctggacatcgactacatcggcatctggaatgaaagaagctacaatgccaactacatcaagatcctgaggaagatgctgaactaccagggcctgcagagggtgaagatcatcgccagtgacaacctgtgggagagcatcagcgcctccatgctgctggatgctgagctgttcaaggtggtggatgtgattggagcccactacccaggcacccacagcgccaaggatgccaagctgaccgggaagaagctgtggagcagcgaggacttcagcaccctgaacagcgacatgggcgccggctgctggggccgcatcctgaaccagaactacatcaatggctacatgaccagcaccatcgcctggaacctggtggccagctactatgagcagctgccctacggccgctgtggcctgatgacagcccaggagccctggagcggccactacgtggtggagagccctgtgtgggtgtctgcccacaccacccagttcacccagcccggctggtactacctgaagacagtgggccacctggagaagggcggcagctatgtggccctgacagatggcctgggcaacctgaccatcatcatcgagaccatgagccacaagcacagcaagtgcatccggcccttcctgccctacttcaacgtgtcccagcagtttgccacctttgtgctgaagggcagcttcagcgagatccctgagctgcaggtgtggtacaccaagctgggcaagaccagcgagcgcttcctgttcaagcagctggacagcctgtggctgctggacagtgatggcagcttcaccctgagcctgcatgaagatgagctgttcaccctgaccaccctgaccactggaaggaagggcagctaccccctgccccccaagagccagcccttccccagcacctacaaggatgacttcaacgtggactaccccttcttcagcgaggcccccaactttgctgaccagacaggagtgtttgagtacttcaccaacattgaagatcctggagagcaccacttcaccctgcggcaggtgctgaaccagaggcccatcacctgggccgcagatgccagcaacaccatcagcatcatcggggactacaactggaccaacctgaccatcaagtgtgatgtgtacatcgagaccccagacacaggaggagtcttcatcgccggccgggtgaacaagggcggcatcctgatccgcagcgcccggggcatcttcttctggatctttgccaacggcagctacagagtgactggagacctggccggctggatcatctatgccctgggccgggtggaggtgacagccaagaagtggtacaccctgaccctgaccatcaagggccacttcaccagcggcatgctgaatgacaagagcctgtggacagacatccctgtgaacttccccaagaatggctgggccgccatcggcacccacagctttgaatttgcccagtttgacaacttcctggtggaggccaccaggtag

SEQ ID NO: 3102 - DNA, 2058 bp, Artificial Sequence
  derived and/or modified sequence
atggccgagtggctgctgagcgccagctggcagcggcgggccaaggccatgaccgccgcggccgggagcgccggtcgagccgcagttcctctgctgctgtgcgcactcctggctcccggcggagcctacgttctggatgattctgacggtctaggaagggagtttgatgggatcggcgccgtgtccgggggtggagctacatcccgactgttggtcaactacccagagccatatagatctcagatactcgattacttgttcaagcccaatttcggagccagtctgcacatactgaaagtcgagattggcggggacggtcaaactacagatgggacagaaccgtctcacatgcactacgctctcgatgagaactatttccgaggctacgagtggtggctgatgaaggaggcaaagaaacggaaccctaatattacattgattggcctgccatggtcatttcctggttggcttgggaaaggttttgactggccatacgttaaccttcaactgaccgcatactacgtggtaacatggatcgtgggggctaagcgttaccacgacttggacattgactacattggcatctggaacgaacgcagttataatgccaattacatcaaaattctcagaaagatgttaaactatcagggactgcagcgggtcaagattattgcaagtgataatctgtgggaaagcataagtgcttccatgctacttgatgcggaattgttcaaggtggtggatgtgatcggcgcacactacccaggtactcatagcgcgaaggatgcgaagcttactggcaaaaaactgtggtccagtgaggacttttcgactctgaacagtgacatgggtgcgggctgttggggccgcatattaaaccagaactacataaacggatatatgacttctaccatcgcctggaatttggttgcctcctactacgagcagctgccatacggaagatgtggactgatgactgctcaggagccctggtccggacattatgtggtcgaatcacccgtttgggtgagtgctcacacgacacagttcactcagccagggtggtactatttaaagacagtaggacatctggaaaagggcggcagctacgtcgcgcttactgacggtctcggtaacttaaccatcatcatagaaaccatgagtcataaacattcgaagtgtatccggccattcttaccatattttaacgtcagccagcagttcgcaaccttcgtcctgaaggggagtttcagcgagattccggagctgcaggtctggtacaccaagctcggcaagacctctgagaggttcctgttcaagcagctagacagcctttggttacttgatagcgatggctcattcactctgagtctgcatgaggatgagcttttcacgctgactactctcaccacaggaagaaaaggatcctacccattgccacccaaatcccaaccttttccaagcacatacaaggacgacttcaacgtcgattaccctttttttagtgaggcgcctaattttgctgaccagaccggggtatttgaatactttactaacatcgaggaccccggcgaacatcattttaccctccgacaggtactgaatcagcggcccattacttgggcggcggatgcgagtaataccatatcaatcattggggattataactggacaaacctcactattaaatgtgacgtctatattgaaacacctgacaccggcggggttttcatcgcagggcgcgtgaacaaaggagggatcctcattcgatctgcaaggggcattttcttttggatatttgcaaatggatcttatcgcgtgaccggcgatctagctgggtggataatatatgccctcggtagagttgaggttacagcgaagaaatggtataccctgaccctcaccattaagggtcacttcacctctggtatgctgaacgacaagtctctctggactgacatccctgttaattttccaaagaatggctgggctgccattgggacgcattctttcgaattcgcccagttcgacaacttcttggttgaagccacacggtag

SEQ ID NO: 3103 - DNA, 2058 bp, Artificial Sequence
  derived and/or modified sequence
atggctgagtggctgttgtcagcaagttggcagcggcgtgcgaaagccatgacggccgctgccggaagcgccggtagggccgctgtgccactactcctttgtgcactgctagctcctgggggtgcctacgtgctagacgactcagatggactgggacgggaatttgacggaattggagcggtgagtggtggtggtgcaacgagcaggctgctggtcaactacccagaaccctatcggagccagattcttgattatctgttcaaacccaatttcggagccagcctgcacattttgaaggtggaaatcggcggtgatggccagacaacagatggaaccgagccctcccacatgcactacgctctggacgaaaactatttccggggatatgagtggtggctgatgaaagaagcaaagaaacggaatccaaacattacactaataggcctgccctggtccttcccagggtggcttggtaagggtttcgactggccatacgtgaatcttcagctgaccgcctactatgtggtgacttggatagtgggcgctaagcggtaccacgacctcgatatcgattatatcggaatttggaacgaaagatcttataacgcaaattacattaaaatcttaaggaagatgttaaattaccagggcctgcaaagagttaagatcattgcttctgacaacctgtgggaatctatcagtgcaagtatgctcctcgatgccgagctcttcaaggtggtggatgtcatcggggcacattaccctggcactcacagcgctaaggatgccaaactgacaggcaaaaaactttggtcgtctgaagacttttcgacactgaacagcgacatgggtgctggctgttggggacgaattcttaaccagaattacattaacggatatatgacttctaccatcgcctggaacctggtggcttcttactatgagcaactgccttacggccgttgcggtctgatgaccgcccaagaaccctggtcaggccattacgtagtggagtcccctgtttgggtgtccgctcacacgacacagtttacgcagcctggctggtactatctaaagactgtgggacacctggaaaagggcggtagttatgtggccctgaccgatgggcttggcaatttaacaatcattatcgaaaccatgagtcacaagcacagcaagtgtattaggccttttttgccttattttaacgtgagccaacagtttgcaacctttgtgctaaagggctcattctctgaaatcccagagctccaggtgtggtacaccaagttaggtaagacttctgagaggttcctgttcaagcagctggatagcttgtggctccttgacagcgacggatcttttacactctctttgcatgaagacgaattgttcactctcacaactttgactaccggcaggaagggcagctacccgctaccgccaaaatcccagcctttcccctctacctacaaagacgacttcaatgttgactatcctttcttttctgaagccccaaacttcgccgaccagaccggcgtcttcgagtacttcaccaatattgaggacccaggagagcaccacttcactctgaggcaggtgcttaaccagcgtcccatcacatgggcggcagacgccagtaatactatctctatcattggggactacaattggaccaaccttacaataaagtgcgatgtctacattgaaactccagatacagggggagtctttatcgcaggtagagttaacaagggcggtattttaatccgaagcgccaggggcattttcttttggatttttgctaatggctcctacagggtgactggcgaccttgcaggctggatcatctacgctttgggtagagtggaagtcactgcaaaaaaatggtacactctgacgctgacaattaagggccattttaccagcggcatgctaaacgacaaatccctgtggaccgacatcccagtcaacttccccaagaatggatgggcagccatcggcacgcattcctttgaatttgcgcaatttgacaacttcctcgtggaagccacgagatag

SEQ ID NO: 3104 - DNA, 2058 bp, Artificial Sequence
  derived and/or modified sequence
atggccgagtggctgctgagcgccagctggcagagaagagccaaggccatgaccgccgccgccggcagcgccggcagagccgccgtgcccctgctgctgtgcgccctgctggcccccggcggcgcctacgtgctggacgacagcgacggcctgggcagagagttcgacggcatcggcgccgtgagcggcggcggcgccaccagcagactgctggtgaactaccccgagccctacagaagccagatcctggactacctgttcaagcccaacttcggcgccagcctgcacatcctgaaggtggagatcggcggcgacggccagaccaccgacggcaccgagcccagccacatgcactacgccctggacgagaactacttcagaggctacgagtggtggctgatgaaggaggccaagaagagaaaccccaacatcaccctgatcggcctgccctggagcttccccggctggctgggcaagggcttcgactggccctacgtgaacctgcagctgaccgcctactacgtggtgacctggatcgtgggcgccaagagataccacgacctggacatcgactacatcggcatctggaacgagagaagctacaacgccaactacatcaagatcctgagaaagatgctgaactaccagggcctgcagagagtgaagatcatcgccagcgacaacctgtgggagagcatcagcgccagcatgctgctggacgccgagctgttcaaggtggtggacgtgatcggcgcccactaccccggcacccacagcgccaaggacgccaagctgaccggcaagaagctgtggagcagcgaggacttcagcaccctgaacagcgacatgggcgccggctgctggggcagaatcctgaaccagaactacatcaacggctacatgaccagcaccatcgcctggaacctggtggccagctactacgagcagctgccctacggcagatgcggcctgatgaccgcccaggagccctggagcggccactacgtggtggagagccccgtgtgggtgagcgcccacaccacccagttcacccagcccggctggtactacctgaagaccgtgggccacctggagaagggcggcagctacgtggccctgaccgacggcctgggcaacctgaccatcatcatcgagaccatgagccacaagcacagcaagtgcatcagacccttcctgccctacttcaacgtgagccagcagttcgccaccttcgtgctgaagggcagcttcagcgagatccccgagctgcaggtgtggtacaccaagctgggcaagaccagcgagagattcctgttcaagcagctggacagcctgtggctgctggacagcgacggcagcttcaccctgagcctgcacgaggacgagctgttcaccctgaccaccctgaccaccggcagaaagggcagctaccccctgccccccaagagccagcccttccccagcacctacaaggacgacttcaacgtggactaccccttcttcagcgaggcccccaacttcgccgaccagaccggcgtgttcgagtacttcaccaacatcgaggaccccggcgagcaccacttcaccctgagacaggtgctgaaccagagacccatcacctgggccgccgacgccagcaacaccatcagcatcatcggcgactacaactggaccaacctgaccatcaagtgcgacgtgtacatcgagacccccgacaccggcggcgtgttcatcgccggcagagtgaacaagggcggcatcctgatcagaagcgccagaggcatcttcttctggatcttcgccaacggcagctacagagtgaccggcgacctggccggctggatcatctacgccctgggcagagtggaggtgaccgccaagaagtggtacaccctgaccctgaccatcaagggccacttcaccagcggcatgctgaacgacaagagcctgtggaccgacatccccgtgaacttccccaagaacggctgggccgccatcggcacccacagcttcgagttcgcccagttcgacaacttcctggtggaggccaccagatag

SEQ ID NO: 3105 - protein, 392 aa, Artificial Sequence
  derived and/or modified sequence
MAALRQPQVAELLAEARRAFREEFGAEPELAVSAPGRVNLIGEHTDYNQGLVLPMALELMTVLVGSPRKDGLVSLLTTSEGADEPQRLQFPLPTAQRSLEPGTPRWANYVKGVIQYYPAAPLPGFSAVVVSSVPLGGGLSSSASLEVATYTFLQQLCPDSGTIAARAQVCQQAEHSFAGMPCGIMDQFISLMGQKGHALLIDCRSLETSLVPLSDPKLAVLITNSNVRHSLASSEYPVRRRQCEEVARALGKESLREVQLEELEAARDLVSKEGFRRARHVVGEIRRTAQAAAALRRGDYRAFGRLMVESHRSLRDDYEVSCPELDQLVEAALAVPGVYGSRMTGGGFGGCTVTLLEASAAPHAMRHIQEHYGGTATFYLSQAADGAKVLCL

SEQ ID NO: 3106 - protein, 400 aa, Artificial Sequence
  derived and/or modified sequence
MAALRQPQVAELLAEARRAFREEFGAEPELAVSAPGRVNLIGEHTDYNQGLVLPMRDRLFPTLEGRKRGSGRERVRGRLLAQARPLGAGAPRLQPGSMFPLNCEALCATQKGTLRASGHRGAPTADLGERSLLAQPVQFTEEETGGAFRPICSLGSAQASSPPCPTAQGRVQDGLVSLLTTSEGADEPQRLQFPLPTAQRSLEPGTPRWANYVKGVIQYYPAAPLPGFSAVVVSSVPLGGGLSSSASLEVATYTFLQQLCPDSGTIAARAQVCQQAEHSFAGMPCGIMDQFISLMGQKGHALLIDCRSLETSLVPLSDPKLAVLITNSNVRHSLASSEYPVRRRQCEEVARALGKESLREVQLEELEAARDLVSKEGFRRARHVVGEIRRTADGAKVLCL

SEQ ID NO: 3107 - protein, 422 aa, Artificial Sequence
  derived and/or modified sequence
MCAPPRGAPPEHPAPTGLCRSSCAELQARVMAALRQPQVAELLAEARRAFREEFGAEPELAVSAPGRVNLIGEHTDYNQGLVLPMALELMTVLVGSPRKDGLVSLLTTSEGADEPQRLQFPLPTAQRSLEPGTPRWANYVKGVIQYYPAAPLPGFSAVVVSSVPLGGGLSSSASLEVATYTFLQQLCPDSGTIAARAQVCQQAEHSFAGMPCGIMDQFISLMGQKGHALLIDCRSLETSLVPLSDPKLAVLITNSNVRHSLASSEYPVRRRQCEEVARALGKESLREVQLEELEAARDLVSKEGFRRARHVVGEIRRTAQAAAALRRGDYRAFGRLMVESHRSLRDDYEVSCPELDQLVEAALAVPGVYGSRMTGGGFGGCTVTLLEASAAPHAMRHIQEHYGGTATFYLSQAADGAKVLCL

SEQ ID NO: 3108 - DNA, 1176 bp, Artificial Sequence
  derived and/or modified sequence
atggcagccctccggcaacctcaagtagccgagcttctggcagaagcacgcagggcatttagagaagaattcggggcagaacctgagcttgccgtgtcagcaccaggaagagtgaacctgatcggcgaacataccgactacaaccaggggcttgtccttcccatggctcttgaattgatgactgtgcttgtcggctcgccaaggaaagatggactcgtttctcttctgactacctccgagggggctgacgagccacaacgtctgcagtttcctcttcctactgcccaaaggtcgctggaaccaggaacgcccagatgggctaattacgtgaagggagtgatccaatactaccctgcagctcctcttccaggattttccgcagtcgtggtttcttccgtgccgctgggcggaggactctccagctccgcaagcctcgaagtcgcaacttacactttccttcaacaattgtgccctgattccggaaccattgcagctcgggcacaggtctgccaacaagcagaacactccttcgcaggcatgccgtgtggtattatggaccagtttatctcccttatggggcagaagggtcatgcgcttctcattgactgccgctcgcttgagacttcgctggttccactgagcgatcccaaactcgccgtgttgattactaatagtaacgtgagacattcacttgcatcctcggagtaccctgtcaggcgcaggcagtgtgaagaggtggcacgtgccctcggaaaggagtcactcagggaagtgcagctcgaagaacttgaggcggcgcgtgacctggtgtccaaggagggatttcgccgggctaggcacgtcgtcggggaaataagaaggactgcacaagcagcggctgcgcttcgcaggggtgattaccgggcctttggaagattgatggtggagtcacatcgaagcctccgagatgattacgaagtgtcgtgtcctgaactggaccagttggtggaggcggctctcgccgtgcccggagtgtacggatcgaggatgactggtggaggatttggcgggtgtacggtgactctcctggaggccagcgcagcaccacatgcaatgcgccacatacaagaacattacggagggacggctactttctacctgagccaggccgcggatggtgccaaagttctctgcctg

SEQ ID NO: 3109 - DNA, 1176 bp, Artificial Sequence
  derived and/or modified sequence
atggccgcgctgcggcagccacaggtagcagagctcctggccgaggcacggcgggcgtttcgggaagagttcggtgccgaacctgagttagctgtctctgccccaggaagagtgaacctgatcggagagcacacagactataatcagggacttgtgcttccgatggcactggaactgatgactgtgttagttggctccccccggaaagacggcctggtcagtctgctcacgacctccgagggcgcagatgagcctcagcgactgcagtttcccctgccaacagcacaacgctcattggagccaggcactcctcgctgggcgaattacgtcaaaggcgtgatacagtactatcccgcagcaccgttgccaggcttttcggccgttgtcgtgtcttctgttccactcggtggtggactgtcctcctcagcctcgctggaggtggctacatatacctttcttcagcaactgtgcccagacagcggtacgatcgccgcaagggcacaagtctgtcagcaagctgaacacagtttcgccggaatgccttgtggaataatggaccaatttatcagtttgatgggtcagaagggacatgcactgctgattgattgtcgctccctagaaacttctctggtgcccctgagcgatcccaagctcgccgtcctgatcaccaatagtaacgttaggcatagtttagcgtcttctgaatatccggttaggaggcgtcagtgtgaagaagtggcgcgggctctgggcaaagagtccctcagagaagtgcagctcgaagaactagaagcagcaagggatctagtttcaaaggaggggtttcgtagagcacggcacgttgtgggcgagattcggaggaccgcgcaggccgctgccgctctccgcaggggggattatcgggccttcggaagactgatggtagagagtcatcggtcgttgcgcgacgactatgaggtgagttgccccgagctcgaccagctcgtagaggcggcattggctgtacctggcgtgtacggttcgcgtatgacaggtggtgggttcggaggctgtaccgtgacactactggaagcctcagctgctcctcatgcaatgaggcacattcaagaacattatggaggcaccgccactttttatttgagtcaggccgctgacggcgccaaggtactgtgcctc

SEQ ID NO: 3110 - DNA, 1176 bp, Artificial Sequence
  derived and/or modified sequence
atggccgcccttcgtcaaccacaagtagctgagttattggctgaagctcgtagggcttttcgtgaagagtttggtgctgaacctgaattggccgtctcagcaccagggcgtgtgaacttaattggagagcacactgattataatcagggtcttgtcttgcctatggcactggaattgatgactgtacttgtggggagtccacgtaaggacggacttgtgtcgttgttgacaacctctgaaggtgctgatgagccacaacgccttcagtttccattgccaaccgcgcaacgtagtctagagcctggaacacctcggtgggccaattatgttaagggggtgatccagtactatccggctgctcctttgccagggttttccgctgtcgtcgtgtcctctgtgcccctcggaggaggactttcttcatcggcatccttggaggttgccacttacactttcctccaacagctgtgcccggattctggaactattgcagctagggctcaagtgtgtcagcaggctgagcacagtttcgcgggaatgccctgtgggataatggatcagtttatctccctcatgggtcagaagggccacgcccttctgattgattgtagaagcctggagacctcccttgtaccgcttagtgatccgaaactggctgttttaattactaacagcaacgtgagacactctctggctagttcagagtacccagtgagaagacgccaatgcgaagaagtcgcgagggcgctcgggaaggaatctttacgtgaggtacagctagaagaactagaagcagcaagagatctagtgagtaaggaaggtttccggcgtgcacgtcacgttgtaggtgagatcagaagaactgctcaggctgctgcggcactgaggaggggtgattatagggctttcggaaggctcatggtcgaatcgcataggagcttgagggacgactatgaggtttcttgcccggagctggatcagctcgtcgaggccgccttggccgtccctggggtttacggatcacgcatgaccggggggggcttcggtggctgcactgtgaccttacttgaggctagcgcagctccacatgctatgagacacattcaggagcattatgggggtaccgctacattctacctctcccaggccgctgacggagccaaagttctctgcctt

SEQ ID NO: 3111 - DNA, 1176 bp, Artificial Sequence
  derived and/or modified sequence
atggctgcccttcgccagcctcaagtggccgaactactggccgaggcccgacgggcgtttcgagaagagttcggagccgaacccgaactcgctgtgtctgcccctggaagagttaatcttatcggggaacatactgattacaaccaggggttagtgctccctatggcactagaattaatgactgtactggtggggtctcccaggaaggacgggttagttagtctcctaacaacttcagagggagcagatgaaccccagcggctccagtttcctcttccaacagcccagaggtcactggaaccagggactcctaggtgggcaaactatgtcaaaggagttatacagtattatcctgctgctcccctcccagggttctccgcagtggtggttagttctgtgcccctaggaggaggattgagttcttctgcaagtctcgaagtcgccacttatacattcctgcagcagctatgtcctgatagtggaactatagccgccagagctcaggtgtgccaacaggccgaacattcgttcgctggaatgccttgtggaataatggaccagtttataagtcttatgggacagaaagggcacgctctactcatagactgtaggtctctagaaacatcactagtgcctctgtctgatcctaaattagcagtgcttataactaattctaatgtccgccactctctcgcctcctctgaatatcctgtcaggcggagacagtgtgaagaggtggctcgagcactcggaaaagaatccctgcgagaagtgcagctagaagaactagaagctgccagagacctggtgtctaaagaagggttcagacgggctaggcatgtggtgggggaaattaggcgaacagctcaggctgcagcagcgttacggcggggggattatcgagcatttggacggctgatggtggaaagtcacaggtctctgcgggatgactatgaagtgtcctgccccgaacttgatcaacttgtagaagccgcactcgctgtgcccggagtgtatgggagtcggatgacaggaggaggatttggaggatgtacagtgacactcttagaagcttccgccgccccacacgccatgcggcacatccaggaacactatggaggaactgccacgttctatctatctcaggccgctgatggggcaaaagtcctgtgtctt

SEQ ID NO: 3112 - DNA, 1176 bp, Artificial Sequence
  derived and/or modified sequence
atggcggcactgcgtcaaccccaggtggcggaactgttggcggaagcgcgcagggcctttcgggaagaattcggcgcggaacccgaactcgccgtgagcgctcctgggcgcgtcaacttgatcggtgagcataccgactacaaccagggactggtgttgccgatggctctggaattgatgaccgtgcttgttggcagcccgagaaaggatggactggtgtccctgttgaccacttcggaaggggcagacgagcctcaaagattgcaatttccactgccgaccgcgcaacgctctttggaaccaggcactccacgctgggcgaactacgtgaagggagtcatccagtactaccctgccgccccgcttccaggattctcggctgtggttgtctcatccgtgccgctcggtggcggactgtcgtcgagcgcctccctcgaagtcgccacttatacttttctgcaacagctgtgccccgactcaggaactatcgcagcacgggcacaggtgtgccaacaagccgagcactcgttcgcaggaatgccgtgtggaatcatggaccaattcatctccctcatgggacagaaaggtcacgcgttgctcattgattgtaggagcctggaaacctcactggtgcccctctccgacccgaaactcgccgtgctcatcacgaactcaaacgtccggcacagcctggctagctcggagtacccggtgcggcgccggcagtgcgaggaggtggcccgcgccctgggaaaggagtcccttcgggaagtacaactcgaggagttggaagctgccagggacctcgtcagcaaggaagggttcaggagagcgcggcacgtggtgggagaaataaggcggaccgcacaagcggcggctgctctccgcagaggagactaccgcgcttttggacggctcatggtggaatcccatagaagccttagggacgactacgaggtgtcgtgcccagagctggaccaactggtcgaggcggcgctggcggtcccaggagtgtacggctcgcgaatgacggggggtggcttcggcgggtgcaccgtgactctgctggaagcctcagcggccccgcacgctatgcggcacatccaggagcactacggtggcacggccaccttctacctgtcacaggccgccgacggagcaaaggtgctctgtttg

SEQ ID NO: 3113 - DNA, 1176 bp, Artificial Sequence
  derived and/or modified sequence
atggccgccctgaggcaaccccaggtcgctgagctattagcagaggcccggagggccttccgagaggaatttggggcagagcccgagcttgccgtttccgctcctggccgtgtgaacctgattggagaacacacggactacaatcaaggtctggtcttacctatggccttggaactcatgacagtactagttgggagtccccggaaagacggcctcgtgtcactgctcacgacaagcgagggcgctgacgaaccccagaggctgcaatttccactgccaaccgcacagagatcactagaacccggcacccctcgctgggccaattatgtgaagggtgtgatccagtattacccagcagctccactccctggcttcagcgctgtggtagtatccagcgtgcccctgggtggggggcttagttcgtccgcctcactggaggtagcaacttacacctttctgcagcagttgtgcccagactcaggcactatcgcagcgagagcacaggtatgtcagcaagctgagcactcattcgctgggatgccatgtggaatcatggaccagttcatctcgctgatgggacagaaaggccacgctctgctgatcgactgtcgcagcctcgagacatccctcgtgccactgtccgacccgaagctggcagtgctcattaccaattctaatgtacggcatagtctggcgtcttcagaataccccgttcgccggcgtcagtgtgaggaagtagcccgcgctctgggtaaagagtcactgagggaggtgcagctggaggagctggaagccgcaagggacctcgtatcgaaagagggattccgcagagcccggcacgtggtgggagagatccggaggacagcgcaggccgccgctgcccttcggcgaggcgattaccgtgcgtttgggaggctgatggtagagtcacacaggtcactgcgggatgattacgaagtgtcctgcccagaactggatcagcttgttgaggccgctttggcagttcctggtgtgtatgggtctcggatgacgggtggtggtttcggtgggtgcaccgtaacactgttggaggctagcgccgcaccccacgctatgagacacatccaagagcattatggaggcactgctactttctatctgtcccaggccgccgatggggctaaggttctgtgcttg

SEQ ID NO: 3114 - DNA, 1176 bp, Artificial Sequence
  derived and/or modified sequence
atggccgccctgagacaaccgcaggtggccgaacttctcgctgaagccagacgggccttcagagaggagttcggggcggaacccgagctggccgtgtcggcgcctggtagggtgaacctcatcggagagcataccgactacaaccagggcctcgtgctgcctatggcactcgagctgatgaccgtgctcgtcgggtcgccacgcaaagatggtttggtgagcctgctcactacctccgagggagcggacgaacctcagcggctgcagtttccactgccaaccgctcagcggtcacttgagccgggaaccccaaggtgggcgaactacgtcaaaggggtgatccagtactatccggcggcgccactgcctggcttctcagccgtggtggtgtcgtctgtgccgctgggagggggattgtcgtcaagcgcttcgctggaagtggcgacttacactttcttgcaacagctgtgcccagatagcggcaccatagcggcgcgggctcaagtgtgtcaacaggccgagcatagctttgcaggaatgccttgtgggatcatggaccagtttatctcgctgatgggccaaaaaggccacgctctgctcatcgactgccggtccctcgagacttcgctggtcccactgtccgaccccaaactcgccgttctcatcactaactccaatgtgcgccactcactcgcttcctcagagtacccggtgcgccgccggcagtgcgaggaagtggcacgcgcattgggaaaggaaagccttcgggaggtgcagcttgaggaactggaagcggcccgcgacctcgtctcaaaagagggattccgccgcgctcggcatgtggtcggagagattcggcgaactgctcaggccgcggcggcgctgcgcagaggagattacagggcgttcggcagactgatggtggagtcacataggtcccttcgggacgactacgaggtttcgtgcccagagctggatcagcttgtcgaagctgccctcgcagtgccaggtgtgtacggatcaagaatgactggaggaggcttcggagggtgcactgtcacgctgctcgaggccagcgctgccccacacgctatgcggcacatccaagagcactacggcggaaccgccaccttttacctctcgcaagctgccgacggggcaaaggtgctgtgcttg

SEQ ID NO: 3115 - DNA, 1176 bp, Artificial Sequence
  derived and/or modified sequence
atggctgccctgagacaaccccaagtggcagagctgcttgcagaggccagacgggccttcagggaggagtttggcgctgaacctgaactggctgtgtccgcacccggcagggtcaacctcatcggcgagcacacagattataaccagggccttgtactgcctatggcactcgaactgatgactgtgttggtaggtagcccacgcaaggacggcctggtctccttgctgaccaccagcgaaggcgctgatgagcctcagagacttcagtttcctctgccgaccgcccagcgctccctggagcccgggacccccagatgggccaactatgtcaagggagttattcagtactatcccgccgctccgctgcccggattctctgctgttgtcgttagcagtgttcctctcggcgggggactcagcagttcagccagtctcgaagtcgctacttatacctttctccagcagttgtgccctgacagcgggactatcgccgccagagcgcaggtgtgtcagcaggccgagcacagcttcgcaggcatgccatgcggcattatggatcagtttatctctctcatggggcaaaagggccatgctctgcttattgattgccggtctcttgaaacaagcttggtgccactgtccgatcccaaactggccgttcttatcacaaattccaatgttcggcatagtttggcatcttcagagtacccggtgcggagaagacagtgcgaagaggttgcaagagctttgggcaaggaatctttgagggaggtacaactggaggagctcgaagccgccagagacttggtgagtaaagagggcttccggcgggcaaggcacgtggtgggtgagattagacggacagcacaagctgctgctgctttgcggcgcggagattaccgggccttcgggagactgatggtcgaatcccatagatccctgagggacgactacgaagtgagctgcccggagctggaccagcttgtcgaggccgccctggcagtacccggcgtgtacggcagcaggatgacggggggaggattcggcggctgcaccgtgaccctccttgaagcaagcgctgcaccacacgcgatgcgccacatacaggagcattatggtgggacagcaactttctatctgtcccaggccgcggacggcgcaaaggtgctgtgcctg

SEQ ID NO: 3116 - DNA, 1176 bp, Artificial Sequence
  derived and/or modified sequence
atggcggctctgagacaacctcaggtcgcagaactgctcgccgaggctaggcgtgccttccgcgaggaattcggagcagaaccggagctggccgtcagcgccccgggccgggtgaacctgatcggagagcacaccgattacaaccagggattggtgctcccaatggccctcgaacttatgaccgtcttggtcggttcaccgagaaaggatggcctcgtgtccctgctgacgactagcgagggggccgacgaaccgcaacgcctccagttcccactgccgactgctcagcgctcgctcgagcccggaacccctagatgggcaaactacgtgaagggggtgatccagtactaccccgcggccccactcccaggattttccgccgtggtcgtgtcatccgtcccgttgggtgggggtctgtcctcatcggcatccctcgaagtggccacctacacctttctccagcaactctgccccgactcgggcacgatcgcggccagggcgcaggtctgccaacaggcggagcattcgtttgctggcatgccgtgtggaatcatggaccaattcatcagccttatggggcagaaagggcacgccctgcttatcgactgccgcagcctggagacttcgcttgtgccgctgagcgacccgaaactggcggtgctgataactaatagcaacgtgaggcactccctggcatcatcagaatacccggtccggagaaggcaatgcgaagaagtggctcgcgctctgggcaaggagagcctcagggaggtccagctggaagagctggaagccgctcgcgacctggtgtccaaagaaggattccggcgcgcaagacacgtggtgggagagattaggagaaccgcgcaagctgcggcagctttgcggaggggtgactaccgggcgttcggacgcctcatggtcgaatcgcaccggagcctgcgcgacgactacgaagtctcgtgtcctgagttggaccagcttgtggaggccgctctggcggtgcctggggtgtacgggtccaggatgactggaggagggttcggagggtgtactgtgactttgctggaagcgtcagccgctccgcacgccatgcgccacatccaggaacactacggaggaaccgcgaccttctacttgtcacaggcagcagacggtgctaaggtgctctgcctg

SEQ ID NO: 3117 - DNA, 1176 bp, Artificial Sequence
  derived and/or modified sequence
atggcagcactgcggcaaccacaagtcgcggagcttctcgcagaagcgcgacgtgcgtttcgtgaggaatttggtgccgaacctgaacttgcagtgagcgccccaggaagggtgaaccttataggagaacataccgattacaatcaaggactggtgcttcccatggcactcgaactgatgaccgtgctcgtcgggagcccgcggaaggacggtcttgtatccctgcttactactagcgagggggctgatgaacctcaaagactccaatttccccttccaaccgcacaaaggtccctggaacctggtactccccgctgggccaattacgtgaaaggcgtgatccagtactaccctgccgccccgcttccaggattttccgcagtcgtggtgtcatctgtgcctcttggaggtggcctgtcctcctcggcctcccttgaggtagccacttacactttcttgcagcaactctgtcctgactccggtacgattgccgcacgcgcacaggtctgtcagcaggcggagcacagcttcgccggcatgccttgtggtatcatggatcagttcataagtcttatggggcagaagggtcacgcgcttctcattgattgccggagcttggagacgtcgcttgtgcctctctcggaccctaagctggcggtgctcatcaccaactccaacgtgagacactcactcgcatcaagcgaataccctgtgcgacgacggcaatgtgaggaagtcgcgcgggcactcggcaaggaatcactccgggaagtgcaacttgaggagcttgaggcagctagagacttggtgagcaaggaaggatttcgcagggcccgacatgtcgtgggtgaaattcgtagaacggcacaagcggcagcagcgctcagacgaggagactaccgcgcctttggacggcttatggtggaatcccatcgcagcctgagagatgactacgaagtctcgtgtcctgagcttgatcagcttgtcgaagcagcacttgcagtcccgggagtctatggttcgcgtatgactggaggcggcttcgggggatgtactgtgacccttcttgaggcgtcggccgcaccacatgcgatgaggcacattcaagaacactatggcggtaccgcaaccttctacctgagccaggccgctgatggagcaaaagtcttgtgcctg

SEQ ID NO: 3118 - DNA, 1176 bp, Artificial Sequence
  derived and/or modified sequence
atggctgcactcaggcagccgcaggtcgccgaattgctggctgaggcccgccgtgccttcagagaagagtttggcgctgagcctgagctcgccgttagtgctcccggccgggttaacctcattggggagcacaccgactacaatcagggcctggtcctgccaatggccctggagctcatgactgtcctggtcgggtcccccaggaaagacgggctcgtttccctactcacaacatctgagggcgccgacgagcctcagcgtctgcagtttcctttacccacagcccagagatcgctagaaccgggaactcctcgatgggcgaactatgtcaaaggagtcatccagtactatcctgctgctcctttgcctggattcagtgccgtggttgtgtcttccgtcccattgggtggaggtctttcttccagtgcgagtctcgaggtggccacttatacgttcctgcagcagctctgtcccgatagcgggactatcgcggctagggcacaggtctgccagcaggcagagcacagcttcgcgggcatgccttgcggcataatggaccaatttatcagtctgatgggccagaaaggccacgcgcttctcatcgattgtcgctctttggagacttccctcgttcccctgtctgatcccaagctggctgtcctgattaccaactcaaacgtgcggcattctctggcaagtagcgaatatcccgtgcgccgccgccaatgcgaggaggtagctcgcgcgttgggcaaggaatctctccgagaggtgcaactcgaggagctcgaagctgctcgcgatcttgtgtcaaaggaagggtttaggagggcccgccatgtcgtaggtgagataaggcggaccgcgcaggcagccgctgcgttgagacgcggcgactacagggctttcggaagacttatggtcgagagccatcgctcactgagggatgattatgaggtgtcctgccctgagctggatcagcttgtcgaggcggccctggccgtgccaggggtctatggtagtagaatgacaggaggcgggttcggtggttgcaccgtcaccttgctggaggcctccgctgctccacacgcaatgagacacatccaggagcactacggagggactgccactttctacttgtcacaggcagcagacggggccaaagtgctctgcctt

SEQ ID NO: 3119 - DNA, 1176 bp, Artificial Sequence
  derived and/or modified sequence
atggctgccctcagacaacctcaggtcgccgagctgttagcggaagctagacgggctttcagagaagagttcggtgcggaaccagaattggcagtcagcgctcccgggcgcgtaaacctgattggcgagcacaccgactacaatcaggggctggtcttaccaatggccctggagctgatgaccgtgctcgtcggttccccacgaaaggacggattggtcagccttcttacaacttcagagggggccgacgaaccacaaaggctgcaattccctctgcctacagctcagagaagtctggaaccaggcacaccacgatgggcgaactatgtaaaaggtgtcatccagtattaccctgccgccccactaccaggatttagtgctgtggtggtctcctccgtccctctaggcgggggcctgagttcatccgcaagcttagaagtggcaacttatacatttctgcagcagctgtgccctgattccggcacgattgctgcccgggcgcaagtttgccagcaggctgaacatagcttcgccggcatgccatgcggaatcatggaccagtttataagcctgatgggccagaagggccatgccctcctaattgactgccggagcctggaaacatccttagtgccactctccgaccctaagctcgccgtgctaattactaattcaaatgtgagacactctctagcgtcaagtgaataccctgttagaagacggcaatgcgaggaggtggctagagcgctcggcaaggaaagtctccgagaagtacagttggaggaacttgaagcggccagggaccttgtgtcaaaagagggttttaggcgcgctagacatgtcgtcggggagatccgtagaaccgctcaggcggcggctgcactgaggaggggcgattacagagcttttggacgcctgatggtggagtcacatcgcagcctgcgggatgattacgaggtgtcctgtcccgagctcgaccaactggtcgaagccgcattagccgtgcctggggtctatggtagccggatgacagggggcggatttggcggatgcactgtgactctcctagaagcatcggccgccccgcatgcgatgaggcatatccaggagcactatggtggtaccgctacgttctatctatcccaggcagctgacggcgcaaaggtgctctgcctg

SEQ ID NO: 3120 - DNA, 1176 bp, Artificial Sequence
  derived and/or modified sequence
atggcagctcttcggcagccgcaagtggccgaactgctggccgaggcgagaagagcatttcgcgaagaatttggtgcggaaccagaactcgcagtgtccgcacctggacgagtgaacctgattggtgagcatactgattacaaccaaggccttgtgcttcctatggcccttgaactcatgacggtccttgtcggaagcccgcgtaaggatggattggtgtccctgcttaccacctcagagggagcagatgaaccgcaacgcctccaattcccactcccaaccgcccagaggagcctcgagccaggtacgcctcggtgggcaaattacgtcaaaggcgtgatccaatactaccctgccgcgccactgccaggtttttcggcagtggtggtcagctccgtgccactcgggggtggcttgtcatcgagcgcatcccttgaagtggcaacctataccttcctgcaacaactgtgccccgattcgggtaccattgcagcaagggcacaagtgtgtcaacaagcagaacattcgtttgcggggatgccatgcggcatcatggatcagttcatttcgcttatgggtcaaaaagggcacgcacttctgattgattgcagatccctcgaaacttcactggtgcctctttccgacccaaaactcgccgtcctgattacgaactcgaatgtccgccactcgctggcatcgtcagaataccctgttcggcggcgtcaatgtgaagaagttgcacgcgctcttggtaaggaatccctgcgggaggtgcagttggaagagcttgaagcagcaagggatctggtgtccaaggaagggttcagacgagcacgacatgtggtgggggagattcgccgtactgcacaagcagccgcagccttgcgccgcggtgattaccgggcatttggacggcttatggtggagtcccaccgctcactgcgagacgattacgaagtctcatgtcccgaactggatcaacttgtggaagcagcactggcagtgccgggtgtctacggttcccggatgacgggagggggctttggtggatgcaccgtcacccttttggaggcatccgccgctccacacgcaatgagacatattcaagaacattacggaggaaccgccaccttttacctgtcccaggcagcagacggagccaaggtgctttgtctc

SEQ ID NO: 3121 - DNA, 1176 bp, Artificial Sequence
  derived and/or modified sequence
atggccgctttgaggcagccacaggtggctgaactgctcgcagaggcccgccgggcattccgcgaagaattcggagcagagcccgaactggcggtgtctgcgccagggcgcgtaaatctcataggcgagcatacggattataaccaggggcttgttctgccaatggccctggagttgatgacagtacttgtgggcagcccgaggaaggatggattggtgtccttgctcaccacctctgaaggagccgacgagccccagcgtctgcaattcccactccccactgcccagcgatcacttgaacctggtacccctcggtgggctaactacgttaaaggggtgatccagtactaccctgcagccccactgcccggtttttccgcggtcgtggtcagctctgtgcctctgggcggaggtctcagcagtagcgcaagcctggaggtggccacttataccttcttgcagcagctgtgtcctgattctggaaccatagctgcgagggcccaagtgtgtcagcaagctgaacatagctttgccggcatgccctgcggcatcatggaccaattcatctccctgatgggacaaaaagggcacgccctgctcatcgactgccggagcctggagacctcacttgtgcccctgtccgatcccaaactggccgtgcttatcaccaactcaaatgtgcggcactctctagcgtcctccgaatatcctgtgcgccgtagacagtgcgaggaggtggccagggccctgggcaaggagtctctgcgggaggtccagttggaagagctcgaggcggcgcgcgatctcgtatccaaagaaggcttccggcgagctcgacatgtggtgggcgagatcaggagaactgcccaggctgcagccgctctgcgcagaggggattacagggcattcggtagattgatggtggagtctcatcgcagtctgagggacgactacgaggtttcatgtcccgagttagaccagctcgtcgaagctgctcttgccgtgcccggagtgtatggctctcggatgactggcggcgggttcgggggatgcacagtgactctcctagaagctagcgctgccccacatgccatgagacatattcaggaacattatggcggtacagctacgttctacctatctcaggctgcagatggtgccaaggtactgtgtctg

SEQ ID NO: 3122 - DNA, 1176 bp, Artificial Sequence
  derived and/or modified sequence
atggccgcccttcggcagccacaagtggccgaactgcttgcggaggcacgtcgggcattccgcgaagagtttggagcggaaccagaacttgcagtgtcggccccagggcgagtgaacctcatcggtgaacacactgactacaaccaaggacttgtgctgcccatggcactcgaactcatgaccgtcctcgtgggttccccaaggaaggacggactggtgagccttctcactacctccgaaggtgcggacgaaccccaacggcttcagttcccacttcctactgcacagcgaagcctggaaccaggaactcctcgttgggcgaattacgtcaaaggagtgatacaatactaccctgcagcaccccttcccggattctcggcagtggtggtgtcatcagtgcctctgggtggaggacttagcagctccgcatcgcttgaggtcgccacgtacacgttcctccaacaattgtgtcctgactcaggaactatcgctgccagagctcaggtgtgtcaacaggcagagcattcctttgcaggaatgccctgtggaatcatggatcagttcatatctttgatgggtcagaaaggccacgccctcttgatcgactgtcgaagccttgagacttcccttgttccactctcagatcctaaactggcggtgctcattactaattccaatgtccgccattcacttgcatcatctgaatacccagtcaggcggagacaatgtgaagaggtggccagggcattgggcaaagaatccctccgagaagtgcaactggaagaactcgaagcagcgagggatctcgtgtcgaaggagggatttcgtcgagcacgccatgtcgtcggcgaaattcgcagaactgcacaggcagccgcagcactgcgccggggtgattaccgagctttcggacggctcatggtggagtcccatcggtcgctcagagatgactacgaagtctcttgtcccgaactggaccagcttgtggaggcggcactggcagtgcctggagtgtacggaagcagaatgactggaggagggtttggagggtgcaccgtgaccctgctcgaagccagcgcagccccacacgcaatgcggcatatccaggagcactacggcggtactgcaaccttttatctttcccaagctgccgatggcgcaaaggtgctgtgcttg

SEQ ID NO: 3123 - DNA, 1176 bp, Artificial Sequence
  derived and/or modified sequence
atggccgcactcaggcaaccacaggtagccgagcttctggccgaagctcgccgcgctttccgagaagaattcggagccgagccggagttggctgtttccgcgccaggacgagtcaacctcatcggggaacataccgactacaaccagggccttgtgctcccgatggccttagagttaatgacggtgttggtaggatccccgagaaaagacggtcttgtttccctactgacgacaagcgagggagcggacgaacctcaacggttacaatttcccctcccaacagctcaacgcagcttggagcctggcacgccacgttgggccaattatgttaagggtgtcatccagtattatccggctgcaccactgcccggattcagcgccgtggtcgtttcatcagttcccctcggcggcggactgtcctccagtgcctcgttggaggttgcaacatacacgttcttgcaacagctatgtccggattctggcaccattgcagcccgagcgcaagtgtgccagcaagcagagcacagcttcgccggcatgccctgcggaatcatggaccagttcatcagcctaatggggcagaagggtcatgctctgctgattgactgtcggagtctagaaacatcattagtcccactgagcgatccgaagttagctgttttgataacgaacagcaatgtgaggcacagcttggcgagctccgaatatcctgttcgcagacggcagtgtgaggaagtcgcacgtgctctgggtaaagaaagcctgcgagaggttcaattggaggaactagaggcggctagagatttggtctccaaggagggcttccgccgggccagacatgttgtcggcgaaattcgccgtacagctcaggccgcagccgcacttcgtaggggcgattaccgggctttcggtcgtctgatggtggaatcgcaccggtccctccgagatgactacgaagtgtcttgccctgagctagaccagctcgtcgaggcggccctcgcggttcccggcgtctacggaagtcgcatgactggtgggggcttcggggggtgcactgtgacactgttagaagctagtgccgcacctcatgcaatgcggcatattcaagaacattacggcggtaccgccacgttttatctgtctcaggccgctgatggggccaaagtactttgtttg

SEQ ID NO: 3124 - DNA, 1176 bp, Artificial Sequence
  derived and/or modified sequence
atggctgctttgaggcaaccacaggtggccgaactgctggccgaggccagaagagcgtttagagaggagtttggggctgagcccgagctggctgtttctgcgcctggcagggtgaatctgattggagaacataccgactacaaccagggactggttctgcccatggctcttgagctcatgacagtcctcgtcgggagccctagaaaggatggcctggtcagtcttctgaccacgtctgagggggctgacgagcctcagcgcctacagttcccactgcccactgcccagagaagcctggagccaggcacaccaagatgggccaactacgttaagggagtgattcagtattaccccgccgcccccctgcctgggttttctgccgtggtggtctcgtccgtcccgttgggcggagggctgtcatcctccgcaagtctcgaggtggcgacatatactttcttacagcagctctgcccggattctggcacaatcgccgccagagctcaggtctgtcagcaggccgagcattcatttgcgggcatgccatgcggtatcatggaccagtttatttctctcatgggtcagaagggtcatgctttgctaattgattgtcgatctcttgagaccagcctcgtgccactcagcgatcctaaattggccgtccttattaccaactccaacgtcaggcactctctggcaagtagtgaataccccgtgaggaggaggcaatgtgaagaggtcgcacgggccctgggtaaagaaagcctgagggaggtccagcttgaagagctggaggccgcaagagatctggtgagcaaggagggattcaggcgagccagacatgtggtgggggagataagaaggacggcccaggccgctgccgctcttaggcgtggcgactaccgggcatttggtaggttgatggtggagtcacataggtcattgcgggatgactacgaggtgtcctgcccggagctcgaccagcttgtggaggcggccctggccgtgccgggggtctacggctcaagaatgactggcggcggatttggaggatgcaccgtgaccttacttgaggcctctgccgcgccccatgctatgcggcacattcaagaacactacgggggcacggcgacattttatctgagccaggccgcagatggggcaaaggttttgtgcctg

SEQ ID NO: 3125 - DNA, 1176 bp, Artificial Sequence
  derived and/or modified sequence
atggcagccctgcgtcagccacaagtagctgagctcttggcagaggccagacgagcgttccgggaggaattcggagctgaaccggagctcgcagtttccgcccccggccgtgttaatttgatcggcgagcacacggactacaatcaaggtttagtactccccatggctttggaactgatgaccgtactggtgggtagcccgcggaaggacggcctggtgtccttactcactacctccgagggggctgatgagccgcaacggctgcaattccctcttcccaccgcccagcgatctctcgaacccggtacccctcgctgggcgaactatgttaagggcgtcatccagtactaccctgccgctccacttccaggcttctcggccgtcgtagtatctagtgtccccctgggaggaggactgtcgtccagcgcgagcctcgaggtggctacgtacaccttcctgcagcagctttgccccgactccggcaccatcgcggcccgtgcacaggtctgccagcaggcggagcactcgttcgctggcatgccttgcgggataatggaccagttcatctccttgatgggccagaagggacatgccttgctgattgactgccgtagtctggagacgtcactggtgcctttgagtgatcctaagctagccgtcctcattaccaactcaaacgtccggcacagtctcgcaagctcggagtaccccgttcgccgcaggcagtgcgaggaagtggcccgtgcactgggtaaggaatccctgcgtgaggtccagctcgaggagttggaagccgctagggacttagttagcaaggagggttttaggcgggctcgccacgtcgtcggcgagatccggcgcaccgcgcaagccgcagccgcgctaagacgtggcgattaccgggcgttcggccgcctcatggtggagagccatcgttccctgagagacgattacgaggtcagctgcccagaattggaccaattagtggaggccgccctggccgtccccggcgtgtacggaagccgtatgacgggaggcggcttcggaggatgcactgtaacccttctcgaggcaagcgcagctccgcacgcgatgcgccacatccaagagcattacggcggtaccgccaccttctacttatcccaggcggctgacggcgctaaagtcttgtgcctc

SEQ ID NO: 3126 - DNA, 1176 bp, Artificial Sequence
  derived and/or modified sequence
atggcggcgctacgtcaaccgcaagtagcggaattattagcggaagcgcgacgagcgtttcgagaagaatttggtgcggaaccggaattagcggtatcggcgccgggtcgagtaaatttaataggtgaacatacggattataatcaaggtctagttttaccgatggcgctagaattaatgacggttctagttggttcgccgcgaaaagatggtttagtttcgttattaacgacgtcggaaggtgcggatgaaccgcaacgtttacaatttccgttaccgacggcgcaacgatcgttagaaccgggtacgccgcgttgggcgaattatgtaaaaggtgtaatacaatattatccggcggcgccgctaccgggtttttcggcggttgtagtttcgtcggtaccgctaggtggtggtttatcgtcgtcggcgtcgctagaagtagcgacgtatacgtttctacaacaattatgtccggattcgggtacgatagcggcgcgtgcgcaagtttgtcaacaagcggaacattcgtttgcgggtatgccgtgtggtataatggatcaatttatatcgttaatgggtcaaaaaggtcatgcgttattaatagattgtcgttcgttagaaacgtcgctagttccgttatcggatccgaaattagcggtactaataacgaattcgaatgttcgtcattcgttagcgtcgtcggaatatccggttcgtcgtcgacaatgtgaagaagtagcgcgtgcgctaggtaaagaatcgttacgagaagttcaattagaagaactagaagcggcgcgagatctagtatcgaaagaaggttttcgtcgtgcgcgacatgtagttggtgaaatacgtcgaacggcgcaagcggcggcggcgctacgtcgaggtgattatcgtgcgtttggtcgtctaatggtagaatcgcatcgatcgctacgagatgattatgaagtttcgtgtccggaattagatcaactagtagaagcggcgttagcggttccgggtgtttatggttcgcgaatgacgggtggtggttttggtggttgtacggtaacgctactagaagcgtcggcggcgccgcatgcgatgcgtcatatacaagaacattatggtggtacggcgacgttttatttatcgcaagcggcggatggtgcgaaagtattatgttta

SEQ ID NO: 3127 - DNA, 1176 bp, Artificial Sequence
  derived and/or modified sequence
atggcagcgctccgccagccacaggtggcagagctgctggcggaagcacgcagagcgtttcgtgaggagtttggagccgaaccggaactggccgtgtccgcgcctggccgagtcaatcttataggggaacataccgactataaccagggactcgtgcttcccatggccctcgagctcatgacggtgctggtgggcagcccaagaaaggacgggctggtcagccttctgactacgtcggaaggagccgacgaacctcagcgactccagtttccactgcccaccgcacaaagatcacttgagccgggaacgccccggtgggcaaactacgtgaagggagttattcaatactaccctgcagcacccctgccagggttcagcgcagttgtggtgtcctctgttccactgggtggcggccttagcagctcggcgagccttgaggtggcaacctacacctttctgcaacaactctgcccagatagcggcactatcgctgcacgggcacaagtgtgtcaacaagcagaacacagcttcgcaggaatgccttgcggtatcatggatcagtttatctctttgatgggacaaaagggtcacgccctcctcatagattgtagaagtctcgaaacctctttggtaccccttagcgacccgaaacttgctgtgcttattactaactcgaacgtccgtcattcgctggcgtcctcagaataccccgtgagacgccgacagtgcgaagaagtggcacgtgcgcttggaaaggaatcccttagggaagtccagctggaagagcttgaggctgctcgggacctggtcagcaaagagggattcaggcgggcccggcacgtggtgggtgagatcagaagaaccgcccaagctgccgccgcccttagacggggagattaccgggcttttggtcgccttatggtggaatcacatcgctctctgcgcgatgattacgaagtgtcgtgtcccgaactcgatcaattggtggaagccgcactcgccgtccctggtgtctacggatcacgcatgactggtggaggtttcggcggttgcactgtgactttgctggaggcgtcggcggccccacatgcaatgcggcatatccaagaacactacggtggaactgctaccttttatctgtcgcaagctgccgatggggcaaaggtcctctgcctg

SEQ ID NO: 3128 - DNA, 1176 bp, Artificial Sequence
  derived and/or modified sequence
atggccgcactccggcagcctcaggtggcagaactgcttgcagaggctaggcgtgcctttagagaggaattcggagcagaacctgagcttgccgtctccgcacctggaagagtgaatcttataggcgaacataccgattacaaccagggtcttgtgcttcccatggctttggaacttatgaccgtgctggtggggagcccgcggaaggatggactggtgtcgcttctgaccacttcagaaggtgcggacgagccacaaaggctccagtttcccctgcccaccgcgcagcgcagcttggagccgggaacccctaggtgggcaaattacgtcaagggagtgatacagtactatcctgcagccccactgccagggttcagcgctgtggtcgtgtcgagcgtgccactgggcggagggctctcaagctccgcatcccttgaggtggcaacctacacttttctccagcagctgtgtccagattcgggaacgatcgccgctcgtgcccaggtgtgtcaacaagcagaacactcctttgcgggaatgccctgcggaatcatggaccaattcatttccctgatgggtcaaaaggggcatgcacttctcatcgactgccggtcgctggaaacttctctggtccctcttagcgatcctaagttggcagttctgataactaattccaacgtgcgtcactcgcttgcgtcctcagaataccccgtgcgccgtaggcagtgtgaagaagtagctcgtgccttgggtaaggagagcctgagggaagtccagctggaggagcttgaggcagcacgcgatctggtgtccaaggagggattcagacgagcaagacatgtggtgggagagatccgtagaaccgcacaagcagccgccgctttgcgacgcggagactacagagcattcggacggctgatggtggagtcgcatcgaagccttagagatgattacgaagtttcatgccccgagcttgatcagctggtcgaggctgcactggccgttcccggtgtgtacgggtcgcggatgaccgggggaggattcggtgggtgtactgtgactttgctcgaagcctccgcagcgcctcatgcaatgcgccatattcaggagcactacggcggtaccgcgactttctacctctcccaggcggcagatggagcaaaagtgctctgtctt

SEQ ID NO: 3129 - DNA, 1176 bp, Artificial Sequence
  derived and/or modified sequence
atggccgcactgcggcagcctcaggttgcagaactccttgcagaggcgcggagagcttttcgagaagagtttggagcagaaccagaacttgccgtgtcggcccctggacgtgtcaacctgataggagagcatactgattacaaccaggggctggtgcttcctatggcacttgagctcatgactgtgctcgtgggctctccgcgcaaagatgggcttgtttcactccttactacttcggaaggagccgatgagccccaaaggcttcagtttccactgccaaccgctcagcggagcctggagcccggaaccccaagatgggcaaactacgtgaaaggtgtcattcaatactaccctgcggctcccctgccgggattttcagcagtggtggtgtcctccgtcccactcggaggcgggctgtcctctagcgcatctctggaagtggctacttacaccttccttcaacagctttgtcccgactccggcaccatagctgccagagcccaagtgtgtcaacaggcagaacactccttcgctggtatgccatgcggtataatggatcaattcatctcactcatgggacaaaagggacatgcactgcttattgattgcaggagccttgaaacttccctggtgcctctgtccgaccctaagctggcagttcttattaccaacagcaacgtgcggcactcactggccagctcagagtacccggtgaggaggcgccagtgtgaggaggtcgctagggcattgggtaaggaatcgctcagagaggtgcaacttgaagaactggaggcagcacgggacctcgtcagcaaggaaggctttagaagagcacgacacgtcgtgggcgaaattcgccgaacggcccaagcggccgccgcgttgcggagaggggattacagagcatttggtcgcctgatggtggaatcgcataggtcactgagagacgattatgaggtgagctgccctgaacttgatcaacttgtcgaggcagcacttgcagtccccggagtgtacggatccagaatgaccggtggtggcttcggcggctgtactgtgacgcttcttgaagcatcagctgctcctcatgcgatgcgtcatatccaggagcattacgggggtaccgcaactttctatctttcccaagcagcagatggggcgaaggtcctctgcctc

SEQ ID NO: 3130 - DNA, 1176 bp, Artificial Sequence
  derived and/or modified sequence
atggccgcacttcggcaaccacaagtagcagagctgctggcagaagcacgaagggcatttcgggaggaatttggggctgagcctgagctggccgtgtcagcgccagggcgggtgaatctcatcggagaacacactgattacaatcagggcctcgtccttcctatggcgctggaacttatgactgtcttggtcggatcaccaaggaaggatgggttggtgtcgcttcttactacttcagaaggagccgacgagccacaaagactccaattccctcttcctaccgcgcagagatcgctggaaccagggacccccagatgggctaactacgtgaaaggtgtgattcagtactacccagcagcaccccttccaggattttcggcagtcgtggtcagcagcgttcccctcggcggcgggctgtcgtctagtgcatccctcgaagtggccacctacacgttcttgcagcaactgtgtccggattccggtactattgcagcacgcgcccaggtctgtcaacaagcagaacattcatttgcaggtatgccatgtggtattatggatcaattcatctccctgatgggtcagaagggacatgcacttctgatcgattgcagaagccttgaaacctcattggtgcctctgtcagaccctaagctggccgtgctgattaccaacagcaacgtgcggcattccctggcgagctctgagtaccctgtgagacgtcggcagtgcgaggaagtggcgcgagctcttggtaaggaatcgctgcgcgaggtgcagctggaagaactcgaggcggcacgggacttggtgtcgaaagagggttttcggagggccaggcacgtggtgggtgagatcagaagaaccgcacaggcagctgccgccctgcggcgtggagattacagggcatttggccgcttgatggtggagtcacaccgctcccttcgcgatgattacgaagttagctgtccggaactggatcagctggtcgaagcagcacttgcagtgccaggagtgtacggttcgaggatgaccggtggagggtttggagggtgtaccgtgacgcttttggaggcgtccgcggcgccccatgcaatgaggcacattcaagaacactacggaggaaccgcaaccttctacctgtctcaagcagcagatggagccaaagtgctctgtctg

SEQ ID NO: 3131 - DNA, 1176 bp, Artificial Sequence
  derived and/or modified sequence
atggctgcgttgagacaaccacaagtagctgagctactcgcggaggcaagacgagcctttagggaggagttcggcgcagaacccgaactggccgtgtccgcaccaggacgagtgaacctcattggtgaacacactgactacaatcaggggctagtgctgcccatggcattggaattgatgaccgtgctggtcggaagcccgagaaaggacggcctcgtcagcctgttgaccacgagcgaaggcgcggacgaaccccagaggctccagtttccactgcctaccgctcagcggtcactcgaacctggcaccccccgatgggctaattacgtgaagggcgtaatccaatattatcctgcggcaccccttcccggcttctccgctgtagtggtgagcagtgtcccattgggcggggggctttcaagcagcgcgagtctggaggtggctacttatacatttctgcagcaactgtgcccagatagcgggaccattgctgccagggcgcaagtatgccagcaggccgagcattcattcgcgggaatgccttgtggtataatggaccagtttataagcctgatgggtcagaagggacacgcattgctgatcgactgccggagtctggagacatcattggtccccctctccgatcccaaacttgcagtcctgattactaattcgaacgtccgtcactccttggcatcgagcgagtatcccgtgcgcagaaggcagtgtgaagaagtcgcacgtgccctcggaaaggaaagtcttcgggaagttcagctagaggagcttgaagccgccagggacctggttagcaaagaggggtttagacgtgcacgccacgtcgtaggagagattcgtcggaccgcacaggcagccgcagcactccggagaggcgattaccgagcattcggccggctgatggtggaaagccaccgaagtctgcgagatgattacgaggtcagctgtcccgaacttgatcagctagtcgaagccgctctggccgtccccggggtgtatggatccaggatgacaggaggaggcttcgggggctgtactgtgacactcttggaggcctcagctgctccccacgctatgagacacatccaggaacactacggaggcacagctactttctacctatctcaggccgcagatggagccaaggtactgtgcctg

SEQ ID NO: 3132 - DNA, 1176 bp, Artificial Sequence
  derived and/or modified sequence
atggccgccctgcgacagcctcaagttgccgaacttctggccgaggccaggagggcatttagggaagaatttggagccgaacctgagctcgctgtaagcgcaccaggacgcgtgaatctgattggggaacacacggattataaccagggcttggtgctgccaatggcacttgaactcatgaccgtcctggtgggatctcctcgaaaagatggcctggtatccttgctgacaaccagcgaaggagctgacgagccccagaggttgcaattcccgctgcctacagctcagaggagcctggagccgggaaccccaagatgggccaattatgtgaaaggggtaattcagtattacccagccgctcctctcccgggattttctgctgtggtcgtatcttcagtaccattggggggcggtctgagcagtagcgcctcattggaagtagcaacatataccttcctccagcaactgtgcccggattccggcacgattgcagctcgagcacaagtgtgtcagcaagcagagcattctttcgcggggatgccctgtggtattatggatcaatttatttctctgatgggacagaaaggacacgctctgctcatcgactgtagatctctcgaaacaagcctcgtgccactttctgatccgaagcttgccgtgctgatcacaaattctaacgtgcgacatagtctcgcttcctcagaatacccagtgcggcgacggcagtgcgaggaagtcgcccgggcactcggcaaagaatcattgcgcgaagtgcagctggaagagcttgaggcggcccgcgatctcgtgagtaaggaaggtttcagaagggcgcggcacgttgtgggcgaaatcagacgcacagcacaggccgctgcagccctgagacgcggtgattatcgcgctttcgggcgcttgatggtcgaaagccacagatctctgcgagacgactacgaggtgagttgccccgaactggaccagctcgttgaggccgccctcgccgtccctggggtctacggatcaagaatgacaggaggcggatttggtggctgcactgtgactctgctggaggctagcgcagccccacacgcgatgaggcacattcaggagcactacggggggactgccacgttttatctcagtcaagcggcagatggcgccaaggtgctctgtttg

SEQ ID NO: 3133 - DNA, 1176 bp, Artificial Sequence
  derived and/or modified sequence
atggcagctttgcggcagccacaggtcgccgaactgctcgctgaagctcgtcgcgctttccgggaagagttcggtgctgaaccagagctggccgtcagtgcgcctggcagggtgaacctgataggggagcatactgattataatcaaggacttgtgctgccaatggcgcttgaactgatgactgtgttggtcggaagccccagaaaggatggactcgtttctctgttgacaacctccgagggggcagatgagccacagaggttgcaattcccgctcccaactgctcagaggagtctggaaccggggactccccgctgggccaactacgtgaaaggtgttatacaatactacccagctgccccgctgcctggcttcagtgccgtagtcgttagctctgtccctctgggcgggggacttagcagctccgcttccctggaagttgccacttacactttcttacagcagctctgccccgactctggcaccattgccgctagggcccaagtgtgtcagcaagcagagcattcgttcgctggtatgccttgcggcatcatggaccagtttattagcctgatgggtcaaaaaggccacgcactgctcatcgactgccgcagcctggagactagcctggttcctctttcagatcctaaacttgctgtgttgatcactaacagcaatgtcaggcacagcctcgccagcagcgaatatcccgttaggaggcggcagtgcgaagaggtggcgcgcgctttgggcaaagaaagcctcagggaggtgcagctcgaggagttagaggctgcgcgcgatcttgtgtcaaaggagggcttccgtagggcaagacatgtggttggagagattcgtagaactgcacaggccgccgctgcgctgaggagaggtgactatcgggcttttggccgcctgatggtcgagagccacaggagtcttcgcgacgattacgaagtaagctgtccagagttggaccaactagtggaagcggcactggcggttcctggtgtatacggatcccggatgaccggtggtggctttggaggttgcacagttactctgttggaagcctcagctgctccgcatgctatgcgccatatccaagagcattatggaggaacagctactttttacctcagccaggctgcggatggcgctaaggttctctgtttg

SEQ ID NO: 3134 - DNA, 1176 bp, Artificial Sequence
  derived and/or modified sequence
atggccgctctgaggcagcctcaggtagctgagctcctggctgaagcccggagagcgttcagagaagaatttggtgccgagccggagttggcagtctctgcgcccggcagagtaaatcttatcggggagcatactgattataaccagggcctggtccttcctatggctctcgagctgatgactgtcctggtaggatcaccacgaaaagacggactcgtttccctacttaccacatcagagggtgcagacgagcctcagcgtctgcagttccctctacccaccgctcagagaagtctggagccaggcactccccgctgggccaactatgtgaaaggtgtcatccagtactacccagccgcccctttacccgggtttagcgccgtggtcgtgtcaagcgtgccgctcggtggcgggcttagctcgtccgcaagtctggaggtcgctacatatacgttcctgcagcagctgtgccccgattctggcactatagccgctagggcacaggtgtgccaacaggcagagcattcttttgccgggatgccctgtggaataatggaccagttcataagcctcatggggcagaaggggcacgcgctgttaattgactgtaggtccctggaaacttccctcgttccactgtctgacccgaagcttgcagttcttatcacaaacagcaacgtcagacactctcttgcatcttccgagtaccccgtgaggcgcagacagtgtgaagaagttgctagggcactgggcaaagagtctctccgcgaggtgcagcttgaggagcttgaagcggcaagagatcttgtttccaaggaaggcttccggcgagcgcgccacgttgtcggcgagatcagacggactgcacaggccgctgccgcgctcagaaggggagattatcgggcttttgggcgtctgatggtggaatctcacagatcactccgtgacgactacgaggtgtcatgcccggaactagaccagttggttgaggcagccctggccgtccccggcgtgtacggatccaggatgaccggaggcggcttcgggggctgtactgtgacactacttgaggcaagcgctgccccgcatgctatgcgccatatccaagagcactacgggggcacagctactttctatctgtctcaagccgctgacggtgcaaaggtcttgtgtctg

SEQ ID NO: 3135 - DNA, 1176 bp, Artificial Sequence
  derived and/or modified sequence
atggcggccctgcggcagccacaggtggccgaattgttggccgaggcacgacgtgcgtttagggaggagtttggggccgagccagaactcgccgtgtctgcccccggccgggttaatttgatcggtgagcatacggactacaaccaaggcctagtgcttccaatggctctggagctgatgacggtgttggtgggcagccctcgtaaggacggcttggtgtcactccttactacatcagaaggtgctgacgagccgcaaaggctccagtttcctctgcccaccgcacagaggtcactggagccaggcactccacggtgggcaaattatgttaagggagtgatccagtattatcccgccgcccccctgcccgggttttctgcagtggtggtctcctctgtgccactgggggggggcctttcgtcctccgccagtttagaggttgccacctacactttcctacagcaactctgccccgactcaggcaccattgcagctcgagcccaggtgtgtcagcaagcagagcactcctttgcaggcatgccttgtggcattatggatcaattcattagtctcatggggcagaaaggccatgccctgctgatcgactgtaggtccctggaaacatctttggtccccctcagcgaccctaaactggccgttctgatcaccaatagcaacgtgcgccactccctcgcaagctcagagtatcctgtgcgacggaggcagtgtgaagaagttgcaagagctcttggcaaggagtctctgcgcgaggtacaacttgaagagctggaggcggcccgagatctggtctctaaggagggcttccgacgggctagacatgtcgttggagagatccggaggacggcccaggcagcggccgccctacgacgaggcgactatcgagcgtttggtagactgatggttgagtctcaccgatccctgagagacgattatgaggtctcctgcccagagttggaccagctggtggaggccgctctggctgtgcccggagtgtatggcagtaggatgacgggcgggggcttcggcggctgcaccgtgactctactcgaggccagcgcggcgccgcacgcaatgaggcatatccaggaacattacggtggcaccgcaacattctacctaagccaggccgctgatggcgccaaggtgctctgtctg

SEQ ID NO: 3136 - DNA, 1176 bp, Artificial Sequence
  derived and/or modified sequence
atggccgctctgcgccaacctcaggtggccgaactcttggcggaggctagacgggctttccgggaagaattcggagcagaaccagagctcgctgtgtccgcgccgggtagggttaacctgatcggagagcatactgattacaatcagggccttgtgctccctatggccctggaattgatgactgtgctggtgggatccccgcgcaaggacggactcgtctccctgctcactacgtccgagggtgcggatgaaccgcaacggctgcagttcccgcttccaaccgcccagagaagcctggaaccagggacccctagatgggccaactacgtgaaaggggtgatccaatactatcccgcggcaccactgccaggtttttctgccgtggtggtgtcctcggtccctctggggggaggcctgtcaagctcggcgtcgctggaggtggccacgtacaccttcctgcaacagctctgcccggacagcggcaccattgccgcgagggcccaggtgtgccaacaggccgagcactcgtttgccggaatgccctgcggaatcatggaccaattcatcagtctgatgggccagaagggacatgccctgttgatcgattgtaggtcactggagacttcattggtccccctgtcagacccgaaacttgcggtcctgattaccaactccaatgtccgccatagcctggcgtcgtccgagtacccagtgcgccgacgccagtgcgaggaggtcgcaagagcactcgggaaggaatccctgagagaagtgcagcttgaagaactggaagctgcacgggatttggtgtcgaaggaaggattccgtcgggcccggcatgtggtaggagaaatccgccgcactgcacaggcagccgctgctctcagacggggggactaccgggcctttggccgcctgatggtggaaagccaccgatcgctgcgcgacgattacgaggtgagctgcccggagctcgaccaactcgtcgaagccgccctggcggtcccgggcgtctacggctcacggatgaccggaggaggtttcggaggctgcaccgttaccctcctggaagcatcggctgcgccgcacgcgatgcgccacatccaggagcactacggaggaactgcaactttctacctttcacaggctgccgacggagcaaaggtgctctgtctc

SEQ ID NO: 3137 - DNA, 1176 bp, Artificial Sequence
  derived and/or modified sequence
atggcagcactgcgtcagccccaggtcgctgaactgctggcagaagcccgcagggccttccgcgaggaattcggcgcagaacctgaactggcagtgagcgctcctggacgcgtgaacctgatcggggagcatacagactataaccagggcttagtgctacccatggcattagagcttatgaccgtgctagtgggaagccctagaaaggacggactcgtgtccctgctaacaacctccgaaggcgccgatgaaccacaaaggctgcagtttccccttccaaccgctcagagaagtctggaacctggcacaccaaggtgggcaaattacgtgaagggcgtgatccagtactatccagccgcccctctgcctgggtttagtgccgttgtggtttcaagcgttcccctgggtggcgggctgtcaagtagcgccagcctggaggttgccacatatacattcctgcagcaactatgtcctgattctggtaccatcgcagcccgggcccaggtctgtcagcaggccgagcacagcttcgctggaatgccatgtgggattatggatcagtttatttccctgatgggacagaagggacacgccctgctgattgactgtcgtagtctggaaacctctctggtgccattaagtgaccccaaattggctgttttgattactaacagtaatgtgaggcactcattggcctcctccgagtaccctgttagaaggcggcagtgcgaagaagttgccagagccctgggtaaggagtcccttagagaagtgcaattggaagagttagaagccgcccgcgatctggtgagcaaggaaggatttcgacgagcccggcatgtcgttggggagattcgaagaaccgctcaggctgcagccgcactgaggagaggagattatagggcattcggcagactcatggttgagtcacataggagccttcgagatgactatgaagtcagttgtccagaattagatcagctggtcgaggcagctctggcagtgcccggggtctacggcagccggatgacaggggggggcttcggcggttgtaccgtgactcttctggaggcctccgccgcccctcacgccatgagacatattcaggagcattacgggggcactgccaccttttatctatctcaagctgccgatggtgcaaaagttttgtgtttg

SEQ ID NO: 3138 - DNA, 1176 bp, Artificial Sequence
  derived and/or modified sequence
atggctgcactgcgacagccacaggtggccgaactcctcgcagaagcacgacgggcgttccgggaagaatttggggcagagcctgagctggcagtctcggctcctggaagagtcaaccttatcggggagcacaccgattacaaccaaggactggttcttcccatggcattggagctcatgactgtgctggtgggatcgccaagaaaggacggacttgtgagccttctgaccacttcagaaggcgcagacgaaccccaacggcttcagttcccacttcctactgcacagcgcagcctggagcctggcaccccaagatgggcaaactatgtcaaaggtgtgatacagtactacccagccgcacctctgcctgggttctcagcagtggtcgtgtcgtccgtacctcttggaggcggactttcaagctccgcctcccttgaagtggcaacgtacacctttcttcagcaactgtgtccagacagcggtaccatcgccgcaagagcccaggtgtgccagcaagccgaacattcatttgccggtatgccatgcggcatcatggatcagttcatatcactgatgggccaaaaaggtcatgccttgttgattgattgtcgaagccttgaaacttcgctggtgcccctttccgaccctaagttggccgtcctgattaccaactcgaacgtgcggcattcgctcgcatcttccgaataccccgtcagacgccggcagtgtgaggaagtggcaagggcactgggaaaggaaagccttagggaagtgcaactcgaagaactggaggcagcgagagatctggttagcaaggaaggattccgtcgcgcccgccacgtggtcggtgagattagacggaccgcgcaagcggcagcagcacttcggagaggcgattaccgcgccttcggacgtctcatggtggagtcccaccgctctctccgagacgattacgaagtctcttgcccagaattggaccagctggtggaagcagcgcttgccgtacctggagtgtacggttcccggatgaccggtggtggtttcggtggttgcactgtgacccttctggaagcctcagcggcgccgcacgccatgcggcacatccaggaacattacggaggcacggctactttttacctttcacaagctgccgatggagcgaaagtgctgtgtctt

SEQ ID NO: 3139 - DNA, 1176 bp, Artificial Sequence
  derived and/or modified sequence
atggccgccctgagacaaccacaggtggcggaactcctcgcggaggcacggcgcgccttccgggaggagtttggcgctgagcctgagctggcggtgtccgcccctggacgcgtgaaccttattggagaacatactgattacaatcaggggctcgttctccccatggcactcgagctgatgaccgttctggtcggctccccacgcaaggacggactggtgtcgttgcttaccacctcggagggagccgatgagccgcaaaggcttcagtttcccttgcctaccgcccaaagaagcctggagccggggactccacggtgggctaactacgtgaagggggtgattcagtattacccagcggcgccactgccgggcttctccgccgtcgtggtgtcatcagtgccactcggtggaggtttgagcagttccgcctcactcgaggtggcaacttacacttttctgcagcagctctgcccagattctggtactatcgcggccagggcccaggtatgccaacaagctgaacactcgttcgcaggaatgccttgcggcataatggaccagttcatcagcctcatggggcagaagggccacgctctgttgatcgactgtcgctccctggaaacgtcactcgtgcccctgagcgaccctaaactggcggtgctgatcactaattccaacgtgcggcatagcctggcgtcaagcgagtacccggtcaggagaagacaatgcgaagaagtggcccgcgcgctcggtaaagaatcactgagagaagtccagctggaagaactggaggcagcgagggacctcgtcagcaaggaagggttccggcgcgcaagacatgtggtgggtgaaattcgcagaaccgcccaggccgcggccgctctccgcaggggagattatagagcgttcggacgcctgatggtcgaatcacatcggtccctgcgcgacgactacgaggtgtcgtgcccagagttggaccaactggtggaggccgctttggccgtcccgggggtttacgggagccgtatgaccggcggtggattcggaggatgtactgtgactctgctcgaggcttcggcagccccacacgctatgcggcacatccaagagcactacggaggaaccgcgacgttctacctgagccaggcagcagacggtgcaaaagttctctgcctc

SEQ ID NO: 3140 - DNA, 1176 bp, Artificial Sequence
  derived and/or modified sequence
atggccgcactgaggcagccgcaggtagcggagctgctcgctgaagcacggagggcctttagggaggagttcggcgccgagccggaactagcagtctcagcccccgggagagtgaatctaattggagagcatacagattacaatcagggattagtgttgcccatggctctcgagcttatgacggtgctggtggggagtcctcgcaaagacggattggtctccctcctgacaaccagcgaaggggctgatgagccccaacgactgcaattccccttgcccactgcccaacggagcctcgagccgggaacgccccggtgggcaaactacgtaaagggtgtcatccaatactatcctgccgccccattgcccggtttcagcgctgtcgtagtcagctcagtgccccttggaggcgggctgagcagctcggcatcgctagaggtggccacttacacattcctccagcagttatgtccagattccggaaccattgcagcgcgcgcacaggtttgccagcaggcagaacacagcttcgctgggatgccatgtggcatcatggatcagttcataagcttaatggggcagaaaggacacgcgctgctaatagactgccgctctttagaaacatccctcgtgcccctctccgaccccaaattggccgtgctaatcaccaactcaaacgttcgccactccttagcttcttcagaataccccgttcgccggaggcagtgcgaggaagtggcacgggccctcgggaaggaatcactgcgtgaggtacaattggaggagctggaagcggccagagatctggtgagtaaagagggcttccgccgcgcgagacatgtggttggcgaaattagacggacagcccaggcagccgccgccttgagacggggggattatcgagccttcggccggcttatggtggagagccataggtccctcagagacgattacgaggtctcatgcccagaactggatcaactagtcgaggcagctctggccgtccccggtgtgtatggctccagaatgactggcggggggtttggtggctgcactgtgaccctgctcgaggcctctgcagcgccccacgccatgcggcatatccaggaacattatggtgggactgcaactttttatctcagccaggccgctgacggtgccaaggttctgtgctta

SEQ ID NO: 3141 - DNA, 1176 bp, Artificial Sequence
  derived and/or modified sequence
atggcagccctccggcagccccaagtcgcagaattgctcgccgaagctcggagggcctttcgtgaggagttcggcgccgaacctgaattagccgtgtctgcccccggccgcgtgaacctaataggtgagcatacggactacaatcagggtctcgtcttaccgatggccctggagttaatgacggtgctggttggcagcccgaggaaggacggcctggtatccctgctgacaactagtgagggagccgacgagccgcaacgtctgcagtttcctcttcccacggcacagcgcagcttagagcccggtacaccgcggtgggccaattacgtgaagggagtcatacagtactatccggccgcgccactgcctggattttccgccgtggtcgtgtcgtccgtccccttgggtggcggattgagttcgtcggctagcctggaagtcgcgacgtacaccttcttgcagcaactgtgtcccgacagcggcacgatcgctgcccgagcacaagtctgccaacaggcggagcattcatttgccggaatgccgtgcggcattatggaccagttcatttcccttatgggtcagaaaggacacgccttactgattgactgccgctctctagagaccagtctggttccattatccgatccaaagctggccgtgttaatcacgaattccaatgtgcggcactccctagcgtcgtcggagtacccggtgcgccgacgtcagtgtgaagaggtagccagagccttgggcaaggagtctctgagagaggtgcagttggaggagctagaggccgctcgcgacctggtctcgaaggaaggattccgcagggcccgtcacgtggtcggcgaaattcgccgcacagcgcaggcagcagcggctttgcggcggggagattatcgtgcgttcggccgtctgatggtcgaatcccataggagtttaagggacgactacgaggtgagctgccctgagttggatcagctggtagaggccgcgctggctgtgccgggtgtttatggttcccgcatgacgggtggaggctttggaggttgcactgtgaccttgttggaagccagcgctgccccccacgcgatgagacatatccaagagcactacggagggacagcgaccttctacctgtcccaagccgctgatggcgccaaggtgctgtgtctc

SEQ ID NO: 3142 - DNA, 1176 bp, Artificial Sequence
  derived and/or modified sequence
atggccgccctacggcagccccaggttgccgaactcctggcagaagcgcggagagcgttcagagaagagttcggtgcagagccagagctcgcggtctcggcccccggtcgggtaaatctgattggcgagcacacggactataaccagggtctggtgctgccaatggccttggaactgatgacagtgctggtgggctcaccacgcaaagacggactggtgtcgttgcttaccactagcgagggggctgacgaaccccagagactgcagttccccttgcctaccgcccaaagatccctagaacctggcacacctaggtgggcgaattatgtgaagggggtcattcaatactatccggccgcaccgctgcctggattcagcgccgtcgtagtgagcagtgttccactgggcggggggcttagttcatctgcgtctttagaggtcgctacctacaccttcctccagcagttgtgccccgattccggtaccattgctgctagagctcaggtctgccagcaggcagaacatagcttcgccggcatgccttgcggaatcatggatcagtttatcagcttaatggggcagaaagggcatgccctactgatagactgtagaagtctcgagacatcattggtgcccctgagcgatccaaagctcgctgttctcatcacaaacagtaatgtgaggcactcactggcttcctcagagtaccccgtcagaagacgccagtgcgaagaagtggcccgagccctaggcaaagagtccctgcgcgaggtgcaactggaggagctcgaggccgcacgcgacctcgtcagtaaggagggatttcgccgtgcacgacacgtggtgggcgagattcgaaggacagcccaggccgccgctgctttgcgccgcggcgactatagggctttcgggcgactgatggtggaatctcatcggagcctgcgggacgactatgaagtgtcttgcccagagctagatcagctagttgaggcagccctggctgtgcctggcgtgtacgggtccagaatgacgggcggtggcttcgggggttgcactgtgactttacttgaggctagtgccgcgccccacgccatgaggcacattcaggagcattacggcgggacggccaccttttacctgagccaggccgccgatggagctaaggtgctatgcctc

SEQ ID NO: 3143 - DNA, 1176 bp, Artificial Sequence
  derived and/or modified sequence
atggcagctttgagacaaccccaggttgcggagctgctggccgaagcaaggagagccttccgcgaggagtttggtgcagagcctgaattggctgttagtgctccaggaagagtgaacttgataggtgagcatacagactataaccagggactggtcctgcctatggccctggagctgatgaccgtcttggtgggtagccccaggaaggacggcttggttagtctgcttacaaccagtgagggtgcagatgagccacaacgcctgcaattccccctgccgaccgctcagaggagcctggaaccgggcactcccagatgggctaactacgtaaagggtgttatccagtactaccccgcggcccccctcccgggcttcagcgctgtggtcgtgagctcagtgccgctgggaggcggccttagcagctcagccagcctggaggtggcaacgtataccttcctgcagcagctgtgccctgacagcggtaccatagccgctagggctcaagtgtgtcagcaggctgaacacagcttcgctggaatgccttgtggcatcatggaccagttcatctccctgatgggacaaaaaggccatgctttgctcattgattgcaggtccttggaaacgtcactggtgcccctgtccgatcccaagctcgcagttttgatcaccaactctaacgtcaggcatagtctcgcaagttcagagtatccagtgcgcaggagacaatgcgaagaagtggccagagccctgggcaaggagagtctgagagaagtccagctggaagaactggaggccgccagggacctggtttccaaggagggcttcaggagagctaggcatgtggtgggagagattcgcagaactgcccaggccgctgccgcactcaggcgcggtgattaccgcgcctttggtagactgatggtggagagccacagatctcttagggacgattacgaggtgtcatgccctgagctggaccaactggtagaggcggccttggctgtgccaggtgtgtacggttcccgcatgactggcggaggattcggtggttgcacagtcacgctgctggaggcaagcgccgcaccacatgccatgaggcacatccaggagcattacggtggaacggctacattctacctgagccaagcagccgatggcgccaaagttctgtgtctt

SEQ ID NO: 3144 - DNA, 1176 bp, Artificial Sequence
  derived and/or modified sequence
atggctgcactccggcagccccaggtggctgagctgttggccgaggcaagaagggcatttagggaggagtttggagcagagccagagctcgccgtatctgcgccagggcgggtgaacttgatcggagagcacacagattataatcaaggcctagtactgcctatggccttggagctaatgacagtcctcgtgggaagtcctcggaaagacgggctcgtgtccttattaacgacatctgaaggcgctgacgaaccccagagacttcagtttccactgcccactgctcagagaagtctcgaacctggtacccctaggtgggcaaattacgtgaagggtgttattcaatactacccagccgcgcccttacctggcttttcggctgttgttgtgagctcggtgcccctgggtggcggcctgtcatcttccgcaagcttagaagttgctacgtacacctttctccagcagttgtgcccagactctggcactatcgccgcacgcgcacaagtgtgtcagcaggccgaacacagctttgccggtatgccctgcgggattatggatcagttcatctccctcatggggcagaaaggacatgccttgctaattgattgcaggtccctggagacttccctcgtgccactttctgacccgaaactcgccgttttgattactaattcaaatgtaagacatagtctggcaagctctgaataccccgtgcggcgcaggcagtgtgaagaggtggcccgggcccttggaaaggagtctttacgagaggtccagttggaagagctcgaagcagcaagggatctggtctccaaggagggctttagacgagctcgacacgttgtcggcgaaattaggaggacagcccaggctgctgcggcacttcgtcggggcgactatagggctttcggtcgcctgatggtcgaatcccataggtcgcttagggatgattacgaagtctcctgtccagaactcgatcagctcgttgaggcggcgctagctgtccccggggtttatggctccagaatgacagggggcggatttggcgggtgtaccgtcacattgctcgaagcttccgccgctccgcatgccatgagacatatccaagaacactatggtgggactgccactttttacctatctcaggctgccgatggcgcaaaagttttgtgcctg

SEQ ID NO: 3145 - DNA, 1176 bp, Artificial Sequence
  derived and/or modified sequence
atggccgcactccggcagcctcaagtcgccgagctcctggcggaagcgcgcagagccttccgggaagagtttggagccgaaccggaacttgcggtgtcagcccctggccgcgtgaatctcatcggtgagcacaccgactacaatcaagggctggtcctgcccatggcccttgagctgatgaccgtgctcgtcggatcgccacgcaaagacggcctggtttcgctgttgaccacctcggagggcgctgacgagccccagcgcctccagtttccactgccgacggcccagcgctcgttggaaccgggaactccgaggtgggctaattacgtgaagggagtgatccagtactacccagccgctcccctccctggattttcagcagttgtagtctcatcggtgccactcggtggcggactgagctcctcggcctcactggaagtggcaacgtacactttcctccaacagctgtgcccagattccggcaccatcgccgcgcgcgcccaggtctgtcagcaggctgagcattcgttcgccggcatgccatgcggaatcatggaccagtttatcagcctgatgggacaaaaagggcacgcgctgctcatcgattgccggtcgttggagacgtcgctggtcccgctgtcagatccgaagttggcggtgctgatcacgaactcaaacgttagacactcccttgcgagctcagagtaccccgtgaggcgaaggcaatgcgaagaagtggcccgcgccctgggaaaggagtccttgcgcgaagtgcaactcgaagaactggaggcagcccgggacctggtgtcgaaagagggattccgcagggcaaggcacgtggttggcgagatccgccggacggcccaggccgctgcggctctgagacgcggagactaccgagccttcggaagattgatggtggagtcccaccgctcactgagagacgactacgaggtgagctgcccagaactggatcaactggtggaggcggcgctggcggtgccgggagtgtacggatcgaggatgactggcggagggttcggcggatgtactgtcaccctgctcgaagcctctgctgctcctcacgccatgcgccacatccaagaacattacggcggaaccgcgaccttctatctttcgcaagctgcagacggagccaaggtgctgtgcctc

SEQ ID NO: 3146 - DNA, 1176 bp, Artificial Sequence
  derived and/or modified sequence
atggcagcgcttcgacagcctcaggtggctgagctactggcagaggcccgaagagccttcagggaggagttcggagccgaacctgagcttgctgtctccgccccaggccgagtcaatctgattggcgagcacaccgattacaaccagggattggtgctgccaatggccctggaactcatgacagtgctggtgggctccccccgcaaggacggcttagtgtctctcctcacgacatctgagggggccgatgagcctcaaaggctccagttcccactacccactgcccagaggtcactggagcccgggactcctcgatgggcaaactacgtcaaaggcgtgattcagtactacccggctgcccctctccctggcttttccgcagtggttgtgtcctcagtccctctgggggggggcctgtcatcctcagcaagcctggaggttgccacttacaccttcttgcagcaactgtgccccgatagtggcactatcgccgctcgagcacaggtttgtcagcaagccgagcattctttcgctggaatgccctgtggtattatggaccagttcatttctttgatgggtcagaaagggcatgccctgctgatagactgtagatctctggagaccagcctcgtaccactgagtgatcccaaactggcggttcttataaccaattctaacgtgcgacattcgcttgcaagctcagaatatcctgtgcgacgtaggcagtgcgaggaagtggctagggcactggggaaggagtctcttagggaagtccaactggaagaactggaggctgccagagacctggtgtcaaaggaggggttcagaagagccaggcacgtggtcggtgagattcggaggacagcacaggccgcagcagctcttcgtcggggcgactacagagcttttggccgtctgatggtggagagtcaccgatccctccgggacgactatgaagtgtcttgcccggaactagatcaactggtggaggcggctctcgcggtgcccggagtgtacggttcccgcatgaccggcggcgggttcgggggctgcactgtgaccctgctagaagccagcgccgcgccccacgctatgcgacatatacaagaacactacgggggaactgccacattttatttgagtcaagccgcagatggcgccaaagtcctttgtctc

SEQ ID NO: 3147 - DNA, 1176 bp, Artificial Sequence
  derived and/or modified sequence
atggctgccctcaggcagccccaggtagcagaactgttggcagaagcacggcgcgccttccgagaggagttcggcgccgaacccgagctggccgtgtccgcccccggacgagtgaacctgatcggcgaacatacagattataatcagggattggtcctgcctatggcactggagctcatgactgtcttggtgggctctccgcgcaaggatgggcttgtcagcttgctgactacctccgaaggagctgatgaacctcagagactgcagttccccctccccactgcgcagcgctcccttgagccgggcactccaagatgggcgaactatgtcaagggcgtaatccagtactaccccgcagcgcctctgcctggcttttccgccgtggtagtgtcctctgtccctcttggtggtggcctgagttcaagcgcgtccttggaagtcgcgacttacacctttctgcagcagctctgcccggacagcggcacgatcgctgctagggctcaggtgtgtcagcaggctgaacatagtttcgcgggcatgccatgcggtataatggaccaatttattagcctcatgggccagaaaggccacgcccttcttatcgactgccggtccttggagacttctctggtgccgcttagcgaccccaaacttgccgttcttataactaattcaaacgtgagacactcactcgcctcttccgagtaccccgtccggaggagacagtgcgaggaagtggccagggcccttggcaaggagtcactgcgggaggttcagctggaggagcttgaagcagctagggacctggtgtctaaggagggattcagacgcgcccgccatgtggtgggggaaatccggaggacagcccaagccgcagctgccctgaggagaggggattaccgggcgttcggtaggcttatggtggaaagccacagaagccttcgagatgactacgaggttagctgcccagagctggatcaactggttgaggcggcactggcagtccctggagtttacggaagtagaatgaccgggggaggttttggcggttgtaccgtgaccctgctcgaggcgtccgccgcacctcacgccatgcgccacatccaggagcattacggtggaaccgctactttctatctctctcaggcagccgacggtgccaaggtgctgtgtctg

SEQ ID NO: 3148 - DNA, 1176 bp, Artificial Sequence
  derived and/or modified sequence
atggccgcactgcggcagccacaagtggctgaactgctggcggaggccagacgggcgtttcgagaggagtttggagctgagcctgagttggctgtttccgcgccgggtagagtgaatctcatcggagaacacaccgactacaaccaaggccttgtcttacccatggcactggaactgatgactgtgctggttgggtctccgagaaaagacggcttagttagccttcttaccacttccgagggcgcagatgagccgcagcggctgcagttcccattgcctacagcccagcgcagcttggaaccaggcacaccaaggtgggccaattacgtgaaaggggttattcagtactatcctgcagcaccactgccaggattctccgccgtcgttgtctccagcgtccccctggggggggggctgagctcgagcgcctctctggaagtggccacatacacctttcttcaacagctctgtccagattcaggaacgatcgccgcgcgggcccaggtgtgccagcaagcggagcatagtttcgccggtatgccatgcgggatcatggatcaattcatctccctgatgggccagaagggccacgctttgctgattgattgcaggagccttgaaacctccctggtgccgttgtcagaccctaaactggccgtcctgattactaatagcaacgttcgccacagcctcgctagcagtgaatatcctgtaagacggagacagtgtgaagaggttgccagggccctgggaaaagagagtctgcgggaagtgcaactggaagagttagaggccgctcgggatctcgtaagtaaagaaggctttcgccgagccaggcatgttgttggagagatccggcgtacggcccaggctgccgcagctctgaggcgcggcgactatagggcttttggacggctgatggtggaatcccatcgaagcctgagggatgattatgaagtgtcttgtccagaattggaccaactggttgaggccgccctggctgtccctggagtttatggaagtcgtatgactggcggaggtttcggcggctgtaccgtgaccctccttgaagctagtgccgccccacatgctatgcgccacatacaggaacattacggtggcacagccacgttctatctgtctcaagctgctgacggagccaaagtcctgtgtctg

SEQ ID NO: 3149 - DNA, 1176 bp, Artificial Sequence
  derived and/or modified sequence
atggccgcactgcgccagccgcaggttgctgagctcctcgccgaggcccgcagagcctttcgggaggagtttggcgctgaaccggaacttgcggtgtcagcccccgggcgtgtgaatctcatcggggagcacacagattacaatcagggcctggttctgccaatggcactagagctcatgacagttttggtcgggtcaccgagaaaagacgggctggtgagcctgctgacaactagtgaaggtgcagatgaaccgcagcggctacagttccccttgcccacagcacagagaagcctggaacccggcacaccccggtgggccaactacgtcaaaggggtcattcagtattatcctgccgccccactccccggtttctcagccgttgttgtttccagcgtaccacttggcggaggcctttcttcatccgctagtcttgaggtggccacatacactttcttgcaacagttgtgcccagactccggaacaatcgcggccagggctcaggtatgtcagcaggcagaacactcattcgccggtatgccctgtggtattatggaccagttcatcagtttgatgggtcagaagggccacgcgctgctcatcgactgtcgttctcttgaaacatcactggtgcctttgagcgacccgaagctagctgtgcttattacgaattctaacgtccgccactccctggcatcgagcgaataccccgtccggagacggcagtgcgaagaggtggcccgcgccctggggaaggaatcgctgcgcgaagtgcagctcgaggagttagaagcagctagagatttggtctccaaggagggttttcgtcgcgctcggcacgtcgtgggggaaattaggcggacagcgcaagccgctgccgcattgcggcgaggtgattatcgagcatttgggcgattgatggtagagtctcatagatcactcagagacgattatgaagtgagttgtcctgagcttgaccagctggtagaagctgcccttgcagtccccggagtgtacgggtccaggatgactggaggggggtttggaggctgcacagtgaccctcctggaggcaagcgcagccccacatgctatgcgacacatacaggagcactatggaggtaccgccaccttttacctgagtcaggccgccgatggcgccaaagtcctgtgtctg

SEQ ID NO: 3150 - DNA, 1176 bp, Artificial Sequence
  derived and/or modified sequence
atggcagcactgcggcagccacaagtcgccgagctccttgcggaggcgaggcgtgccttcagagaagagtttggtgcagaaccggaacttgccgtgtcggctcctggcagggtgaacttgattggagaacacaccgactacaatcagggtcttgtgctccccatggccctggagttgatgactgtgttggtcggtagcccaaggaaagacggtctggtgagcctgctcaccactagtgagggtgcagatgaaccacagaggctgcaattcccgcttcctaccgcacagcgaagcctcgaacccggcacgccaaggtgggctaactacgttaagggagtgattcaatactatcctgcagcccctctgcctggtttttcagcggtcgttgtctcctcagtgccacttggtggaggcctgtcgtcctcggcatcgctggaagtggcaacttacacctttttgcaacagctgtgccccgatagcggcaccatcgcagcgcgggcacaggtctgccaacaagcagagcattcgttcgcgggtatgccatgcggaattatggatcaattcatttcactgatgggccagaagggacacgctcttcttattgactgtcgatcccttgaaacctcccttgtgcctctgtccgatccaaaactggcggtccttattactaacagcaacgtgcgccattcactggcatccagcgaatatccagtgcgtcgacgccagtgtgaagaagtggcccgcgcattgggaaaggaatccttgcgagaggtccaactggaggaacttgaagctgcaagggatctcgtgtctaaagagggctttagaagggcacggcatgttgtgggagaaatccgccgcacggcacaagcagcagcagccctcagacggggagattatcgagccttcggacgtcttatggtggagtcgcatagatcactcagagacgattatgaagtgagctgtccagaactcgaccaactggtggaggcagccctggcagttccgggggtctacggatcccgaatgaccggtggaggattcggtggatgcaccgtgactctgctggaagcatcggcagcgccgcatgcaatgaggcacattcaagagcactacggtggaactgcaaccttttacctgagccaggctgcggacggtgcaaaggtgctgtgtctg

SEQ ID NO: 3151 - DNA, 1176 bp, Artificial Sequence
  derived and/or modified sequence
atggctgcactgcggcagccacaggtggcagagctcctcgctgaggccagaagagcattccgggaggaattcggagcggaaccggaactcgccgtctccgcgcctgggagagtcaacttgatcggtgagcacaccgactataaccagggactggtgctgccgatggcacttgagctgatgactgtgttggtcggctcaccaaggaaagacggactcgtgtcactcctgactacttcagaaggagcagacgaaccacaacggctgcaattcccactccccaccgcccagcggtcactggagcctggtacgccacggtgggcaaactacgtcaagggtgtgatccaatactaccctgccgcgccattgccggggttctcggccgtcgtggtgtcatccgtgccgctgggaggcggactctcgagctccgcctccctggaagtggcgacctacactttccttcaacaactctgtccggattcaggaaccatcgcggcccgggcacaggtgtgccaacaggccgagcactcgtttgcgggaatgccttgtggaatcatggatcagttcatctcactgatgggacagaagggccacgcgttgctcatcgattgccgctcgctcgagacttccctggtgcctctgagcgacccgaagctggcagtgctgatcaccaacagcaatgtccggcactcgctcgcatcaagcgagtaccctgttcgccgccggcagtgcgaggaagttgcccgggcgctggggaaggaatcgcttcgcgaagtgcaactggaagagctggaagccgcccgcgatctggtcagcaaagagggcttccgtcgcgcgcggcacgtcgtgggagaaattaggcgcaccgctcaggctgctgctgccctcaggcggggagactacagagccttcggccggcttatggtggaaagccacaggtcgctgcgggatgattacgaggtgtcgtgcccagagctggaccagctggtggaagccgcacttgccgtcccgggagtctacggatcccggatgacgggaggcggatttggaggatgtactgtcactctgctcgaagcgtcggctgcaccgcatgctatgaggcatatccaggaacactacggaggcactgcaactttctacctctcccaagcagcagacggggcaaaagtgctgtgtctg

SEQ ID NO: 3152 - DNA, 1176 bp, Artificial Sequence
  derived and/or modified sequence
atggctgccctgaggcaaccgcaggtggccgaactgctggccgaagctcgtcgcgcgttcagggaagagttcggggcagagccggaactggcggtgagtgcgcctggacgggtgaacctgatcggcgagcacaccgattacaaccaggggttggtcctgcccatggccctcgaactgatgactgtcctggtgggaagcccgcggaaagacggactcgtgagccttctcaccacttccgaaggcgccgatgagcctcagcgccttcagttcccgttgccaaccgcgcaacgcagcctcgaacctggaaccccgcggtgggcaaactacgtgaagggagtgattcagtactatccggcggcgccgctcccaggatttagcgccgtcgttgtaagctcggtgccactcggaggcggcctcagcagcagcgcgtcactggaagtggctacgtacactttcctgcagcagctttgccccgactccggtaccatcgccgccagggcccaagtgtgccaacaggcggaacactcatttgctggtatgccgtgtgggatcatggaccagtttatctcgctcatgggacagaaaggccacgcactgctcatcgactgccgttcactcgaaaccagcctggtgccactcagcgatcccaagctcgcggtgctgattactaactcgaatgtgcgccactcgctggcatccagcgaatacccggtgcgccgccgccaatgcgaggaagtcgcgagagcactcggaaaagaatcactgcgcgaggtgcagcttgaggagctggaagcggccagagatttggtcagcaaggaaggattcagaagggctcggcacgtggtgggagaaatcagacgcacggcgcaagccgcggccgcactgaggcgcggcgattaccgggccttcggacgcctcatggtggagtcccacaggtccctgagagacgactacgaggtgtcctgtcctgaactcgatcagctggtggaagccgcactcgcggtgccgggagtgtacggttcgaggatgaccggaggtggattcggaggatgcaccgtgactcttttggaagctagtgctgctccgcatgccatgcgccatattcaggagcattacggtggaactgcaaccttttacttgtcgcaagctgccgatggagctaaggtcctgtgcttg

SEQ ID NO: 3153 - DNA, 1176 bp, Artificial Sequence
  derived and/or modified sequence
atggccgccttgaggcagccacaggtggctgaactgctcgccgaagcgcggcgcgcctttcgggaggagttcggagccgagccggagctggcagtgtcagcgccgggaagggtgaatctgattggagaacacaccgattacaaccagggactcgtgctcccgatggcgctggagctcatgactgtcctcgttggatcgccgcgaaaagatggattggtgtcgctgcttaccacttcagaaggagcggatgaaccacaacgcctgcagtttccgcttccaaccgcacaacggtccctggaacccggcacccctcgctgggccaactacgtcaaaggcgtcatacagtattacccagcggcccccctgcccgggttctccgccgtggtggtttcgagcgttccactgggaggaggactctcttcgtccgcatccttggaggtcgccacctacactttccttcagcagctgtgccctgactcaggcaccattgctgctagagcccaagtgtgtcagcaggccgaacattcgttcgcgggcatgccgtgcggcatcatggaccagttcatctcactgatggggcaaaaagggcatgcacttttgatcgactgcagaagccttgagacgtctctggtcccgctgtcggaccctaagttggcggtcttgatcactaattcgaacgtgagacactccctcgcatcctcagaatatcctgtccgtaggcggcaatgcgaagaggtcgctcgggcgttgggaaaggagagcctccgggaagtgcagctggaggaactcgaagcagccagagatctcgtttcgaaggagggattccgtagagcacgccacgtcgtgggtgaaatccggcggactgctcaagcggccgccgccctccggagaggtgactacagagcctttgggcgccttatggtggaaagccaccggtcactgagagacgactacgaagtctcgtgtccggagctggatcagctggtcgaagcggccctggcagtgccgggagtgtacggctcgcggatgactggagggggtttcggcggatgcacggtcacgctcctcgaggcatccgccgcgcctcatgctatgcggcacatccaggaacattacggcggcaccgccacgttttacctcagccaggctgcagacggtgctaaggtcctgtgcctc

SEQ ID NO: 3154 - DNA, 1176 bp, Artificial Sequence
  derived and/or modified sequence
atggcagcgctccgccagcctcaagtggcggagctgctcgccgaagcacgccgggcgtttcgagaagaatttggggcagaacccgaactggccgtgtcggctccaggacgcgtaaacctgattggggagcataccgattacaatcaaggactcgttcttcccatggcccttgagctgatgaccgtgctggtgggcagcccaaggaaggacgggcttgtgagcctgcttaccacctcagagggagcagatgagcctcaacggctccagttccctcttcctacggcacaacgctcgctggaaccaggcaccccacgctgggcaaactacgtgaagggtgtcattcaatactaccctgcagcaccacttcctggcttctcggcagtcgtggtgtcaagcgtgccacttggcggaggactgtcatcaagcgccagtttggaagtggccacctacacctttctccaacagctgtgtcccgactccggcactattgcagcccgggcacaggtgtgtcaacaagcagaacatagcttcgctggtatgccctgcggtataatggaccagtttatctccttgatggggcaaaaggggcatgcactgttgattgactgtagaagcctcgaaacttcgcttgtgcctctttccgatccgaagctcgctgtgctcattaccaactccaatgtgcggcattcgctggcaagctccgaataccctgtccggagacgccagtgtgaggaagtcgctagagcgctgggaaaggaaagccttcgggaagtgcagctcgaagaactggaggcagcacgtgatctggtgagcaaagagggttttcgcagagcaagacatgtggtgggcgagattcgtcgtacggcccaggcagccgcagcccttcgacgcggggattaccgcgcctttggacggctgatggtcgaaagccatagaagccttcgagatgactacgaggtgtcatgtcctgagcttgatcagctcgtggaagcagcccttgcggtgcccggcgtgtacggctccaggatgactggaggaggttttggaggttgtactgtgactctgctggaagcgtcggcggcacctcatgcgatgagacacatccaggaacattacggaggcaccgccacgttttacctcagccaggccgcggatggagcaaaggtgctctgcctt

SEQ ID NO: 3155 - DNA, 1176 bp, Artificial Sequence
  derived and/or modified sequence
atggctgccctgaggcaaccgcaagtggcagagctcttggccgaggcgagacgggccttcagagaggagttcggcgctgaacccgagctcgcagtgtcggccccgggtcgcgtcaatctgataggcgagcatactgactacaaccaaggattggtgcttccgatggccttggaacttatgactgtacttgtggggtccccgaggaaagacggactcgtgtccctgcttactaccagcgaaggggcagacgaaccgcagagactccaatttccgctcccaaccgctcaacgatcactggagcccggcacgcctagatgggcaaactatgtgaaaggagtcatccagtactacccggcggcaccgctgccaggattttccgccgttgtcgtgtcatctgtgcccctgggtggcgggctgtcgagctccgcatccctggaagtagccacctataccttcctgcaacagctctgccccgactcaggcaccatcgccgcccgcgctcaggtctgccagcaggcggagcactctttcgcaggaatgccatgcggcattatggatcagttcatctcactgatgggtcaaaagggccatgccctgctgatcgactgccgctcgctggaaacttcactcgttccgttgtctgaccccaagttggctgtgctcatcaccaattccaacgttagacacagcctggcaagcagtgaatacccagtgagacggaggcagtgcgaagaagtcgcccgggctttgggaaaggaatccctcagagaagtgcagctcgaagagctggaagccgcccgcgatctggtgtccaaggaaggttttcggagagcgcggcacgtggtcggagagattcgcaggactgctcaggccgcggccgcgctgcgcagaggagattaccgagcgttcggtcgcctgatggtggaatcacatagatcactcagggatgattacgaagtttcgtgtccagaactggatcaactggtggaggccgccctggcagtgccaggcgtctacggatcgaggatgactggcggagggtttggagggtgtaccgtgacgctgctggaggcctcggctgcacctcacgccatgcgccacatccaagagcattacggaggaacggcaaccttctacctctcccaggcagcggacggagccaaagtgctgtgtctc

SEQ ID NO: 3156 - DNA, 1176 bp, Artificial Sequence
  derived and/or modified sequence
atggcagcgctgcgtcaaccgcaagtggctgaactgcttgccgaggcccggagggcctttagagaagaatttggtgcggaaccagagctcgcagtgtcagcacctggtagggtcaacctgataggggagcacactgactacaaccaaggtttggtgctgccaatggcactcgaattgatgaccgtccttgtgggatccccacgtaaagacggacttgtctcccttctgacgaccagcgaaggagcggatgagccccagaggctccagtttcccttgcccaccgcacagcggtcacttgaaccgggaacccccagatgggcaaactacgtcaagggagtcatacaatactacccggcagcacccctgccaggatttagcgcggtggtcgtgtcgagcgtccctctgggcggcgggctttcgtcctcagcatctctcgaagtggccacctacacgttcctgcagcagctttgtcctgactcaggaacgattgcagcgagggcacaggtgtgccaacaagcagaacactcattcgcagggatgccttgtggaattatggatcaattcatctccctgatggggcagaagggccatgctcttctgattgattgtagatcgctggagacttcgctcgtgccgctctcggaccctaagctggcggtgctcatcaccaattccaacgtgcggcatagccttgcctcctcggaatacccggtgagacgccgccagtgcgaagaagtggcaagagcactgggtaaagagtcactgcgcgaggtccagctcgaagaactcgaagccgctcgcgacctcgtctcaaaggagggttttcggcgagcgcgccatgtcgtgggtgagattcggaggacggcacaagccgcagccgcgttgagacgtggagactatcgggcctttggacgtctcatggtcgagtcacatcggagcctgagagacgattacgaggtgtcgtgcccagagctcgatcagcttgttgaagcagcactcgccgtcccgggcgtgtacggtagccggatgacgggtgggggctttggaggctgtaccgttactctgctcgaagcatccgcagctccacacgccatgaggcatatccaggaacattatgggggtactgccactttctacctctctcaggcagcggacggcgccaaagtgctgtgcctt

SEQ ID NO: 3157 - DNA, 1176 bp, Artificial Sequence
  derived and/or modified sequence
atggcagctctgagacaacctcaggtggcagaactgcttgctgaggcccggagagccttccgcgaggaattcggagcagaaccggagctggctgtgtctgcaccgggacgcgtaaatctgatcggcgagcacaccgactacaatcaaggcctcgtgctcccgatggccctcgaactcatgactgtgttggtcggttcccccaggaaagacggcctggtgagcctgctgaccacgagcgaaggagcggatgaaccgcaaagacttcagttcccgctgccaaccgcccaacggtccctcgaaccaggaacgccgcgctgggcgaactacgtgaagggagtgattcaatactaccctgcagcacctctcccgggcttctccgcagtggtggtttcgtcggtccctctgggcggtggactgtcgtccagcgcctcactcgaggtcgcaacttacacgttcctgcagcagctctgcccagatagcggcactatcgcagcgcgcgcccaggtttgccagcaggccgaacattcgttcgcaggcatgccgtgcggtataatggaccagtttatcagcctgatgggacaaaaggggcatgccttgcttatcgactgccggtccctggaaaccagtctggtgcccctctcagatcccaaacttgccgtcttgatcactaactccaacgtgcggcactcgttggcatcgtccgagtaccccgtgcgaaggaggcagtgtgaggaagttgctagggccttgggaaaggagtcactgcgcgaggtacaactggaggaactggaagcggcccgcgacctcgtgtcaaaggagggctttagaagagcacggcacgtggtaggggaaatcagacgtactgctcaggcggcagccgcccttcgccgtggcgactacagagcatttggacgactcatggtggagtcccatcggtcgctccgcgatgactacgaagtgtcgtgtccggaactggatcaattggtggaggccgccctcgccgtcccaggggtgtatggatcgcggatgaccggaggcggcttcggcggatgcactgtcaccctgctggaagcatctgctgccccacatgcgatgcgccacatccaggaacactacggaggtactgccactttctacctgtctcaggcagcggatggagccaaggtcctgtgcctt

SEQ ID NO: 3158 - DNA, 1176 bp, Artificial Sequence
  derived and/or modified sequence
atggctgccttgagacagcctcaggtggccgaactcttagcagaagcccgtcgagcctttagggaagaatttggggctgagcccgaactggccgtcagtgcacctggacgggtgaatttaatcggggaacacaccgactacaaccagggtctggtgcttcccatggcactagaattgatgacggtgctggtggggagtccaaggaaggacggcctggtttcactgttgaccactagcgaaggagcagatgagcctcagaggttacagtttccgctccctactgcgcagagatctctcgaacctggcactcccagatgggcaaactacgtaaagggagtgattcagtattatcccgccgctcccctgcccggctttagtgctgtggttgtttctagcgtgcccctgggtggaggattatccagtagtgcatccttggaggtcgcgacatacacttttctgcaacagctctgcccagatagcgggacgattgcggctagggctcaagtgtgtcagcaggccgagcactcctttgccgggatgccctgtggaattatggatcagtttatttccctgatggggcagaagggtcacgccctgctgattgattgccgatccctggagacatccctggtgcctctttctgatccaaagctcgcagtgctgatcactaattctaatgtccgtcatagcctggcctccagcgaataccctgtgcgaaggagacagtgtgaggaggtcgcgcgagccctcgggaaagagtctctccgggaagtgcagctggaggaactagaggctgcaagagatctggtgtccaaggagggttttcgtcgagcccgccacgtggtgggagagatccgcaggacagcacaagcagccgccgccctgaggcgaggagattatagagcttttggccggctcatggttgagtctcatcgctctctgcgggatgattacgaagtttcatgtcccgagctggaccagctcgtggaggcggctctggccgtgccgggcgtctacggatcacggatgaccggaggtggctttggcggctgtaccgtcacactgcttgaggccagcgcagcccctcatgccatgagacatattcaggaacactatggtggtactgcaactttttacctgagtcaagctgcggacggcgctaaagtgttgtgccta

SEQ ID NO: 3159 - DNA, 1176 bp, Artificial Sequence
  derived and/or modified sequence
atggctgcgctgcgccagccacaggtggccgaactccttgcagaagcccgcagagccttccgggaagaatttggagctgagcccgagctggcagtgtcagcgccgggacgcgttaatctcattggagagcacaccgactataatcagggactggtgctgccgatggccctcgaactcatgaccgtcctggtgggttcgccacgcaaggacggacttgtgtctctcctgactacttcggagggagcagacgagccacaacgcctgcagttccccttgcctaccgcccaaaggtccttggaacctgggaccccgcggtgggcaaactacgtcaagggcgtgatccaatactacccggctgcacctctgccgggattctcggctgtggtggtgtcgagcgtcccgcttggcggtggactcagctcctcggcgagcttggaggtggccacttacactttcctccagcagctctgcccagactcaggcaccattgccgcgcgcgcccaggtgtgtcagcaggccgaacacagctttgcggggatgccgtgcgggatcatggaccagttcatctccctgatgggtcagaagggccatgcgctgctgattgattgcaggtcgctcgaaacttcacttgtgccgctcagcgacccaaaacttgcggtgctgatcaccaacagcaacgttaggcattccctcgcatcgtcggaatacccggtgcggcggcgtcaatgtgaagaggttgcccgcgccctcggaaaggagtccctgcgtgaggtccagcttgaagaattggaagcggcccgcgatttggtgtctaaggaaggattccgtagagcccggcatgtggtgggggaaatccggagaaccgcgcaggccgcggcagccctgcgacgaggggactaccgcgccttcggccggcttatggtcgagtcccataggagcttgcgggatgactacgaggtgtcatgccccgagctggatcaacttgtggaagcagctctggcggtccctggggtctacgggtcacggatgacgggaggaggatttggtggctgcacggtcactctgttggaggcatcagccgctccccacgccatgagacacattcaagaacactacgggggcaccgcgacgttctatctgtcccaagcggcagatggagccaaagtcctgtgcctg

SEQ ID NO: 3160 - DNA, 1176 bp, Artificial Sequence
  derived and/or modified sequence
atggcagcattgcggcagccacaggtggcagagctgttggccgaggccaggcgggccttccgtgaggagttcggtgcagagcctgagctggctgtttccgctcctggtagggttaatctcattggggagcatactgactataatcaggggctcgtgcttcccatggccctggagctgatgactgtgttagtaggctccccccgcaaagacgggttggtgagcctcctgaccacctccgagggcgccgatgaaccgcagcgccttcagttcccactccctactgcccagcgcagcctagagcctggtaccccccgctgggccaactatgtaaagggcgttatccagtattacccagccgcgcccctgcccggtttctcagcagttgtggtctccagcgtgcccttgggggggggcctctccagctcagcctccctcgaagtagccacttacacctttctccaacaactgtgtcccgatagcggaaccatagccgctagagctcaggtgtgccaacaagccgagcatagtttcgccgggatgccatgcggtatcatggatcaatttatctctctgatggggcagaagggccacgcgttgctaattgattgccgtagtctcgaaacgtcactcgtcccactgtcggatcccaagctggccgtgctcatcacaaatagcaatgtcaggcattccttggctagttccgagtacccagtacgcagaaggcagtgcgaggaggtggccagggccttggggaaagagagtctgcgggaagtgcagctggaagagttagaagccgcacgagatttggtgtccaaagagggctttagaagggcccgacatgttgtgggggagatccgcaggactgcacaggctgcagccgctttgaggcgcggcgattacagagcatttggcaggctcatggtagagagccaccgcagccttcgagacgactacgaagtgtcctgccccgagttggaccagctggtggaagccgccctggcggtcccaggcgtttatggctcacgtatgacgggtggtggatttgggggctgcaccgtcacacttttggaagcctctgctgctcctcatgcgatgcgccacattcaggagcattatggagggaccgccacattctatttgagtcaggcggctgatggggccaaggtcctgtgctta

SEQ ID NO: 3161 - DNA, 1176 bp, Artificial Sequence
  derived and/or modified sequence
atggctgctctaagacagccacaggtagccgagcttttggcggaggccaggcgggcttttcgggaggagtttggcgcggaacctgagctcgcggtgtccgcgcctggccgcgtgaatcttattggtgagcacactgactacaatcagggcctggttttgccaatggctttagaactgatgacagtgttagttggctcaccacgaaaggatggacttgtgtctctgctgactacgtccgagggcgctgatgagcctcagcgcttgcagttccctctacctaccgctcagagatcattagaacctggcactccgcgttgggctaactatgtgaagggggtcattcaatattacccggctgcacccctccccggattctcggcagtggtggtgtcttctgtgcccctcgggggtggattgtcatcatctgctagtttggaagtcgccacctacacttttttgcaacagctgtgccccgacagcggaacaatagctgcccgagctcaggtatgtcaacaggccgagcactccttcgcaggcatgccgtgcgggatcatggaccaatttatctcgcttatgggccagaagggacatgccctactgatcgactgccgctctctcgagacatccttagttcccttatctgacccaaagcttgctgtgctcattaccaacagtaatgtccggcactcactggcttcctcagagtaccccgtgcgccgccgtcagtgtgaagaagtggctcgtgccttgggaaaggagagcttacgcgaggtgcagctggaggagttggaggctgcacgagatctggtgagtaaggagggcttcaggcgggctcgccatgttgtgggtgagattagacggacagcgcaggccgcagcagccctcagaaggggagattacagagccttcgggagactgatggtggaaagccaccggtcacttagagacgattacgaggtctcttgcccggagctcgatcagctggtggaggcggcgctagctgtgcctggagtctacggctctcggatgaccggggggggcttcggtggctgcaccgtgacgctcctggaagccagtgcggccccccacgctatgagacacatccaggagcactatggcggaaccgccacattttaccttagccaggcagccgatggagccaaggtgctctgcctg

SEQ ID NO: 3162 - DNA, 1176 bp, Artificial Sequence
  derived and/or modified sequence
atggctgctttacgacaaccacaagttgcagaacttcttgctgaagcaagaagagctttcagagaagaattcggagctgaacctgaacttgctgttagtgcaccaggaagagtaaatttaataggtgaacatacagattataatcaaggtttggttttaccaatggctttagaacttatgacagttttagttggaagtccaagaaaagatggacttgtttcactattaactacttcagaaggtgctgatgaaccacaaagacttcaatttccattaccaactgctcaaagatctcttgaacctggaactccacgttgggccaattacgttaaaggtgttattcaatattacccagctgcacctcttccaggatttagtgctgttgttgtatcaagtgttccattaggaggaggtttaagttcgagtgcatctttagaagttgcaacttatacatttcttcaacaattgtgtccagattcaggaactattgccgctagagctcaagtttgtcaacaagcagaacatagttttgcaggaatgccatgtggaattatggatcaatttattagtttaatgggacaaaaaggacatgcattattgatagattgtagaagtcttgaaacatcattagtcccactttctgatccaaagttagcagttttaataactaattccaatgtaaggcattcattagcatcatctgaatacccagttagaagaagacaatgtgaagaagttgctcgagcattgggaaaagaaagtttacgagaagttcaacttgaagaattagaagcagctagagatttagtttcaaaagaaggatttagacgagctagacatgttgttggagaaatacgtagaacagcacaagcagcagctgcattaagacgaggagattatcgagcatttgggagacttatggtcgaatcacatagaagtcttagagatgattatgaagttagttgtccagaattagatcaattagttgaagctgctcttgccgttccaggagtctatggatcaagaatgactggtggagggtttggaggttgtactgttacccttttagaagcttcagctgcaccacatgcaatgaggcacattcaagaacattatggaggaacagctaccttctatttaagtcaagcagcagatggagcaaaagtattatgtctt

SEQ ID NO: 3163 - DNA, 1176 bp, Artificial Sequence
  derived and/or modified sequence
atggccgcactccgccaaccgcaggtcgccgagctcctggcagaggcacgaagggccttccgcgaggagttcggtgcagaaccggagctggcggtgtcagctcccggaagagtcaacctcatcggggaacataccgattacaaccagggcttggtgttgccaatggctctggagttgatgaccgtgctcgtcggatcaccgcggaaagatggacttgtgagcctcctgaccacgtcggagggtgccgacgaaccgcaacgtctgcagttcccactcccaactgcccaacggtccctggagcctggaacgccacggtgggccaactacgtcaagggagtgatccagtactaccctgcagcccccctcccgggattttcggcagtggtggtgtcgtcggtcccgttgggcggcgggctttcgtcctccgcatcgctggaggtggcaacgtacactttcctccagcagctctgcccggactcgggtaccatcgcggcgagagcacaggtgtgccaacaagccgagcactcgtttgcgggaatgccgtgtggtattatggaccaattcatttcactcatgggacagaagggacatgcattgctgatcgactgcaggtcgctggaaacttcacttgtgcctttgtcggacccgaagttggcggtcctgatcaccaactccaacgtgaggcactccctcgctagcagcgaatacccggtgcggagacgccagtgcgaagaagtcgcgcgggccctgggcaaggaatcactgcgcgaagttcaacttgaagagcttgaggcagcacgcgatcttgtgtcgaaggagggattcagacgcgcgagacacgtggtgggcgaaatccggcggactgctcaggccgcggccgcgctgcggcgcggggattaccgggcattcggtagactcatggtcgaatcgcatcgatctctcagagacgattatgaagtgtcatgccctgaactcgatcagctcgtggaggccgcgttggccgtcccgggagtgtacggttcgaggatgaccggcggtggattcggaggatgcactgtcaccctgctggaagcctcggcagccccgcatgccatgcggcatatccaggaacattacggcggaaccgctactttctacctctcacaagcagcggacggagcaaaggtcctgtgcctg

SEQ ID NO: 3164 - DNA, 1176 bp, Artificial Sequence
  derived and/or modified sequence
atggcagcccttaggcagccccaggtggcagagctgctggcagaagcccggcgcgcatttagggaagaatttggcgcagaacccgagctggctgtgtccgcaccaggtcgtgtgaatttgatcggggaacatactgattacaaccaagggctggtgctgccgatggcactcgaacttatgaccgtccttgtgggatcacctcggaaggacggccttgtgtcactgcttactaccagcgaaggcgcagatgaaccacaacggctgcagttccctcttccaaccgcacaacggagccttgagcctgggacccctaggtgggcaaactacgtgaagggtgtgattcagtattatcccgcagcacctctgcctgggtttagcgcagtggttgtgtcatccgtccccctgggcgggggactttcgagctcggcctcgctggaagtggccacctatacctttctccaacaattgtgccctgattccggtactatagcagcgagagcacaagtgtgtcaacaagccgaacatagctttgcggggatgccttgcggcatcatggaccagtttatctcgctcatgggacaaaaaggtcatgcgctccttattgattgtaggtcccttgaaacctcgctggtgccattgagcgatccaaaacttgcagtcctcataaccaactcaaatgtgcgccatagccttgcctcctcggagtaccctgtccgtagacgccaatgtgaagaagtcgcaagagcactcggtaaggagtcgcttcgcgaggtgcaactggaagaactcgaagccgcgagggatctcgtctctaaggaggggtttcgccgggccagacacgtggtgggtgaaattagacgcaccgcacaagcggccgcggcacttagaagaggcgactacagggcatttggaaggctgatggtggaatcacacagatctctgagggacgattacgaagtgtcgtgtcctgagctggaccagcttgtcgaggcagcccttgcagtcccaggcgtgtacggatcgagaatgaccggaggaggttttggcggctgcactgtgacccttcttgaagcctccgcagcaccccatgcaatgagacacattcaagagcattacggaggaaccgccactttctacctttcccaagccgctgatggagcaaaggtgctttgtctt

SEQ ID NO: 3165 - DNA, 1176 bp, Artificial Sequence
  derived and/or modified sequence
atggccgcacttcggcaaccgcaagtcgccgagcttctggccgaagcgcggcgggcttttcgcgaagagttcggagctgagcctgaactcgcggtgtcggctccgggccgcgtgaacctgatcggagaacatactgactacaatcaggggctcgtgcttccgatggccctggaactcatgaccgtgctggtgggctcaccgagaaaggacgggctggtgtccctcctgactacctctgagggagcggacgagccgcagaggctgcaatttcctctgccgacggcccaacgctcactggaacctgggactccgagatgggctaactacgtcaagggtgtgatccagtactaccccgcagcaccactcccgggcttctccgcggtggtcgtgtcctcggtgccgctcgggggcgggctgtcgtcgtcagccagcctcgaagtggctacttatactttcctccagcagctgtgtcctgattcaggaaccatcgcagctcgggcgcaagtgtgccagcaggcagaacattcatttgccggtatgccttgcgggatcatggaccagttcatcagcctgatgggacagaaagggcacgcgctgttgatcgactgtagaagtcttgagacttcgctcgtgcctctctccgacccgaagttggccgtgttgatcaccaatagcaacgtccgccacagccttgcttcgtcagagtacccagtccgacgccgccaatgcgaagaggtggcaagggcactcggtaaagaaagtttgcgagaggtccagctcgaagaactcgaagccgctcgcgacctcgtgtcgaaagaaggcttcaggagagcccggcatgtggtgggagagattcggcgcaccgcccaggcggccgcggcgctgcggcgaggagactaccgtgcgttcggacggctcatggtggaatcgcatcgctcgctgagggacgattacgaagtgtcatgcccagaacttgaccaactggtggaagccgcactcgccgtgcccggagtctacggctcccggatgaccggtggcggcttcggaggctgcactgtgacgttgctcgaagcgtcagcagcacctcacgcgatgcgccatatccaagagcactacgggggaactgccaccttctacctgtcgcaagcggctgatggcgcgaaagtcctgtgcctc

SEQ ID NO: 3166 - DNA, 1176 bp, Artificial Sequence
  derived and/or modified sequence
atggctgccctgaggcagccacaggttgccgagctgctcgccgaggctcgcagggcattcagggaggaatttggagcagaacccgagcttgcggtatccgccccaggcagggtaaaccttattggcgaacacacagactacaatcagggccttgtcctacccatggcactggagctgatgactgttctcgtgggttcgccccggaaggatggtttggtctccctactgaccactagcgagggcgcagatgaaccacaaagattgcagttcccactgcccacagcccagcgatcactcgaaccaggcacgccccggtgggccaattatgtgaagggcgtgatccagtactaccctgccgcaccgctccctggcttttccgcagttgtcgttagctctgttcccctgggaggggggctgtcctcctctgcatcactcgaagttgccacctatactttcctccagcagctctgtcctgactctggcacaatcgctgcccgtgcccaggtatgccagcaagccgagcactccttcgcgggaatgccttgtgggataatggaccagttcatttcgttaatgggtcagaaaggacacgctctcctgatcgactgccgctccctggaaacttctctcgtgcctctgagcgatcccaagctcgccgtgttgataacgaactcgaacgtacgtcactcgctcgcatcttctgagtatcccgtacgccgtaggcagtgtgaggaagtggcacgggccttgggcaaggagagtttacgagaggtccagcttgaggagctggaggctgccagggatctggtcagcaaggaaggatttaggagggcccggcatgtggtgggcgaaatccggaggactgctcaagccgctgcagccttacgcaggggcgactaccgtgccttcggccggctgatggtagagagtcaccgctctttacgtgacgattatgaggtctcctgccctgagctggatcagctggtggaagcagcgcttgcagtcccaggggtctacggcagcaggatgaccggtggcgggttcggcggttgtacagtcactctgctggaagcttcagccgcaccccacgccatgcgacatatccaagagcattacggcggaacagcgaccttctacctttctcaggctgctgatggagcaaaagttctatgttta

SEQ ID NO: 3167 - DNA, 1176 bp, Artificial Sequence
  derived and/or modified sequence
atggcggccctgcgccagccacaagtggccgagctcctcgccgaggcccgccgcgctttcagagaggagttcggcgcggagccggagctggccgtgtcagcccctggacgcgttaatctgatcggcgagcataccgactacaatcaaggacttgtcctgcctatggccctggagctgatgactgtactggtgggatcaccacgcaaggatggcctggtgtcgttgctgactactagcgagggagccgacgaaccacagagactccagtttcctctgccaactgcccaacgctcgctcgagcctggcaccccgcgctgggccaattatgttaagggcgtgatccagtactacccagccgcgcccctccctggattctccgcggtggtggtgtccagcgtcccgctgggcggtggactgtcgtcctccgcatcactggaagtcgccacgtacacctttctgcaacaattgtgcccggactcaggcaccatcgctgccagagcacaggtgtgccaacaggcggaacacagcttcgccggaatgccttgtggaattatggatcaattcatcagcctgatgggacagaagggccacgccctccttattgactgccgctcgctcgaaactagcctggtgcccctgtccgatcccaagttggcagtgctgatcacgaactccaacgttcgccattctctcgctagctcggagtacccggtgaggcgcaggcagtgcgaggaggtggccagggcactgggcaaggaatcgttgcgggaagtgcagctggaagaactcgaggcagccagagatctcgtgtcaaaggagggattccggcgcgcacgccacgtcgtcggagaaatccggcggactgcgcaggcggcagctgcgctgaggcgtggtgactaccgcgcattcggaaggctgatggtcgaatcccacaggagtctgcgggatgattacgaggtgtcgtgtccggaactggatcagctggtcgaggccgctctggccgtgcctggcgtctacggttcccgcatgacgggaggaggcttcggaggttgcaccgtcaccctcctggaggcttccgcggccccgcatgccatgcgccacatccaagaacactacggcggtactgcgactttctacttgagtcaagctgctgacggtgccaaggtcctttgcctt

SEQ ID NO: 3168 - DNA, 1176 bp, Artificial Sequence
  derived and/or modified sequence
atggccgctcttcgccagcctcaggtcgctgaactcttggccgaggctcgcagggcttttcgtgaggaattcggcgctgagccagagctcgccgtaagtgccccaggccgtgtaaacctgattggagaacatacagattataaccagggcctcgtcctgccaatggcactggaactcatgactgtactggtcggctctcctaggaaagatggactggtcagtctcctgacaacaagtgaaggagctgacgagccacagagactccagtttccactgcccaccgctcagaggagtctcgagccaggcactcctcgctgggccaactatgtcaaaggtgtcatacaatactatcctgctgcccccctgccaggcttcagcgcagtagtcgtgtcaagcgttcccctcggcggaggcctcagttctagcgcaagcctggaggttgctacctacacatttctccaacagctgtgccccgactccggaaccattgctgcaagagcccaggtgtgccagcaagcagagcatagcttcgccggaatgccttgcggcatcatggaccagttcatctccctgatgggccagaaaggccacgccctccttatcgattgccgctcccttgagacctctctggtcccactgtctgaccctaagctcgccgtgctgattacaaactccaacgtgagacactctctggcctccagcgagtatccagtgcgccgccgccagtgcgaggaagtggctcgtgctttgggcaaggaatctttgcgcgaagtacagctcgaggaactggaggccgctcgcgacctggtatccaaggagggtttcagaagggccaggcatgttgtcggcgaaattagaagaaccgcccaggcagcagccgccttgagacgtggtgactacagggcttttggaaggttgatggtggagtcccacagaagtctcagggacgactacgaggtttcttgccccgaattggaccagctcgtggaagcagccctcgccgttccaggtgtttatggatcccgcatgaccggcggtggtttcggaggatgtactgtgacattgctggaggcctccgctgctcctcacgccatgcgtcacatacaggaacactacggcggaaccgcaaccttctatttgtcacaggccgcagatggtgcaaaggttctttgcctc

SEQ ID NO: 3169 - DNA, 1176 bp, Artificial Sequence
  derived and/or modified sequence
atggctgctcttagacaaccgcaggtggccgagctgcttgccgaagcgcgacgcgcgtttagagaggagttcggagccgaaccggagcttgcagtgagcgcccccgggcgggtgaaccttattggagagcacaccgactacaatcaaggcttggtgctgcctatggcacttgagcttatgaccgtgcttgtcggatcacccagaaaagatgggctcgtgagcctgctgactacctccgaaggagcggatgaaccacaaaggcttcaatttcccctgcctacggcgcagcgatctctcgaaccgggcactcctagatgggcgaactacgtgaaaggcgtgattcaatactacccagcagcaccgctccctggattctccgcagtggtcgtgtcgtcggtccctctgggaggaggtctttcttcgtccgcttcacttgaagtggcaacttacaccttcctgcagcaactctgtcctgactctggaactatcgcagcacgggctcaggtgtgccagcaagctgaacactccttcgcggggatgccctgtggtataatggaccaattcatctccctgatgggacaaaaggggcatgcactgctgattgactgtaggagcctcgagacgtcgttggtgcccctctccgatcccaagctggccgtcctcatcaccaatagcaacgtgcgccactcattggcaagctcggaatacccagtgcgaaggcgacaatgcgaagaagtcgcccgtgctcttgggaaggagtccctccgcgaagtgcagctggaagagcttgaagcagcacgcgatctcgtttcgaaggagggttttcgccgtgcgaggcatgtcgtgggtgagatcagaaggacggctcaggcagccgcagcacttaggagaggtgattatagggcgtttggtcgcctgatggtcgaatcacaccgttcccttagagacgactacgaagtcagctgccctgagctggatcagctcgtggaagcagcgcttgcagtgcctggcgtctacggctcgcgtatgactggtggaggctttggcggttgtactgtcacccttcttgaggctagcgcagcccctcatgccatgagacatattcaggaacattacggcggtacggcaaccttttacctttcgcaagcagcagatggtgcgaaggtcttgtgcttg

SEQ ID NO: 3170 - DNA, 1176 bp, Artificial Sequence
  derived and/or modified sequence
atggcagcactacggcagccccaggtcgcggaacttttggcggaagctaggcgcgcctttagagaagaatttggagccgagcctgagttagctgtctccgccccaggacgtgtgaacctcattggggagcatacagactacaatcagggactagtcctacccatggccctggagctgatgaccgtactggttgggtctcctagaaaagacgggctggtgagtcttctgacgactagcgaaggggcggacgaaccgcaaaggttgcagtttcccctcccaacggcacagaggagtttagagccaggtacccccaggtgggcaaactatgtgaaaggcgtgatccagtattaccccgcggcacctttgccgggtttctcagcagttgtcgtgtcctcagtaccgctcggcggcgggctttcatctagtgcatcacttgaagtggcaacatacacattcctgcagcagctctgccctgacagtggaacaattgcagctagagctcaggtgtgccagcaggcagaacattcgtttgctggcatgccctgcggaattatggatcagtttatctctctgatgggacagaaggggcatgccctgcttattgactgccgctctctggagacaagcttggtcccgctttccgatcccaagctggccgtcctgatcactaattctaacgtgaggcattcgctggcctctagcgagtaccccgtccgcagaagacagtgtgaagaggtcgcacgggcactcggcaaggagtccctgcgtgaggttcaactggaggaacttgaagcagctcgagacttagtgtctaaagaaggcttccgcagggccaggcatgtggtgggcgagatcaggagaactgcccaggccgcagcagcactgcgcaggggcgattatcgcgcatttggtcgtctgatggtggaaagccatcgaagtctgcgcgatgactatgaggttagttgcccagagttggatcaactagtggaggctgcgctggccgtgcccggcgtgtatggctctcgcatgacggggggcgggttcggtgggtgcacagtaacgctacttgaagcatctgcggcccctcatgccatgagacatattcaggagcactatggagggacagctacattctacctctcacaggcagccgacggggcaaaagttctatgtctg

SEQ ID NO: 3171 - DNA, 1176 bp, Artificial Sequence
  derived and/or modified sequence
atggctgctcttcggcagccacaggtggctgaacttcttgcagaagcaagaagggccttccgagaggagtttggggccgaacccgaactcgctgtaagtgcccccggaagagtaaacctcataggagaacacactgattataaccaggggctcgtgctgcctatggctctagaactcatgacagtactggtcgggagtcccagaaaggatgggctcgtatctcttctgacaacttctgaaggagccgatgaacctcagaggctgcagttcccactacccactgctcagcgctcgcttgaacctggaacacccaggtgggccaattacgtcaaaggggtgatacagtattaccctgcagccccacttcctgggttctctgcagtggttgtaagttcagtgcccctcggaggaggactgtcctcgagtgccagtcttgaagtcgctacatatacttttcttcagcagctatgtcccgatagtggaactatcgcagcaagagcccaggtctgtcagcaggccgaacattcatttgccgggatgccatgtggaatcatggatcagtttatcagtctgatgggacagaaagggcacgccctccttattgattgtagatccttggaaacttctcttgtccccctcagtgaccccaagctggctgtgttgataacaaatagtaatgtgcgccactctctcgcttcctcggaatatccggtgcgcaggcgccagtgcgaagaggtcgcccgcgccctcgggaaggaatcccttagagaagtgcagctagaggagttggaagctgctcgagatcttgtatcaaaagagggatttaggcgtgctagacacgttgttggggagattagacgaacagctcaggcagccgcagcgcttagaagaggggattatcgagcgttcgggagattgatggtggaatcacaccgctcacttcgcgatgattatgaagttagttgtccggaactcgaccagctcgtagaagccgccctcgcagtgcctggagtctatggatcacggatgactggaggggggttcgggggatgtactgtcacactcctggaggccagtgcagctccacatgctatgagacatatccaggaacattatggggggactgccactttctatctgtcccaggcagccgatggagccaaggtgctatgcctg

SEQ ID NO: 3172 - DNA, 1176 bp, Artificial Sequence
  derived and/or modified sequence
atggcagctctgcggcaaccacaggtcgcggagctgctcgccgaagcccgccgcgccttcagggaagagtttggggccgagccagaactcgcggtctcagcacctgggagagtcaacctgatcggcgaacacacagactacaaccaggggctcgttcttcccatggctctggagctgatgactgtgctggtgggcagtccgcgaaaagatgggttagtctctctgcttacaacatcagagggcgccgacgagccacagaggctgcagttcccgttaccaactgcccagcgatccctcgaacccggcaccccccgctgggctaactatgtgaaaggtgtcatacagtactacccggccgccccactgccagggttttccgccgtggtcgtctcatccgttccattaggggggggtctgtctagcagcgcctcactcgaagtggctacctataccttcctacagcaactctgtcctgacagtggaaccattgccgccagagcgcaggtttgccagcaggccgagcactcctttgctgggatgccatgcgggatcatggatcagttcatctccctgatgggacagaaggggcacgcactcctcatagactgcaggagcctcgagacaagtctggtccccctgtcagatccaaagctagccgtcctgattacaaattcaaacgtgcgccactctcttgcctcttccgaataccccgttagacgcaggcagtgcgaggaggtggctagggcgctcggtaaagaatccctgcgggaggtgcagctggaggaactcgaagccgcccgggatctcgtttctaaagaaggctttagacgcgcccgccatgtggtgggagaaatacgccggacggcacaggctgcagcagcacttcggcggggcgattatcgcgcattcgggcgattgatggtggagtcacatcggtccctgcgggacgactacgaggtatcctgcccggagctcgatcaacttgtggaggctgcattagcggtccccggggtgtacggctcccgcatgaccggtggcgggttcggggggtgtactgtaacattattggaggctagcgcagcgccgcacgcgatgcgacatatccaggagcattacggaggaacagcaacattctatttgtcccaggcggctgacggagcgaaggtgctgtgcctg

SEQ ID NO: 3173 - DNA, 1176 bp, Artificial Sequence
  derived and/or modified sequence
atggcagctctgcggcagccgcaagtggctgagttgctggccgaagcgagacgggcgtttcgtgaagagtttggtgcggaacctgaactagcggtgagtgccccaggaagagtgaacctcatcggggagcacacagactataaccaaggactagtccttcccatggcccttgaattgatgacggtccttgtcggctctcctagaaaagatggcttagttagcctgctgacgacaagcgaaggtgccgacgaaccccaaagactccagtttcctttgccaacagcacagcgctccctggagccgggtacgcctcgatgggcaaattacgttaagggagtgattcagtactatcctgcggcgcccttaccgggcttcagcgcagtggtagtgtcatccgtcccgctgggtggcggactgtcttcatctgcaagcttggaggttgcgacgtatacgtttctgcagcaattatgccctgacagcggtacaattgcggctagggcacaagtatgccagcaagccgaacattcctttgccggtatgccttgcggcattatggatcagtttatttcattgatgggacagaaaggacatgcacttctgattgattgtagatcactggaaacatctctggtgccgctcagcgacccaaaattggctgtgctgatcaccaattctaacgttcgtcattcattggcgtcttctgagtatcctgtcagaagaagacaatgcgaagaggtggcacgtgcactagggaaagaaagcttgcgggaggtacaacttgaagagcttgaagcggctcgggatctggtctcgaaagaaggtttccgacgtgcccgtcacgtcgtcggggaaattaggaggacagcccaggccgctgcggcgcttcgccgcggcgattaccgcgcttttggtagactcatggtggagagccatcgaagcctacgtgacgattacgaagtatcatgtccggaactggatcaactggttgaggcggctttggcggtgccaggtgtatacggcagcaggatgaccgggggcggatttggcggttgtactgtgaccttacttgaggcctcggcggcaccacacgcgatgaggcatatccaggaacattacggcggcacagctactttttacttaagccaggccgcagatggggccaaagtactctgcctt

SEQ ID NO: 3174 - DNA, 1176 bp, Artificial Sequence
  derived and/or modified sequence
atggccgcacttcgccaaccacaggtcgcagaactcttggcagaagcaagacgggcatttagggaagaattcggtgcagaaccagaactcgcagtctcggcccccggaagagtcaatctcattggtgagcacactgattacaaccaaggactggtgctgcctatggcacttgaactgatgaccgtgcttgtgggatccccacgcaaggacggactcgtgtccctcttgactacttccgaaggtgccgatgaacctcagcggctgcaatttccacttcccaccgcacagagatccctggaaccaggtactcctcggtgggcaaactacgtgaaaggagtcatccaatactaccctgcagcgcctcttcctggtttttcggcagtggtggtgtcgtccgtccctcttggaggaggtctttcgtcgtccgcatcgctggaagtggcaacttacacctttcttcagcaactgtgccctgacagcggcaccattgccgcgagggcgcaagtgtgtcagcaagcggagcacagctttgctgggatgccttgcggtattatggatcagtttatctcgctcatgggacagaaaggccacgcactcctgatcgactgtcgtagcctcgaaacctcccttgtgccactgtccgatccaaaactggccgtgcttattacgaattcaaatgtgagacattcgctggcctcttcggagtaccctgtgcgaaggcgacaatgtgaggaagtggcaagagctctgggaaaagagtcgctccgagaagtccagctggaggaactggaagctgcaagagatctcgtgtccaaggaaggattccgcagggcacgacacgtcgtcggtgagatacgcagaactgcacaagccgcagcagccttgagacggggagactaccgagcatttggtcgacttatggtggagagccatagaagccttagagatgactatgaagtgtcttgcccagaacttgatcagctggtggaagcagcgctcgcagtccctggagtgtatgggtcaaggatgaccggaggcggatttgggggatgtaccgtgaccctccttgaagcctccgcagctccgcatgcaatgaggcatattcaggaacattacggggggactgcaaccttttacctttcccaggcagccgacggagcaaaagttctgtgtctg

SEQ ID NO: 3175 - DNA, 1176 bp, Artificial Sequence
  derived and/or modified sequence
atggcggctctgcgacaaccacaggttgctgagctgcttgcggaagcccgcagagctttccgggaggaatttggtgccgagccggaactggctgtcagcgccccgggcagagtgaacctgatcggcgaacacaccgactacaaccaaggactggttctgccgatggcgctggaactgatgaccgtgctggttgggtctccgcgcaaagatgggctggtcagccttctgacgacctccgagggggcagacgaaccgcagcggctccaattcccgttgccgacggcgcagcgttcactggaaccaggcactcctcggtgggccaattacgtcaaaggtgtcatccaatactacccggccgcacctctgccaggttttagcgccgttgttgttagctcagtgccactgggcggcggattatcctccagcgcttcattagaagtcgcaacttatacgtttctgcagcagctgtgtccggactctggcactatcgctgctcgcgcacaggtctgtcaacaggcggagcatagcttcgcaggcatgccttgtgggatcatggaccaatttatttctctgatgggacaaaagggtcatgccttgctgatagactgtcgttcattggaaacttctctggtccccctgtctgacccaaagttggcggttctaatcactaattctaacgtccgccattctctagcgagctctgagtacccggtacgccgtcgccagtgtgaggaggtggcgcgcgcactgggcaaggaaagcctgagagaggttcagctagaggagctggaggcagcgcgagacctcgtaagcaaagaaggcttcagacgcgcccgccacgtcgtaggcgaaatccgccgcaccgcgcaggcagctgcggccttacgccggggggactatcgcgccttcggtcgcctgatggtagaaagccatcgttccctgcgcgacgattacgaagttagctgtccagagctcgaccagctagtagaagcagccctggctgttcctggtgtctacgggtccagaatgactggcggaggtttcggcggttgtacagtcacgttgctcgaggcctcggccgcccctcatgcaatgagacacattcaagagcattatggcggtacggcaaccttctacctgagccaggcagccgacggagctaaggtcctctgcctg

SEQ ID NO: 3176 - DNA, 1176 bp, Artificial Sequence
  derived and/or modified sequence
atggcagccttgcgacagccacaggtggctgagcttctagcagaagcccgacgcgcattccgggaggagttcggcgcggagcctgagctcgccgtcagtgcccccggccgagttaacctgattggcgagcataccgattacaatcaggggctggtcctgccgatggcgctggaacttatgactgtgctggtgggatccccaaggaaggatggcctcgtgtcccttctaacgacaagcgaaggggcagacgagcctcagcgtcttcagtttccgctccccacagcccagaggtctctcgagcctggcacgcctagatgggcgaactatgtaaagggcgtgatccaatactatccggcagcccccctgccaggctttagtgctgtggtagtgtcttcggtaccattaggcgggggtctctcaagctcggccagtctggaagtggctacatacaccttccttcagcagctgtgtcctgatagcggcactatagcagcacgcgctcaggtttgccagcaggccgaacatagttttgccgggatgccttgtggaatcatggatcagtttatcagcctcatggggcagaaaggacatgccctcttgattgactgcagaagcctcgagaccagtctggtccccctgagtgaccctaagctcgccgtactcatcactaatagcaacgttagacactctctcgcgtcctccgagtaccccgttcggcgccgacagtgcgaagaagtggcacgggccctcgggaaggagtctctgcgggaagtccagctggaggagctggaggccgccagggacctggtttcaaaagagggatttaggcgggcaagacacgtggtgggcgaaataagaagaactgcccaggccgcggcagccttacgacgaggggactatagagcgttcggccgcctaatggttgagtctcatcggagcttaagggatgattacgaggtctcgtgccctgaactggaccagctggtcgaggccgcgttggcagtgccgggggtttatggcagccgtatgacaggtggtgggtttggcgggtgcacagtgacgctcctggaggcctcagctgccccacatgcaatgcgacatattcaggagcattatggagggactgcgactttttatctctcgcaggccgccgacggtgccaaagtcttatgcctc

SEQ ID NO: 3177 - DNA, 1176 bp, Artificial Sequence
  derived and/or modified sequence
atggccgccctccggcagccccaggtagcagagcttctggccgaggccaggcgtgcttttagggaggagttcggtgccgaacctgagctggcagtatcagcgcccggccgtgtcaatctcatcggtgagcataccgactacaaccagggcttggtgcttccgatggctctggagcttatgaccgttttggtgggctcgccaagaaaagacggcctcgtctctttgctgaccaccagtgagggagcagacgaaccacagcgactccagttccctctgcctacagcgcagcgaagtctggagccgggtaccccaagatgggccaattatgtcaagggagtgatccagtattatcccgctgcacctttgcctggattcagtgctgtggtggtgtcttcagtacccttaggtggaggactcagcagttccgcttccctggaggtggcgacctatactttcctccaacagctctgtccagatagtggcacaatcgccgcccgcgcccaggtgtgccaacaggccgagcattcgttcgcgggaatgccgtgcggcatcatggatcagttcatttccctgatgggacagaaaggccatgctctcctgatcgactgtcgatccctggaaacaagtctggtgccactgtctgaccctaaacttgccgtactgatcactaactccaatgtgcggcattcactggcctcaagcgaataccccgtcaggaggcggcagtgcgaggaagtggctcgcgccctgggcaaggagtctcttcgcgaagttcagctggaggaactcgaagctgctcgggatctggtctccaaagagggattccgtcgtgcacgtcacgtcgtgggggagatacggcgcactgcacaggccgctgccgctctccgccgtggcgactatcgagcattcggccgactcatggtagagtcacatcgctctctcagagatgattatgaggtcagctgcccagaactggatcaactggttgaggcagccttggctgtgcccggcgtctacggtagccgaatgaccggggggggttttggagggtgtaccgtgaccctgctcgaggcaagtgctgccccccacgctatgcgacatatccaagagcactatggagggaccgccaccttttacctgagccaagcagccgacggcgccaaggttctgtgtctc

SEQ ID NO: 3178 - DNA, 1176 bp, Artificial Sequence
  derived and/or modified sequence
atggcagccctgcggcagcctcaggtcgcagagctccttgcagaggcgcggagggcatttcgcgaagagtttggcgccgagccggagcttgccgtgtcagccccaggtagagtgaatctgatcggtgaacacaccgactataatcaaggactagtactaccgatggccctggaactaatgacagtcctggtgggaagcccgcggaaagatggcctcgtgagcctgctcaccacaagcgaaggtgccgacgaaccccagcgcttgcagtttcccttaccaactgcccagcgaagcctcgagccgggcacgccccgctgggctaactatgtgaagggagtgatccagtattaccccgcagcaccgttgcctggcttctccgcggtggttgtgtccagcgtcccgctcggtggggggctgtcctctagcgcatcactagaggtcgcaacatatacttttctgcagcagctgtgtccagatagcgggaccatagctgcccgtgcccaggtctgtcagcaggcagaacactccttcgctggtatgccatgcggaatcatggaccagtttatatccttaatgggccagaagggccacgcgctgctgatagattgtcggagtctcgaaacttcactggtgccgctcagcgatcctaagctggctgttctcataactaacagcaatgttcgccacagtttggcgtcctccgaatacccggtgcggcgcagacagtgtgaggaggtggcccgcgccttgggcaaagagtctctccgcgaagttcagcttgaggagctggaggctgcccgcgacctggtttccaaggagggttttcgtagagccaggcacgtcgtcggcgagattagaaggaccgcccaggcggctgcggctttgagaagaggggactacagggcctttgggcgcctgatggtggaatctcacaggagcctgagggatgattatgaagtgtcatgtccggaactagatcaattagtggaggctgcacttgctgttccgggagtgtatggaagccggatgactgggggaggattcggtggctgcacagtaacccttttggaagcatccgccgctccccacgctatgcggcacatccaggaacactatggtggcactgctacgttttatctaagccaggccgctgacggcgcaaaggtgctgtgcctg

SEQ ID NO: 3179 - DNA, 1176 bp, Artificial Sequence
  derived and/or modified sequence
atggccgctttaagacagcctcaagtagctgaactgttggctgaagccagaagggcatttagagaggagttcggagctgaacctgaattggcagttagcgctccaggaagagtgaatctcatcggcgaacacactgactacaatcagggcctggttctgcctatggccctggagctgatgaccgtgctggtaggttctccccgcaaggacggtcttgtcagcctgttgaccacctccgagggagctgatgagccccaacgcctgcagtttcccctaccaacggctcagcgcagcctggaaccagggacccccaggtgggctaactacgtgaagggagtcatccagtactacccagcagcccctttacctggattctcagcagtggtcgtaagcagtgtccccttaggcggaggcctgagcagctccgcgagtctggaggttgccacctacacctttctgcagcagctgtgtccagacagcgggacaatagcagctagagcccaggtctgccagcaagctgaacactcattcgctggcatgccttgtggaattatggatcaattcatctcattgatggggcaaaagggacacgccctcttgattgactgtcggagtcttgaaacctcactcgtcccactgagcgatcccaagctcgctgtcctgatcactaacagcaacgtccgccacagtcttgcctcatcagagtaccctgtgagacgcagacagtgcgaagaagtcgcccgtgctcttgggaaagaaagtttgagggaggtgcaactggaggaattagaggcagctagggacctggttagcaaagagggattcaggcgcgcccgtcatgtcgtcggagagatccgcagaacagctcaggcggcagctgctctgagacgcggggactaccgggcattcggtagactgatggtcgaatcacatagaagtctccgtgatgattacgaggtgtcgtgccccgagctggaccagctcgtagaggctgccctggctgtgcctggagtttatggctccagaatgaccggcggcggtttcggaggatgcactgtgaccctcctcgaggctagcgctgcacctcacgctatgcgacatatccaggagcactatgggggtactgccaccttttatctgtcccaagcagccgatggagctaaggtcttgtgcctg

SEQ ID NO: 3180 - DNA, 1176 bp, Artificial Sequence
  derived and/or modified sequence
atggccgccctgcgccagcctcaggtggcggaactcctggcagaagcgcggcgcgcattccgggaggaatttggtgccgaaccagaattggcggttagcgcacctgggcgcgtgaatctgattggcgaacacaccgactataaccaggggctggtgctgccaatggcactggaactgatgacggtgcttgtcgggtccccgagaaaggatggactggtgtcgctcctcaccacttcggaaggagccgatgaaccgcagcggctgcagtttccgctccctactgcccaaagatcgctggaacccgggactccgagatgggccaactacgtgaagggtgtcatccaatactatccggccgcaccgctgccgggattttcagccgttgttgtgtcgagcgtcccgctgggtggtggactctcgtcctcagccagcctcgaagttgctacctacacctttctgcaacagctgtgcccagactccggcactatcgcagctagagctcaggtgtgtcagcaagctgaacactctttcgccggcatgccttgtggaattatggaccagttcatctcactcatgggacagaaaggccacgcccttctcatcgactgtcggtcgcttgaaacctcattggtgccactgtcggatccgaagctcgccgtgctgatcaccaatagcaatgtaagacactccctcgcgtcatcagaatacccagtgcgcaggcggcaatgcgaagaagtggcgcgcgccctgggaaaggagtcgctccgggaagtgcagctcgaggaactggaagccgcgcgggacctcgtgtcgaaggagggcttccgccgggctaggcatgtcgtcggagaaatccggcgcacggcccaagcagccgcagcactgcgccggggtgactaccgagcgttcggacggctgatggttgaatcccaccggtcgcttcgggatgactacgaagtctcgtgcccagagttggaccagttggtggaagctgcattggccgtcccaggagtgtacggatcgagaatgaccggtggcggatttggcgggtgcacggtgactctgctggaggcgtccgccgccccgcacgcgatgaggcacatccaggaacactacggcggaaccgcgactttctacctctcacaagccgctgacggcgccaaagtcctgtgcctc

SEQ ID NO: 3181 - DNA, 1176 bp, Artificial Sequence
  derived and/or modified sequence
atggccgcattgcgacaacctcaagtcgctgaattgcttgctgaggctagaagggccttcagagaagaatttggagcagaaccagaacttgccgtttctgcaccaggccgagtaaatctgatcggagagcatactgactataatcaaggactggtcctgccgatggcattggaactgatgaccgtactggtgggatcacctagaaaagatggacttgtatctttgttgaccacttcggaaggagcagacgaacctcaaaggttgcagtttcctcttcctacagcgcaacgctctttggagccgggcactccacgttgggcgaattacgtaaaaggagttattcaatattatcctgcagccccattgccaggattcagtgccgtggttgtcagctctgtgccgctaggaggcggcttaagttcgtctgcttcattagaagtagccacatatactttcttacaacaattgtgtccagattcaggaacaattgccgccagagctcaggtttgccaacaagctgaacattcatttgcgggcatgccatgtggaatcatggatcaattcatttcgttaatgggtcagaaaggacacgccctgctcattgattgtcgctctcttgagacatctctggttcctctaagtgacccaaagctcgcagttcttattactaactcgaacgtgcgacattcacttgctagctcagaatatccggttcgacgtcgacagtgcgaagaagtcgcacgggcccttggtaaagaatcactgcgagaagttcaactggaagagctcgaagcagcccgagatttggtctcaaaagagggcttccggagagcacgccacgttgtcggagaaatccgtagaacagcacaggccgctgctgctcttcgtaggggagactacagagcctttggacgtttgatggtcgaatctcatcggtctctccgggatgactacgaagtctcttgtccagagcttgaccaattggtggaggccgcacttgccgtcccgggagtttatggctctcgcatgactggtggaggattcggcggatgtacagtaacgttgttggaagcttcagcagctccgcatgctatgcgacatatccaagagcactacggaggtacggcaaccttttatctaagtcaagctgcagatggagcaaaagtgttgtgtctt

SEQ ID NO: 3182 - DNA, 1176 bp, Artificial Sequence
  derived and/or modified sequence
atggccgcacttcgccagccccaggtggccgaattactagctgaagctcggagagccttccgcgaagagttcggagctgaacctgagttggcagtctccgcccccgggagagtgaatctgataggcgaacatactgattataatcaaggcctcgttcttcctatggctcttgagctcatgaccgtgctggtaggctctccccgcaaggatggactggtgtcattgctgacaacctccgagggagccgatgagccccagcgcttgcaattcccacttcctacagcccagagaagtcttgaaccagggactccccggtgggccaattatgttaaaggagtcatccagtattatcctgcagccccattaccgggattcagtgcagtggtcgtgtcttcagtcccattaggaggcggacttagcagctccgcatccttggaagtcgcaacctacacttttctgcagcaactctgcccagactcagggaccatagccgctcgggctcaggtgtgccagcaggctgagcacagcttcgctgggatgccttgtggcatcatggaccagtttatcagcctgatgggtcagaaaggtcacgctcttctaatcgattgccgctcattagaaacaagcctggtcccgctgtcagaccctaaactcgcagtactcatcaccaatagcaacgtgcgccatagcctggcttctagcgagtacccagtccggcgaagacagtgtgaggaagtagcaagagctctaggtaaggaatccttaagagaggtgcagcttgaggagctcgaagctgctcgggatctggtttctaaggaagggtttcgccgagcacgacatgtggttggcgagatacgcaggacggcccaggccgccgctgctctgcgtcgcggggactaccgtgcattcggccgcctcatggtggagtcccataggtcacttcgggacgattacgaggtgtcttgcccagagttggaccagctcgttgaggccgccctggcagttccaggcgtgtacggctcacgcatgactggaggaggtttcggcgggtgcactgttactctgctcgaagcaagcgctgcccctcatgccatgaggcacatccaggagcactacgggggcaccgctaccttttacctgagtcaggcagcggacggcgctaaggtactgtgcctg

SEQ ID NO: 3183 - DNA, 1176 bp, Artificial Sequence
  derived and/or modified sequence
atggcggctctgaggcaaccacaagtcgcggagctgcttgccgaggcccggagggctttccgcgaagaattcggagcagagcctgaactcgccgtgtccgcgccaggtcgggttaatctcattggggaacacacagattacaaccaaggactcgtgctcccaatggctctggagctgatgactgtcctagtgggtagcccccgtaaggatggcctggtgtcactcctgacaacctcagaaggcgctgacgaaccacaaaggctccagttccccttgccgactgcgcagcgctcgctggagccaggaacgccacgctgggcgaactatgtaaaaggggtgatccagtactacccggcagctccactacccgggttctctgcagtagtagtttcttccgtgcccctcggcggcggtctaagttcttcagcctctctggaggttgccacttacacattccttcagcagttgtgtccggactccggcactatagcggctagggcacaggtgtgccaacaggcagagcacagctttgctggtatgccttgtggcataatggaccagtttatcagccttatggggcagaaaggacacgccctgctgatcgattgcaggtccttggagacatctctggttccgctcagtgatcctaaactggccgtgcttatcactaactccaatgtgagacactcacttgcctccagcgaataccccgtccgccgaagacagtgtgaggaggtggcccgtgcgttagggaaggagtcgttgcgtgaggtgcagctggaggaattggaagcagccagagacttggtgagcaaggaaggttttcggcgcgcccggcacgttgtgggggaaatacgcagaactgcgcaggctgctgcagccttgaggcgtggggattatcgggcatttggcagactgatggtggaatcgcaccgctccctccgggacgattacgaagtgtcatgtcccgagttggatcagctggttgaggcagctctagcagtgcctggggtgtatggcagccggatgacagggggtggttttggcggctgtactgtgacgttgctcgaggctagcgctgcgcctcatgcaatgcgtcatatccaggagcactacggagggacagccactttttacctctcgcaagccgccgatggggcaaaggtcctgtgcctg

SEQ ID NO: 3184 - DNA, 1176 bp, Artificial Sequence
  derived and/or modified sequence
atggccgccctccgtcaaccccaagtggccgagttgctggccgaggcccgaagagccttccgcgaggaattcggcgctgagcctgagcttgctgtgtccgcaccaggaagggttaaccttattggcgagcatacagattacaatcagggactcgtgttgcccatggcccttgagctgatgacagtgttagtgggtagcccacggaaggatggcctggtctcactcctgactaccagcgaaggtgccgatgaaccccagagactccagttccccctgccaaccgctcagcgatccttagaacctggcacccccaggtgggccaactacgtcaagggcgtcattcagtactatcccgcagctccattgccgggattttcagcagtggtcgtctcgagtgtcccccttggaggtggactcagcagtagcgcgtcactagaagttgctacatatacctttctgcagcagctgtgcccagactctggcacaattgccgcccgggcacaggtgtgtcagcaagcagagcactcctttgctggcatgccttgtgggattatggatcagttcatctccctcatgggtcagaagggtcacgcgctgctcatagactgtaggtctcttgagacctccctcgtcccactgagcgatcctaaactggcggtgctcatcacaaactctaacgtgcgccactcactggcctccagcgagtaccccgtacggcgccgccagtgtgaggaggtcgctagggccttagggaaagaatccctcagggaagtccaactggaagagctagaagcggccagagatttggtgagtaaagaaggctttcggagggccaggcacgtagtgggagagatccggcgaaccgcgcaagccgctgccgccctgagacgaggtgactaccgtgcattcggccgtcttatggtggaaagccatcggtctctgcgcgacgattatgaagtgtcttgtccagagctagatcagcttgtggaggcagctctggccgtgcctggagtgtacgggagcaggatgactggtggcggtttcggcgggtgcactgttaccctcctcgaggctagtgcggctccacatgctatgaggcatattcaggagcactacggaggcacggctacattctacctgagccaggctgctgacggggctaaagtgctatgtctt

SEQ ID NO: 3185 - DNA, 1176 bp, Artificial Sequence
  derived and/or modified sequence
atggcggccctgcggcaaccgcaagtggctgagctgctggcagaagctcggagagcgttcagggaggaatttggcgcggaacccgagttggcagtgagtgcaccgggacgcgtgaatctcatcggtgagcacaccgattacaatcaaggccttgtgctgccgatggcgctggaactcatgactgtcttggtggggtcgcccaggaaggacggactggtgtccctcctgaccacttccgagggagccgacgaacctcaaaggctgcagttcccgttgccaaccgctcaaagatcgctggaacctggcactcctaggtgggcgaactacgtgaagggagtgatccagtactacccagcagcgccactgcccggattctcagccgtcgtagtctccagcgtaccgcttggaggaggactttcgtcgtcagccagcctggaagtcgcaacctacaccttcttgcagcagctgtgcccagatagcggaaccattgccgcgagagcccaggtctgtcaacaagccgagcactcctttgcgggtatgccgtgtggaatcatggatcagttcatctccttgatggggcagaaagggcacgcgttgctgatcgactgtagatcccttgaaaccagccttgtgccgctgtcggacccgaagctcgcagtgcttataaccaactcaaacgtccggcatagcctggcttcctcggaataccctgtccgccggcgccagtgcgaggaggtcgcccgtgccctcgggaaggaatcgctccgggaggttcagctcgaagaacttgaagccgcccgggacctcgtgtcgaaggaaggctttcgcagggccagacatgtggtgggtgaaatccgcagaactgcccaagcagctgccgctttgcggagaggagattaccgagccttcggcaggttgatggttgagagccaccggtccctccgggacgactacgaggtgtcgtgccccgagctcgatcagctcgttgaagcagcactggcggtgccgggcgtgtacggatcacggatgactggaggcggttttgggggctgcactgtcacgttgctcgaggcgtccgctgcacctcatgcgatgcgacacattcaggagcattatggaggaactgccactttctacctgtcgcaggcagccgacggagcaaaggtgttgtgtctt

SEQ ID NO: 3186 - DNA, 1176 bp, Artificial Sequence
  derived and/or modified sequence
atggcggccctcaggcagccccaggtcgccgaacttctggcggaggcccggcgagcttttcgcgaggagtttggagctgagccggaactcgccgtttctgcccctggacgcgtcaacctcatcggagaacatacggattacaaccagggccttgtgctgccaatggcactcgaactcatgactgtgctcgtaggaagccccagaaaagatggcctcgtgtcgctgttgaccactagcgagggagccgacgaaccgcaacggctccaattcccgctgccgactgcacagcgctcgctcgagccaggaacgccccgctgggccaactacgtcaagggcgtgatccagtactaccctgccgcaccgctgcccggattttcagccgtcgtggtgtcgtcagtcccactcggaggaggcctctccagttcggcaagcctggaagtcgcaacctatacgttcctgcaacagctctgcccagacagcggaactattgccgcacgggcccaggtctgccaacaggcagagcactcgtttgctggaatgccttgtgggatcatggaccagttcatctccttgatgggccagaaaggtcacgccctcctcatcgactgcagatcgttggaaacctcactggtgccgctgtccgatcctaaactggctgtgctgattacgaattccaatgtccgccacagcctggcctccagcgaatacccggtccggcgcaggcagtgcgaggaagtggcaagagccctgggcaaagagtcactcagggaggtgcagcttgaagagctggaagcagcccgggacctggtgtccaaggagggcttccggcgggcccggcacgtggtcggcgaaattcgccggactgcccaggctgcggcggcacttcggagaggagactacagggccttcggtagactgatggtggaaagccatcggtcgctgagagacgactacgaagtgtcgtgcccggaactcgaccagctggtggaggctgcgctcgccgtgccaggggtctacggctcgcgcatgactggaggcgggttcgggggatgcaccgtgactctgctggaagcatccgcagccccacacgccatgcgccatatccaggaacactacggagggactgccaccttctacctgtcacaggccgccgacggagccaaggtgctgtgcctg

SEQ ID NO: 3187 - DNA, 1176 bp, Artificial Sequence
  derived and/or modified sequence
atggcggcacttagacaaccccaagtggccgagctgttggccgaggcccgccgcgctttccgggaggagttcggcgcggagcctgaactcgccgtaagcgcccccggcagggtgaatctgatcggagagcacactgattacaatcagggactcgttctgccaatggcgctggaactaatgacggtgctcgtaggttccccaaggaaggacggcctagtgtctctgttgaccacttcagaaggggctgacgagcctcagaggctgcagtttcctctcccaaccgcgcaacggagtctggagcctggcacaccacggtgggccaattatgttaaaggcgtgatccagtactatcccgcagcacctctgccagggttctccgccgtagtcgtttccagtgtacccctgggcggcgggttgagcagctctgcatccttagaggtggccacttatacatttcttcagcagctctgccccgactcaggcaccattgcagcccgggctcaggtgtgccagcaggccgaacacagtttcgctggaatgccatgcggcattatggaccaattcatcagtctaatgggccagaagggacatgctctattaattgactgtaggtcgctcgagacttcccttgttcccctaagcgatcccaaattggccgtactgattacaaacagtaatgtgcggcactccctggcaagttcagagtatccagtccgccgcaggcaatgtgaagaggtcgcacgggcccttgggaaggagtccctgagggaagttcagctagaagagctggaggcggcccgggacctcgtcagcaaggaaggatttaggagggccagacacgtggtgggagaaatccgtaggaccgcgcaagctgcagcagccctgaggaggggtgactatagagctttcggaaggctgatggtcgagagtcatagatcactgcgcgacgattatgaagtgagctgccccgagctggaccagctggtcgaagccgcattggcagtgcctggggtgtacgggagtcggatgacgggtggagggttcggcgggtgtactgtcaccttactcgaagcatctgctgctcctcacgcaatgcggcacatccaggaacattatgggggtaccgctacgttctacttatcgcaggcagcagatggagcaaaggtgctgtgtttg

SEQ ID NO: 3188 - DNA, 1176 bp, Artificial Sequence
  derived and/or modified sequence
atggcagcccttagacagcctcaggtggctgaactactcgccgaagctcggcgagcgtttcgtgaggaattcggcgctgaacctgagctggccgtatcagcacccgggagggtgaatctaatcggagagcatacagactacaatcagggcctggtcctgccaatggctctggaactcatgaccgtgctcgttggttctccccggaaggacggcctggtgtcactgctgaccactagcgagggagcggacgaaccccaaaggctgcagttcccattaccaactgctcaacgttcactggaacctggtactccaaggtgggccaattacgtaaagggcgttattcagtactaccctgccgctcccctgccagggtttagcgccgtggttgtctcttcggtgccactgggcgggggcctgagctcatctgcaagcctcgaagttgcaacttacacgttcctccaacagctgtgtcctgacagtggcacgatcgcggcccgggcacaggtgtgccaacaagcggagcattccttcgcagggatgccctgtggaatcatggaccaatttatctccctcatgggccagaaaggccacgccctgctgattgactgccggagtctggagacctcactggtgcccctttctgatccaaagctggccgtccttattaccaacagcaacgtaagacactcccttgcctcatcagagtatccggttcgccggagacagtgtgaagaagtagcccgggccttggggaaggaatcattgagagaagtccagctcgaagaactggaagccgcaagggacctggtgtccaaggaaggattcagacgggccaggcatgtggtcggtgagattagacggactgctcaggcggcagcagctctaagaaggggtgactacagagccttcgggcgactcatggtggaatcccaccgttccctgcgggatgactatgaggtcagctgccccgagctggatcagctcgttgaagcggccctggcagtcccaggggtgtatggtagcaggatgactggcggaggattcggcgggtgtaccgtgaccctgctggaagcgtccgcggccccacatgctatgaggcacattcaggaacactacggggggaccgcaacattctatctaagccaggcagccgacggggcaaaggtgttgtgtctc

SEQ ID NO: 3189 - DNA, 1176 bp, Artificial Sequence
  derived and/or modified sequence
atggcagcgcttcgacaaccacaggtggccgaactgctcgcagaagcacggagagcttttagggaagagtttggcgcggaaccagaactcgccgtgtccgcgccaggaagagtgaacctgattggggaacacactgattacaaccaagggctcgtcctccctatggcactcgaacttatgacggtgctggtgggaagcccccggaaggatggacttgtgtcgctgctgaccactagcgaaggagcagatgaacctcaacgcctccagttccctttgcccaccgcacaacgctccctggagcccggaacccctcggtgggcaaactacgtgaagggcgtgattcaatactaccctgccgcaccactccccggattttcagcggtggtcgtgagctccgtgccacttgggggcggcctttcgtcctcggcatcgctggaagtggcaacttacaccttcctgcagcagctttgtccagattcggggactatcgcagcaagggcacaggtgtgtcaacaggcggaacacagctttgccgggatgccatgtggaataatggatcaattcatttcgctcatgggtcagaagggtcatgcactgcttatcgactgtcggagtcttgaaacctcgctggtccctctgtcagatccaaagttggccgtgctcatcacgaattccaacgtgcggcattcgcttgcctcatcggaataccccgtcagacgcagacaatgtgaagaagtggctagagcccttggtaaggaatcacttagagaagtccaactcgaagaactggaagcagcaagggatctggtgtctaaggaaggttttaggcgcgctaggcatgtcgtcggtgagattagacgcactgcacaagcagcagcggcactgagacgaggagattatagggcatttggccgcctgatggtggaaagccacaggtcgcttagagacgattacgaagtgtcatgcccggaacttgatcaacttgttgaggcagcactggcagtcccgggagtgtacggttccagaatgaccggtggaggttttggaggctgtactgtgactcttctggaagcatcagcagcaccgcatgcaatgcgacacattcaagagcattacggtggaaccgcaactttttacctgtcacaagctgcagatggggcaaaggtgctgtgtctc

SEQ ID NO: 3190 - DNA, 1176 bp, Artificial Sequence
  derived and/or modified sequence
atggccgcacttaggcagccccaggtcgccgaactgctcgctgaggctcgtagggcattccgtgaagaatttggcgccgagcctgagcttgccgtgtcggcgcccgggcgcgtcaatctgatcggtgaacatactgattataaccaaggtctggttctgccaatggctctggaacttatgacagtgcttgttggctctcctcggaaagacggactggtgagtctgttgaccacgtccgaaggtgctgacgaacctcagaggctccagttccctcttccaacagcccaaagatccctagagccaggcactccaaggtgggccaactacgttaagggcgttattcagtattatcctgccgcccccctgcccggattttcggctgtcgtggtgagctccgtaccactggggggggggctcagctcctccgccagcctggaagtggccacctatacattcctgcagcaattgtgtcctgattctggaaccattgctgccagggctcaggtttgccagcaggcagaacatagctttgctggaatgccctgtggcataatggaccaattcatatccctgatgggtcagaaagggcacgcccttctgatcgattgccgatctttggagacatcattagttcccctgagtgatccgaagttagcggtactgattacaaacagtaatgtgcgacactcattggcctcgagcgagtacccagtcagaagaagacaatgtgaagaggtggcccgcgcactcggaaaagaatccttgagagaagtacaacttgaagaactcgaagcggcccgggatctggtgagcaaggaggggttcaggcgagcaaggcacgtggtgggcgagatcagaagaactgcacaggcggccgccgctctccgaagaggggattacagggccttcggaagactgatggttgagtctcataggtcgctcagggatgactatgaagtatcatgtcccgaactggatcagctggtcgaagctgcactggctgtcccaggagtgtacggttccagaatgaccggaggggggttcggcggctgtacggttactttgctggaagcgagcgccgccccccatgccatgagacacattcaggagcactacgggggcactgcaacattctacttatctcaggctgccgatggcgcaaaggtcttgtgtctg

SEQ ID NO: 3191 - DNA, 1176 bp, Artificial Sequence
  derived and/or modified sequence
atggccgctcttagacagccacaagtcgcagaattgctggcggaggcaagacgagccttccgcgaagaatttggtgccgagcctgaactggcggtgtcggccccgggcagagttaacctcatcggggaacacaccgattacaaccaaggattggtgctgccaatggccctcgaactgatgacggtcttggtggggtcccctcggaaggacggactcgtgtccctcctcactacttcggaaggagcggacgaaccgcagagactccaattccccctgccaaccgctcaaagatcgcttgagccggggacgccaaggtgggccaactacgtgaaaggagtcatccagtactacccggctgcgccattgccggggttttcagcagtggtggtttcgtccgttccgctgggtggaggcctgtcctcctctgcgtccctcgaggtggcgacttacactttcctccagcagctgtgcccggatagcggaactattgcggcacgggcacaggtctgccaacaggctgaacacagcttcgctggcatgccctgcggcatcatggatcagttcattagcctgatggggcaaaaagggcatgcgctgctgatagactgtaggtcgcttgaaaccagtctcgtgcctctgagcgatcccaagctggcagttcttatcacgaattcgaatgtgcgccactcgctggccagctctgaatacccggtgagacggcggcagtgtgaagaggtagcgcgggcgctggggaaagaatccctgcgggaagtgcagctggaggaactggaggcggcacgcgacctcgtgtccaaagagggatttcgccgcgcccggcatgtggtgggggagatcagacggaccgcacaggccgcagccgcgctgcgacggggtgactacagagctttcggaaggttgatggtggagtcacatcggtcactgcgtgatgactacgaggtcagctgcccagagctcgaccaactggtggaggcagcactggccgtccccggagtttacgggtcccgcatgacgggaggaggcttcggtggatgcaccgtgactctcctggaagcctcggcggccccgcacgccatgaggcacattcaggaacattatgggggaactgcaaccttctacctgtcgcaggctgctgacggagcaaaggtgctctgcctg

SEQ ID NO: 3192 - DNA, 1176 bp, Artificial Sequence
  derived and/or modified sequence
atggcagcactccgacagccgcaggtggcggagctcctggcggaagcaagaagagcatttcgggaagaattcggtgcagagccagaacttgccgtgtcggcccctggaagagtgaatttgattggtgaacatacggattacaatcaaggcctggttctgccaatggcactggaactgatgactgtgctggtgggatccccgagaaaggatggtcttgtgtccctgctgaccacctccgagggggcagatgaacctcagcgtctgcaattccctctgcccaccgcacagcggtcactggagcctggcacccctagatgggcaaattacgtgaagggagtgattcagtactacccagcagcccctctcccgggattctcggcagtcgtcgtgtcgtccgtccccctcggcggaggactgtcatcatcggcctcgcttgaagtggcaacctacacctttctgcaacaactctgtccagattcgggaaccattgctgctcgcgcacaagtgtgtcaacaggcagaacactcattcgcaggaatgccatgcgggattatggaccagtttatctccctgatgggacaaaagggtcacgcgcttcttattgattgtcggtccctcgagacttcactcgtgccactctccgacccgaaacttgcggtgcttattactaatagcaatgtgaggcattcattggcgtcgtccgaatacccagtccggaggagacagtgtgaggaagtcgccagagcactcggaaaggaaagccttagagaagtgcaactggaggaactggaagccgcaagggacctggtgtctaaggaaggattcagaagagccaggcacgtcgtgggcgaaattagacgtaccgcccaggcagctgcagcgctccgacgaggagattatagagcatttggacgtctcatggtcgagtcgcatcgcagcctgcgcgacgactacgaggtcagctgtcctgagctggaccaactggtggaagcagcgttggccgtgcctggggtttacgggagcaggatgaccggcggaggttttggaggatgcactgttaccctccttgaagcctccgccgctccacacgcaatgaggcacatacaagaacattacggcggaactgctacgttctacttgagccaggcggcagatggagcaaaggtcctttgtctg

SEQ ID NO: 3193 - DNA, 1176 bp, Artificial Sequence
  derived and/or modified sequence
atggccgcccttcggcagccacaggtagccgagcttctggccgaagctagacgagcatttagggaggaattcggggctgaacctgagctggccgtgtccgctccagggcgggtgaacttgataggagagcacaccgactacaaccaagggttagtgttgcccatggccctggagctcatgaccgtgctggtggggtctccacgcaaagacggactggtgtccctcctaacaacgtcggagggagctgatgagccacagcgacttcagttcccattgcctacagctcagcgctctctagaaccaggaacaccccgttgggccaattacgtgaagggcgtgattcagtattatccagctgccccactccctgggttttccgctgtggtagtgtcctctgtgccattggggggaggcctgagcagttcagcttctctggaagtggcgacatacacctttttgcagcagctttgtccagacagtggaacaattgcagctagggctcaggtgtgtcagcaggctgagcactctttcgccggcatgccttgtggcataatggatcaattcatttcactgatggggcagaagggacatgcccttctgattgactgtcgttccctggaaactagcctggtgccactttctgatcccaaacttgccgtattaatcacgaattctaacgtgaggcattctctggcctctagtgaatacccagtccgacgccgacagtgtgaggaggtggcaagagctctcggtaaggagagtctccgggaagtgcagctggaagagctcgaggcggctcgtgatcttgtctccaaagaggggttccgaagagcccgacacgttgttggcgagattcgaagaaccgcccaggccgccgcagcactccgcaggggtgactaccgtgccttcggacgcctcatggtggagagccaccggtccctaagagacgattatgaagtgtcgtgcccagagttggatcagctggtagaggccgctctggctgtacctggagtttacggctccagaatgaccggtggtggcttcggtggttgtacggtgacactgttggaggctagcgctgcgccccatgccatgcggcatattcaggagcactatggcggtaccgcaaccttctacctgagtcaggcagcggacggagcaaaggttctgtgtctc

SEQ ID NO: 3194 - DNA, 1203 bp, Artificial Sequence
  derived and/or modified sequence
atggccgccctgagacagccccaggtggccgagctgctggccgaggccagaagagccttcagagaggagttcggcgccgagcccgagctggccgtgagcgcccccggcagagtgaacctgatcggcgagcacaccgactacaaccagggcctggtgctgcccatgagagacagactgttccccaccctggagggcagaaagagaggcagcggcagagagagagtgagaggcagactgctggcccaggccagacccctgggcgccggcgcccccagactgcagcccggcagcatgttccccctgaactgcgaggccctgtgcgccacccagaagggcaccctgagagccagcggccacagaggcgcccccaccgccgacctgggcgagagaagcctgctggcccagcccgtgcagttcaccgaggaggagaccggcggcgccttcagacccatctgcagcctgggcagcgcccaggccagcagccccccctgccccaccgcccagggcagagtgcaggacggcctggtgagcctgctgaccaccagcgagggcgccgacgagccccagagactgcagttccccctgcccaccgcccagagaagcctggagcccggcacccccagatgggccaactacgtgaagggcgtgatccagtactaccccgccgcccccctgcccggcttcagcgccgtggtggtgagcagcgtgcccctgggcggcggcctgagcagcagcgccagcctggaggtggccacctacaccttcctgcagcagctgtgccccgacagcggcaccatcgccgccagagcccaggtgtgccagcaggccgagcacagcttcgccggcatgccctgcggcatcatggaccagttcatcagcctgatgggccagaagggccacgccctgctgatcgactgcagaagcctggagaccagcctggtgcccctgagcgaccccaagctggccgtgctgatcaccaacagcaacgtgagacacagcctggccagcagcgagtaccccgtgagaagaagacagtgcgaggaggtggccagagccctgggcaaggagagcctgagagaggtgcagctggaggagctggaggccgccagagacctggtgagcaaggagggcttcagaagagccagacacgtggtgggcgagatcagaagaaccgccgacggcgccaaggtgctgtgcctgtag

SEQ ID NO: 3195 - DNA, 1269 bp, Artificial Sequence
  derived and/or modified sequence
atgtgcgccccccccagaggcgccccccccgagcaccccgcccccaccggcctgtgcagaagcagctgcgccgagctgcaggccagagtgatggccgccctgagacagccccaggtggccgagctgctggccgaggccagaagagccttcagagaggagttcggcgccgagcccgagctggccgtgagcgcccccggcagagtgaacctgatcggcgagcacaccgactacaaccagggcctggtgctgcccatggccctggagctgatgaccgtgctggtgggcagccccagaaaggacggcctggtgagcctgctgaccaccagcgagggcgccgacgagccccagagactgcagttccccctgcccaccgcccagagaagcctggagcccggcacccccagatgggccaactacgtgaagggcgtgatccagtactaccccgccgcccccctgcccggcttcagcgccgtggtggtgagcagcgtgcccctgggcggcggcctgagcagcagcgccagcctggaggtggccacctacaccttcctgcagcagctgtgccccgacagcggcaccatcgccgccagagcccaggtgtgccagcaggccgagcacagcttcgccggcatgccctgcggcatcatggaccagttcatcagcctgatgggccagaagggccacgccctgctgatcgactgcagaagcctggagaccagcctggtgcccctgagcgaccccaagctggccgtgctgatcaccaacagcaacgtgagacacagcctggccagcagcgagtaccccgtgagaagaagacagtgcgaggaggtggccagagccctgggcaaggagagcctgagagaggtgcagctggaggagctggaggccgccagagacctggtgagcaaggagggcttcagaagagccagacacgtggtgggcgagatcagaagaaccgcccaggccgccgccgccctgagaagaggcgactacagagccttcggcagactgatggtggagagccacagaagcctgagagacgactacgaggtgagctgccccgagctggaccagctggtggaggccgccctggccgtgcccggcgtgtacggcagcagaatgaccggcggcggcttcggcggctgcaccgtgaccctgctggaggccagcgccgccccccacgccatgagacacatccaggagcactacggcggcaccgccaccttctacctgagccaggccgccgacggcgccaaggtgctgtgcctgtag

SEQ ID NO: 3196 - DNA, 1179 bp, Artificial Sequence
  derived and/or modified sequence
atggccgccctgagacagccccaggtggccgagctgctggccgaggccagaagagccttcagagaggagttcggcgccgagcccgagctggccgtgagcgcccccggcagagtgaacctgatcggcgagcacaccgactacaaccagggcctggtgctgcccatggccctggagctgatgaccgtgctggtgggcagccccagaaaggacggcctggtgagcctgctgaccaccagcgagggcgccgacgagccccagagactgcagttccccctgcccaccgcccagagaagcctggagcccggcacccccagatgggccaactacgtgaagggcgtgatccagtactaccccgccgcccccctgcccggcttcagcgccgtggtggtgagcagcgtgcccctgggcggcggcctgagcagcagcgccagcctggaggtggccacctacaccttcctgcagcagctgtgccccgacagcggcaccatcgccgccagagcccaggtgtgccagcaggccgagcacagcttcgccggcatgccctgcggcatcatggaccagttcatcagcctgatgggccagaagggccacgccctgctgatcgactgcagaagcctggagaccagcctggtgcccctgagcgaccccaagctggccgtgctgatcaccaacagcaacgtgagacacagcctggccagcagcgagtaccccgtgagaagaagacagtgcgaggaggtggccagagccctgggcaaggagagcctgagagaggtgcagctggaggagctggaggccgccagagacctggtgagcaaggagggcttcagaagagccagacacgtggtgggcgagatcagaagaaccgcccaggccgccgccgccctgagaagaggcgactacagagccttcggcagactgatggtggagagccacagaagcctgagagacgactacgaggtgagctgccccgagctggaccagctggtggaggccgccctggccgtgcccggcgtgtacggcagcagaatgaccggcggcggcttcggcggctgcaccgtgaccctgctggaggccagcgccgccccccacgccatgagacacatccaggagcactacggcggcaccgccaccttctacctgagccaggccgccgacggcgccaaggtgctgtgcctgtag

SEQ ID NO: 3197 - DNA, 1322 bp, Artificial Sequence
  derived and/or modified sequence
gggaaataagagagaaaagaagagtaagaagaaatataagagccaccatggcggccttgcgacagccgcaagtcgcggaactgctggctgaagcccggagagcgttccgcgaggagttcggagccgaacccgagctcgcggtatcagcaccaggacgggtgaaccttattggggaacatactgattacaaccaggggctcgtattgcccatggccctggaacttatgaccgtacttgtcgggtcaccccgcaaggacggcttggtgagcttgcttacgacatccgagggtgctgatgaaccgcagcgacttcagttccctctccctacggcgcaacggtcattggagccagggacgcccagatgggccaattatgtgaaaggagtgattcagtattatcccgcagcgccgctccctggattttcagcagtagtggtgtcgagcgtacctcttggtggaggactgtcgtcgtccgcatccctcgaggtcgcaacctacacgtttttgcagcagctctgtccggactcggggaccatcgcggcgagagcccaagtgtgccaacaggcggagcacagctttgccggcatgccatgtggaatcatggaccagttcatctcgctgatgggtcagaaaggacatgctctcctgatcgattgccgctcgctggaaacatcgctggtgcccttgtccgacccgaagctggctgtgctgatcacgaattccaacgtccgccatagcttggcctcaagcgagtacccggtgaggaggcgacagtgcgaggaggtcgcccgagcgcttggaaaagaatcgttgagggaggtgcagcttgaagagcttgaagcggcgagggatcttgtctcaaaggaggggtttcgacgcgcgaggcacgtcgtcggggagattcggagaacagcccaggcggctgccgcactcagacgcggggattatagggcgtttggacggttgatggtcgagtcgcacagaagcttgagggacgactacgaagtgtcgtgcccggagctggaccagctcgtagaagcggctcttgcggtccccggtgtgtacgggtccagaatgacgggcggtggcttcggagggtgtacagtcactctcttggaagcgtcggccgcaccccacgcgatgcggcatatccaagaacactacggaggtactgcaaccttctatcttagccaggcggcagatggtgcgaaggtattgtgtctctgataagctgccttctgcggggcttgccttctggccatgcccttcttctctcccttgcacctgtacctcttggtctttgaataaagcctgagtaggaag

SEQ ID NO: 3198 - DNA, 1203 bp, Artificial Sequence
  derived and/or modified sequence
atggcggcattacgacagccacaggtggcagagctccttgccgaagcgcggcgggcctttagagaggagttcggagctgaacctgaactcgccgtgtccgcccccgggcgggttaatttgattggggaacacaccgactacaatcagggccttgtgctacccatgagggacagactattccccacgctcgagggaagaaagaggggatccggccgggaacgagtgcgggggaggctgctggcccaggctcgccctctgggcgccggcgcgccaaggctgcaaccagggtccatgtttcccctgaactgcgaggccttatgtgccacgcaaaagggcacattacgagctagcggccatcggggtgccccaactgcagatctcggagagcgatccctcctggctcaaccagtccagttcacagaagaagagaccggaggtgcatttagacccatctgttcccttgggtctgctcaggctagctctcctccatgccccaccgctcagggtcgagtccaggacggcctagtgtccctactcactacgtctgagggagctgacgaacctcagagactgcagttcccgctacccacagcccagcgatcactcgaacctgggacaccgcggtgggcgaactatgtgaaaggcgttatccagtattacccggcagcccccctcccaggatttagtgccgtcgtagtgagtagtgtgcccctgggcggggggttaagtagctccgccagtctggaggtggccacgtatacattccttcaacaactgtgcccggacagtggaacaatagcggccagggcccaagtctgccagcaggccgagcacagctttgccggcatgccgtgtggaatcatggaccagttcatatcccttatgggccaaaaaggccacgccctgctgattgattgcaggagcctggagaccagcctcgtgcctttaagcgatcccaaactggccgttcttatcacaaacagcaatgtgagacacagtttagcctcatctgagtatccagtcagaaggaggcaatgcgaagaagtcgcaagagcattgggaaaggaaagtttgcgcgaagtgcaattggaagaactggaagccgcgcgtgatctcgtgagtaaagagggatttaggagggctcgccacgtggttggggagataaggagaacagcagacggtgccaaagtgctgtgcctatag

SEQ ID NO: 3199 - DNA, 1269 bp, Artificial Sequence
  derived and/or modified sequence
atgtgcgcccccccaaggggcgctccgccagagcatccggctccgacaggcctgtgccgatcttcttgtgctgaactgcaggctcgggttatggctgccttacgacagccacaggtcgctgaattgctggctgaggctcggcgagcctttagagaggaattcggtgctgagcccgagcttgcggtgtctgccccagggagagtcaaccttatcggcgagcatactgactacaatcagggactcgtccttcccatggccctggaattgatgactgtgttagtcggctctcctagaaaggacggattggtttcattgctgactacctcagagggcgccgatgaacctcaaaggttgcaatttccactgcccactgcccagagatcactcgaacctggaacccccaggtgggccaactacgtgaagggagtcatccagtactacccggccgcacctcttccaggattttccgccgtagttgtgtcctccgttccgcttggtggaggtctctccagctcggcctctcttgaggtggccacgtacacattcctacagcagctctgccctgatagcggaacgatcgctgctagagctcaagtttgccagcaggctgaacactccttcgctggtatgccgtgcggaattatggatcagttcatcagcctgatgggccagaagggccacgctctgctgatcgactgccgtagcctggaaaccagcctcgtgccactatctgatccaaagctcgccgtcctaattacaaacagcaacgtcaggcattccctggcttctagcgagtaccccgtgaggcgaaggcagtgcgaggaagtggctagggccctcgggaaggaatctctgcgcgaggtccagctggaggagctggaagctgctcgtgatttggtgtctaaggagggctttcgcagggctagacatgtcgtgggggagatcaggaggacggcacaggctgcggcagctctgcggcgcggtgactacagagctttcggcagactgatggtcgagagccacagatccctcagagatgattatgaagtgtcttgcccagagttggatcagcttgtggaggcagccttggccgtgccgggggtttacggctctcgcatgacgggcggaggattcggcggctgcaccgtcacgctccttgaggccagcgcagctcctcacgcaatgagacacatccaggaacattatggcggcacagccacattctacctttctcaggcagccgacggcgctaaggttttgtgcctgtag

SEQ ID NO: 3200 - DNA, 1179 bp, Artificial Sequence
  derived and/or modified sequence
atggccgctcttcgacagccgcaggtggccgagcttctcgccgaagcgcgccgcgcatttcgcgaggaatttggcgctgaacccgagctggccgttagcgccccaggccgggtaaacctcattggtgagcataccgattacaatcagggcttagtgctgccgatggctctcgaactcatgactgttctggtaggctcacctagaaaggacggattggtgagtctactcacgacaagtgaaggggcggatgagcctcaacggctgcagtttccactccccacagcgcagcgttctctagagcctggcaccccccggtgggcaaattacgtcaagggagtgattcaatattaccccgctgctccgttgcctggatttagcgctgtggtcgtgtcatcggtgccccttggagggggactttcgtctagcgcatccctggaggtcgccacatatacattcctgcagcagttatgtcccgatagtggcactatagcagcacgcgcacaggtgtgccagcaggctgagcacagctttgctggtatgccttgcggaattatggaccaattcataagtctgatgggacagaaggggcatgcactgctaatcgactgtcgctctctggaaacgtccctggtccctctatccgatcctaaactggctgtgttgataacaaactcaaatgtcagacattcactggcatccagtgagtacccagtccgcagacgccagtgcgaggaagtggcacgtgcattgggcaaggaaagcttgcgtgaagtccagttagaggagctcgaggccgcccgcgacctggtgtcgaaggaggggttcagaagagcaaggcacgtggtgggagagatccggaggacagcccaggctgcagccgccctcaggcgcggcgactaccgggcatttgggagacttatggtcgaatctcaccgatcactccgggacgattacgaggtgtcttgtcctgagcttgatcagctggttgaggccgcgttggctgtaccaggtgtttacgggtcccgcatgacgggaggcggtttcggcggctgcaccgtgactctcctcgaagcctccgcggcgccccacgcaatgaggcacatccaagaacattacggcggaactgccaccttctacctgtcccaggcagctgatggcgcaaaggtcctgtgcctctag

SEQ ID NO: 3201 - DNA, 1203 bp, Artificial Sequence
  derived and/or modified sequence
atggccgccctgcggcagccccaggtggccgagctgctggccgaggcccggcgggccttccgggaggagtttggagctgagcctgagctggccgtgtctgcccctggccgggtgaacctgattggagagcacacagactacaaccagggcctggtgctgcccatgagggacaggctcttccccaccctggagggcaggaagaggggcagcggccgggagcgggtgcggggccgcctgctggcccaggcccggcccctgggcgctggggccccccggctgcagcccggctccatgttccccctgaactgtgaggccctgtgtgccacccagaagggcaccctgcgggccagcggccacagaggagcccccacagctgacctgggggagaggagcctgctggcccagcctgtgcagttcacagaggaggagaccggcggggccttccggcccatctgcagcctgggcagcgcccaggccagcagccccccctgccccacagcccagggccgggtgcaggacggcctggtgtccctgctgaccaccagcgagggcgcagatgagccccagaggctgcagttccccctgcccacagcccagaggagcctggagcccggcaccccccgctgggccaactacgtgaagggcgtcatccagtactacccagctgcccccctgcccggcttctctgctgtggtggtgtcctctgtgcccctgggcggcggcctgagcagcagcgccagcctggaggtggccacctacaccttcctgcagcagctgtgcccagattctggcaccatcgccgcccgggcccaggtgtgccagcaggccgagcacagctttgctggcatgccctgtggcatcatggaccagttcatcagcctgatgggccagaagggccacgccctgctgattgactgccgcagcctggagaccagcctggtgcccctgagtgaccccaagctggccgtgctgatcaccaacagcaatgtgcgccacagcctggccagcagcgagtaccctgtgagaagacggcagtgtgaggaggtggcccgggccctgggcaaggagagcctgcgggaggtgcagctggaggagctggaggccgcccgggacctggtgtccaaggagggcttcagaagagcccggcacgtggtgggggagatcagaagaacagcagatggagccaaggtgctgtgcctgtag

SEQ ID NO: 3202 - DNA, 1269 bp, Artificial Sequence
  derived and/or modified sequence
atgtgtgccccacccaggggggcccctcctgagcacccagcccccaccggcctgtgccgcagcagctgtgccgagctgcaggcccgggtgatggccgccctgcggcagccccaggtggccgagctgctggccgaggcccggcgggccttccgggaggagtttggagctgagcctgagctggccgtgtctgcccctggccgggtgaacctgattggagagcacacagactacaaccagggcctggtgctgcccatggccctggagctgatgacagtgctggtgggcagccccaggaaggatggcctggtgtccctgctgaccaccagcgagggcgcagatgagccccagaggctgcagttccccctgcccacagcccagaggagcctggagcccggcaccccccgctgggccaactacgtgaagggcgtcatccagtactacccagctgcccccctgcccggcttctctgctgtggtggtgtcctctgtgcccctgggcggcggcctgagcagcagcgccagcctggaggtggccacctacaccttcctgcagcagctgtgcccagacagcggcaccatcgccgcccgggcccaggtgtgccagcaggccgagcacagctttgctggcatgccctgtggcatcatggaccagttcatcagcctgatgggccagaagggccacgccctgctgattgactgccgcagcctggagaccagcctggtgcccctgagtgaccccaagctggccgtgctgatcaccaacagcaatgtgcgccacagcctggccagcagcgagtaccctgtgagaagacggcagtgtgaggaggtggcccgggccctgggcaaggagagcctgcgggaggtgcagctggaggagctggaggccgcccgggacctggtgtccaaggagggcttccggcgggcccggcacgtggtgggggagatccggaggacagcccaggccgctgctgccctgcggcggggggactaccgggccttcggccgcctgatggtggagagccacaggagcctgagagatgattatgaggtgtcctgcccagagctggaccagctggtggaggccgccctggccgtgcctggggtgtatggcagcaggatgactggaggcggctttggaggctgcaccgtgaccctgctggaggccagcgctgcccctcatgccatgaggcacatccaggagcactacggcggcacagccaccttctacctgagccaggccgcagatggagccaaggtgctgtgcctgtag

SEQ ID NO: 3203 - DNA, 1179 bp, Artificial Sequence
  derived and/or modified sequence
atggccgccctgcggcagccccaggtggccgagctgctggccgaggcccggcgggccttccgggaggagtttggagctgagcctgagctggccgtgtctgcccctggccgggtgaacctgattggagagcacacagactacaaccagggcctggtgctgcccatggccctggagctgatgacagtgctggtgggcagccccaggaaggatggcctggtgtccctgctgaccaccagcgagggcgcagatgagccccagaggctgcagttccccctgcccacagcccagaggagcctggagcccggcaccccccgctgggccaactacgtgaagggcgtcatccagtactacccagctgcccccctgcccggcttctctgctgtggtggtgtcctctgtgcccctgggcggcggcctgagcagcagcgccagcctggaggtggccacctacaccttcctgcagcagctgtgcccagacagcggcaccatcgccgcccgggcccaggtgtgccagcaggccgagcacagctttgctggcatgccctgtggcatcatggaccagttcatcagcctgatgggccagaagggccacgccctgctgattgactgccgcagcctggagaccagcctggtgcccctgagtgaccccaagctggccgtgctgatcaccaacagcaatgtgcgccacagcctggccagcagcgagtaccctgtgagaagacggcagtgtgaggaggtggcccgggccctgggcaaggagagcctgcgggaggtgcagctggaggagctggaggccgcccgggacctggtgtccaaggagggcttccggcgggcccggcacgtggtgggggagatccggaggacagcccaggccgctgctgccctgcggcggggggactaccgggccttcggccgcctgatggtggagagccacaggagcctgagagatgattatgaggtgtcctgcccagagctggaccagctggtggaggccgccctggccgtgcctggggtgtatggcagcaggatgactggaggcggctttggaggctgcaccgtgaccctgctggaggccagcgctgcccctcatgccatgaggcacatccaggagcactacggcggcacagccaccttctacctgagccaggccgcagatggagccaaggtgctgtgcctgtag

SEQ ID NO: 3204 - DNA, 1361 bp, Artificial Sequence
  derived and/or modified sequence
cccgagcatcccgcgccgacggggctgtgccggagcagctgtgcagagctgcaggcgcgcgtcatggctgctttgagacagccccaggtcgcggagctgctggccgaggcccggcgagccttccgggaggagttcggggccgagcccgagctggccgtgtcagcgccgggccgcgtcaacctcatcggggaacacacggactacaaccagggcctggtgctgcctatggctctggagctcatgacggtgctggtgggcagcccccgcaaggatgggctggtgtctctcctcaccacctctgagggtgccgatgagccccagcggctgcagtttccactgcccacagcccagcgctcgctggagcctgggactcctcggtgggccaactatgtcaagggagtgattcagtactacccagctgcccccctccctggcttcagtgcagtggtggtcagctcagtgcccctggggggtggcctgtccagctcagcatccttggaagtggccacgtacaccttcctccagcagctctgtccagactcgggcacaatagctgcccgcgcccaggtgtgtcagcaggccgagcacagcttcgcagggatgccctgtggcatcatggaccagttcatctcacttatgggacagaaaggccacgcgctgctcattgactgcaggtccttggagaccagcctggtgccactctcggaccccaagctggccgtgctcatcaccaactctaatgtccgccactccctggcctccagcgagtaccctgtgcggcggcgccaatgtgaagaagtggcccgggcgctgggcaaggaaagcctccgggaggtacaactggaagagctagaggctgccagggacctggtgagcaaagagggcttccggcgggcccggcacgtggtgggggagattcggcgcacggcccaggcagcggccgccctgagacgtggcgactacagagcctttggccgcctcatggtggagagccaccgctcactcagagacgactatgaggtgagctgcccagagctggaccagctggtggaggctgcgcttgctgtgcctggggtttatggcagccgcatgacgggcggtggcttcggtggctgcacggtgacactgctggaggcctccgctgctccccacgccatgcggcacatccaggagcactacggcgggactgccaccttctacctctctcaagcagccgatggagccaaggtgctgtgcttgtgaggcacccccaggacagcacacggtgagggtgcggggcctgcaggccagtcccacggctctgtgcccggtgccatcttccatatccgggtgctcaataaacttgtgcctccaatgtggta

SEQ ID NO: 3205 - DNA, 1247 bp, Artificial Sequence
  derived and/or modified sequence
cggggctgtgccggagcagctgtgcagagctgcaggcgcgcgtcatggctgctttgagacagccccaggtcgcggagctgctggccgaggcccggcgagccttccgggaggagttcggggccgagcccgagctggccgtgtcagcgccgggccgcgtcaacctcatcggggaacacacggactacaaccagggcctggtgctgcctatgcgggacaggctgttccccacgttggaagggaggaagcgaggaagtggccgggagagggtgcgcggccgcctcttggctcaagcccgccctctgggggctggggctcctcgccttcaacctgggagcatgttccccttaaactgtgaggccctgtgtgccacgcagaaggggacactccgcgcctccggccaccgtggggccccaaccgcagacctgggcgaacgtagccttctggcccagcccgttcaatttacagaggaggaaacggggggcgctttccgccccatctgcagcttggggagtgcacaggctagctctcccccttgccccacagctcagggcagagtccaggatgggctggtgtctctcctcaccacctctgagggtgccgatgagccccagcggctgcagtttccactgcccacagcccagcgctcgctggagcctgggactcctcggtgggccaactatgtcaagggagtgattcagtactacccagctgcccccctccctggcttcagtgcagtggtggtcagctcagtgcccctggggggtggcctgtccagctcagcatccttggaagtggccacgtacaccttcctccagcagctctgtccagactcgggcacaatagctgcccgcgcccaggtgtgtcagcaggccgagcacagcttcgcagggatgccctgtggcatcatggaccagttcatctcacttatgggacagaaaggccacgcgctgctcattgactgcaggtccttggagaccagcctggtgccactctcggaccccaagctggccgtgctcatcaccaactctaatgtccgccactccctggcctccagcgagtaccctgtgcggcggcgccaatgtgaagaagtggcccgggcgctgggcaaggaaagcctccgggaggtacaactggaagagctagaggctgccagggacctggtgagcaaagagggcttccggcgggcccggcacgtggtgggggagattcggcgcacggccgatggagccaaggtgctgtgcttgtga

SEQ ID NO: 3206 - DNA, 1379 bp, Artificial Sequence
  derived and/or modified sequence
atgtgcgcacccccgcgcggggccccgcccgagcatcccgcgccgacggggctgtgccggagcagctgtgcagagctgcaggcgcgcgtcatggctgctttgagacagccccaggtcgcggagctgctggccgaggcccggcgagccttccgggaggagttcggggccgagcccgagctggccgtgtcagcgccgggccgcgtcaacctcatcggggaacacacggactacaaccagggcctggtgctgcctatggctctggagctcatgacggtgctggtgggcagcccccgcaaggatgggctggtgtctctcctcaccacctctgagggtgccgatgagccccagcggctgcagtttccactgcccacagcccagcgctcgctggagcctgggactcctcggtgggccaactatgtcaagggagtgattcagtactacccagctgcccccctccctggcttcagtgcagtggtggtcagctcagtgcccctggggggtggcctgtccagctcagcatccttggaagtggccacgtacaccttcctccagcagctctgtccagactcgggcacaatagctgcccgcgcccaggtgtgtcagcaggccgagcacagcttcgcagggatgccctgtggcatcatggaccagttcatctcacttatgggacagaaaggccacgcgctgctcattgactgcaggtccttggagaccagcctggtgccactctcggaccccaagctggccgtgctcatcaccaactctaatgtccgccactccctggcctccagcgagtaccctgtgcggcggcgccaatgtgaagaagtggcccgggcgctgggcaaggaaagcctccgggaggtacaactggaagagctagaggctgccagggacctggtgagcaaagagggcttccggcgggcccggcacgtggtgggggagattcggcgcacggcccaggcagcggccgccctgagacgtggcgactacagagcctttggccgcctcatggtggagagccaccgctcactcagagacgactatgaggtgagctgcccagagctggaccagctggtggaggctgcgcttgctgtgcctggggtttatggcagccgcatgacgggcggtggcttcggtggctgcacggtgacactgctggaggcctccgctgctccccacgccatgcggcacatccaggagcactacggcgggactgccaccttctacctctctcaagcagccgatggagccaaggtgctgtgcttgtgaggcacccccaggacagcacacggtgagggtgcggggcctgcaggccagtcccacggctctgtgcccggtgccatcttccatatccgggtgctcaataaacttgtgcctcc

SEQ ID NO: 3207 - DNA, 1203 bp, Artificial Sequence
  derived and/or modified sequence
atggccgccctgcggcagccccaggtggccgagctgctggccgaggccagaagggctttccgcgaagaatttggggcagagcctgaactggccgttagtgctcccggccgggtgaatttaataggggagcataccgactacaatcaaggtctggtcctgccgatgcgggatcgactgttccctacacttgagggaagaaagcgaggctccggccgggaaagggtgcggggacgacttctggcacaagcgcggcctctgggagctggagctccgcgactgcaacctggaagcatgtttcctctcaattgtgaggccctctgcgctacccagaagggaacactgagggcctctggccataggggcgcgccgaccgctgacctcggtgagcgttcattgttggcccagccagtgcagtttacagaggaagagacggggggcgcctttcggcccatctgctcactgggatccgcccaggcaagcagcccaccctgcccgaccgcccagggacgtgtgcaggatggcctagtaagcctgctcactacatctgaaggggcagatgaaccccagcgcctccagttcccgttgccaaccgctcagagatcattggagccaggcacccctcgctgggctaactatgtgaagggcgtaattcaatattaccccgccgctcctcttcccgggttttctgcagttgtggtgtcatcagtccccctgggtggcgggctgagttcctcagccagccttgaagtcgccacatacacattcctgcagcagctttgtccagattccggcactattgctgccagagcccaggtttgtcagcaggccgagcatagcttcgccggtatgccttgtggcataatggatcagttcatcagtctcatgggccagaagggacatgccctgttaattgactgccggtctttggaaacatcactggtgccgctcagcgatccaaagctggcagtactgattacaaactctaatgttcgccattccctggcatcaagcgaatatcccgtgaggcgccgtcaatgtgaggaggtcgccagggcacttggaaaggagagcttaagagaggtgcaattagaggaattggaagccgcaagggatctggtgtccaaggaaggtttccgcagggctcggcatgtggtcggggagatccgccggaccgccgatggggctaaggtgctgtgcttatag

SEQ ID NO: 3208 - DNA, 1269 bp, Artificial Sequence
  derived and/or modified sequence
atgtgcgcccccccccggggcgccccccccgagcaccccgcccccacgggcctatgtagaagctcgtgtgccgagttacaggctcgggtcatggctgcactgaggcagccgcaggtggcggagcttctcgctgaggcacggagggcatttcgagaagagttcggagccgagcctgaactggccgtttctgcgccaggaagagtaaaccttatcggcgagcacactgactataaccagggactcgttctgcctatggccctagaattgatgacggtccttgttggatccccgaggaaggatggcctggtctctctcctgacaacaagtgaaggagctgatgagccgcagcgcctacaattccctctccctaccgcacagcgtagcctggagccaggaacgccccggtgggccaactacgtgaagggagtgatccaatattacccggccgcacctctgcccggcttcagcgctgttgtggtgtcatcagttcctctggggggtggcctcagctcaagcgccagcctcgaggttgccacttacactttccttcagcagctctgccctgactcagggacgatcgccgctcgtgcgcaggtctgccagcaggcagaacactcatttgcgggcatgccctgcgggataatggaccagttcatttctttaatgggtcagaaaggccacgctcttctgattgattgtaggagcctcgaaacatccctggttcctctgtcggacccaaaactggcagttctaatcactaattcgaatgtacgacactccctggccagctcggaataccctgttagaagaaggcagtgcgaagaggtcgctcgtgcacttggcaaagaatcgttaagggaagtgcagttggaagagttggaggcagcccgggatctggtgtccaaagagggattccgcagggccaggcatgtcgtcggagagatccggaggactgcccaggcagcagccgcccttcgccgtggtgattaccgggcctttgggagactgatggtcgaaagccaccgctcactccgggatgattacgaggttagttgtccggagctagaccaactggttgaggctgctctcgcagtaccaggagtctacggaagcaggatgacaggaggcggttttggcgggtgcacggtgaccttgcttgaggcatcggctgccccacacgccatgaggcacatccaagagcattatggcggcacagcaacattctacctaagccaagcagcagatggggccaaagtgctatgcctgtag

SEQ ID NO: 3209 - DNA, 1179 bp, Artificial Sequence
  derived and/or modified sequence
atggccgccctgcggcagccccaggtggccgagctgctggccgaggctcggagggcttttagggaagaatttggagctgaacccgagttagcagtgtcagcaccaggcagggttaatttgatcggggagcataccgattacaatcagggcctcgtactgcctatggccttggagttaatgacggttttggttggctctccgaggaaagatgggctggtgagcttgctgaccacatctgaaggggctgacgaaccgcagcggttacagttcccactgccgaccgctcagcgcagtcttgaaccgggtacgcctaggtgggccaactatgttaagggggtgattcagtattatccagccgccccattgcccggtttttctgccgtcgtggtgtcatctgtccccctgggcggaggactgtcctcatccgcgtccctagaggtggcaacctatacctttcttcagcagttgtgccctgattctggcacaatcgctgctcgagctcaggtgtgccagcaggctgagcactcatttgctggaatgccttgcggcataatggatcagtttatttctctcatggggcagaaagggcacgcactgctcatcgattgccgttccctggaaacaagccttgtgcccttaagcgatccgaagctcgccgtccttattaccaatagtaacgttcgccattcccttgcgtcctccgagtatccagttaggaggcggcagtgcgaggaggtcgctcgcgctttgggcaaagaatccctgcgggaggtccagctggaggagcttgaagccgccagagacttagtctcaaaggagggctttcgacgcgcccggcatgtcgtcggcgaaatacggcgcaccgctcaggcagctgctgcactgcgaaggggcgattaccgggcgtttggacggctgatggtggaatcacaccggagcctgcgtgacgactatgaggtgtcctgtccagaattggatcagctggtcgaggccgccttggcggtcccgggagtgtacgggagcaggatgaccggcggaggctttggaggctgtacggttaccttattggaggccagcgcagcgccccacgcgatgagacacattcaagagcattacggaggcacagctactttctacctctcccaggccgcggacggagccaaagtcctctgtttatag

SEQ ID NO: 3210 - DNA, 1866 bp, Artificial Sequence
  derived and/or modified sequence
ggcgtgagccactgcgcccggcccaaacttgtctgtctttatctctacttacagtgagtgtcaggtcaccctcttggagaccggtgatcagaggctgatgacctctcacagctgctggccctggggacctaggggatccctttgggaatcccaggtcaaccgggtgccagctccattgctctggctgtgtgggtggtggtgggtggtgaggcacatagaaagtcaccagcgccagggaagggcagctcagaaatcctggtcatgccaagtgccactcagggctattctcactctagtgagtgctcattggttcttcccgaagtccagagggaaggacaccatcgggggcgctgtatcccacccggcaccattagcccctgccacccaccacccagcagctggattcccacgggagttgcgggtgggggcggaaccggctgaggtctgggggcggggcgtccgggcgcggggcggggctggcgggaatgtgcgcacccccgcgcggggccccgcccgagcatcccgcgccgacggggctgtgccggagcagctgtgcagagctgcaggcgcgcgtcatggctgctttgagacagccccaggtcgcggagctgctggccgaggcccggcgagccttccgggaggagttcggggccgagcccgagctggccgtgtcagcgccgggccgcgtcaacctcatcggggaacacacggactacaaccagggcctggtgctgcctatggctctggagctcatgacggtgctggtgggcagcccccgcaaggatgggctggtgtctctcctcaccacctctgagggtgccgatgagccccagcggctgcagtttccactgcccacagcccagcgctcgctggagcctgggactcctcggtgggccaactatgtcaagggagtgattcagtactacccagctgcccccctccctggcttcagtgcagtggtggtcagctcagtgcccctggggggtggcctgtccagctcagcatccttggaagtggccacgtacaccttcctccagcagctctgtccagactcgggcacaatagctgcccgcgcccaggtgtgtcagcaggccgagcacagcttcgcagggatgccctgtggcatcatggaccagttcatctcacttatgggacagaaaggccacgcgctgctcattgactgcaggtccttggagaccagcctggtgccactctcggaccccaagctggccgtgctcatcaccaactctaatgtccgccactccctggcctccagcgagtaccctgtgcggcggcgccaatgtgaagaagtggcccgggcgctgggcaaggaaagcctccgggaggtacaactggaagagctagaggctgccagggacctggtgagcaaagagggcttccggcgggcccggcacgtggtgggggagattcggcgcacggcccaggcagcggccgccctgagacgtggcgactacagagcctttggccgcctcatggtggagagccaccgctcactcagagacgactatgaggtgagctgcccagagctggaccagctggtggaggctgcgcttgctgtgcctggggtttatggcagccgcatgacgggcggtggcttcggtggctgcacggtgacactgctggaggcctccgctgctccccacgccatgcggcacatccaggagcactacggcgggactgccaccttctacctctctcaagcagccgatggagccaaggtgctgtgcttgtgaggcacccccaggacagcacacggtgagggtgcggggcctgcaggccagtcccacggctctgtgcccggtgccatcttccatatccgggtgctcaataaacttgtgcctccaa

SEQ ID NO: 3211 - DNA, 1203 bp, Artificial Sequence
  derived and/or modified sequence
atggcagccctccgtcaacctcaagtagccgaactactcgctgaggcaaggcgggcattccgcgaagagttcggcgctgagcctgagttggctgtgtctgcccctgggcgagtcaatttgataggagaacacaccgactacaatcagggccttgtccttcccatgcgggatcgactcttcccaaccctggaaggccgaaagagggggtctggccgtgagagagtgaggggacggcttctcgcgcaggctcgccctcttggagccggagctcccaggcttcagccagggtccatgttcccactgaattgcgaggcactgtgcgcaacgcagaaggggacgcttcgggcaagcggacacagaggggcaccgacagcagacctgggagagcgcagtttactggcccagcccgtccaatttacggaggaggagactggaggcgctttcagacctatctgtagcctaggctcggctcaggcctcctcccctccatgtccaacagcgcaaggcagggtgcaagacggtttggtgtccctgctcaccaccagcgagggggctgatgagccccagagactgcagttcccattacccacagctcagcggtctttggaacccggaactcccaggtgggccaactacgttaagggggtaatccaatactacccagccgcaccactgcctggcttttccgctgttgtggtatcatccgtccctctcgggggaggtttaagttcatcggcaagcctggaagtcgccacttacacatttttgcagcagctttgtccagactcaggtacaatcgctgcgagagcccaagtgtgccagcaagcggaacactccttcgctgggatgccctgcggtatcatggatcagtttatatctctgatggggcaaaaggggcatgctctcctcattgactgccggagtctggaaacatcattagtgccgcttagcgatcctaaactcgctgtgcttatcacaaactccaacgttcgtcatagcctggcctccagcgagtacccagtgagaagacgtcagtgtgaagaggtagctcgtgcccttggcaaggagtcgctccgggaagtgcagttagaggaactggaggcagctagggaccttgtgtcaaaagaaggctttaggcgggctcgtcacgtagtgggcgagatccgccgtactgccgatggcgctaaggtcctctgtttgtag

SEQ ID NO: 3212 - DNA, 1269 bp, Artificial Sequence
  derived and/or modified sequence
atgtgtgccccaccacgcggtgccccaccagagcacccggctcctactggcctgtgtaggtcctcttgtgccgagctgcaagccagagtcatggccgctcttcggcagccccaggttgctgaactgcttgccgaagccaggcgggcttttagagaagaattcggcgctgagccggagttggctgtttcagcccctggtcgtgtaaatctgattggagagcatacagattataaccagggattggtactccctatggccctagaattgatgacagtcttggtggggtctcccagaaaggacgggctggtgagtctcctcacaacaagcgaaggagcagacgaaccacaacggctccagtttccattgcctaccgctcagaggtctctggagcctgggactccacgctgggctaactacgtcaaaggcgtaattcagtattatccagctgctccactacctggtttttccgcagtggtcgtgtcctcagttcctcttggcggtggtctttcttctagcgcttcactggaagtcgcgacctacacatttttgcagcagctgtgcccagacagtgggaccatcgctgcacgcgctcaagtctgtcagcaggctgaacactcatttgcaggaatgccttgtggaatcatggaccagtttatttcgctcatgggccaaaaaggccacgcccttctcattgattgtcgaagcctcgaaacgagtttggttccgctctctgatccaaagttggccgtgttaatcaccaacagtaatgttaggcacagcctggctagttcagagtatcctgtacgcagacgacagtgtgaggaagtggcccgagcactcggaaaggaatcccttcgcgaggtgcagctggaagagttggaggcagctagagacctggtctctaaagaaggcttccgacgtgccaggcacgtggttggtgagatccggaggactgctcaggccgcagccgctttacggcgtggagattacagagcatttggtcgactgatggtggagtcccacagatccctgcgcgacgactatgaagtgtcctgccccgaacttgaccagttagtggaggccgcactggctgtccccggagtctacgggtcccgtatgacaggagggggattcggcggttgcaccgtgactctcctggaggcttctgctgcaccccatgctatgcgacatattcaggaacactacgggggaactgccacattctatctgagtcaggccgcagatggtgccaaggtgctgtgcctgtag

SEQ ID NO: 3213 - DNA, 1179 bp, Artificial Sequence
  derived and/or modified sequence
atggctgctctcagacagccacaggttgcggagctcctggcagaggctcggcgtgccttccgggaagagttcggggcagagcctgaactagcggtgagcgctcccggaagagtgaacctgatcggagaacatactgattacaatcaaggcctagtgctgccgatggcacttgagctgatgaccgttttggtgggcagccctagaaaagatggacttgtttcactgttgaccacatccgaaggcgctgatgagccccaacgcctgcaatttccccttcctacagctcagaggagtctggagcctgggaccccacgctgggcaaattacgtgaaaggagtgatccagtattaccccgctgctccacttcctgggttcagtgcggtggttgtatcaagtgtgccactaggcggtggcctgtccagctctgcctcattagaagtggctacctataccttcttacagcagttatgccccgatagtggcacaatcgcggctcgggcacaggtgtgccagcaggctgagcactccttcgccggtatgccctgcggcatcatggaccagttcattagtttgatgggacagaaaggacatgcactgttgatcgattgccgatcactggagacctccctcgtcccactgtccgaccccaagcttgcagtgcttataaccaactccaatgttcggcacagtttggctagtagtgagtatcccgtccgaagacgtcagtgtgaagaggtggcgagagccctcggcaaagaatcactgagggaggtgcagctcgaagagctcgaggctgctcgggacctggtcagtaaggaaggctttcgcagggctcgacatgttgtcggtgagatccggaggacagcacaagctgcagccgcactcagacgaggcgactacagggccttcggcaggctgatggtggagtcccatcggagccttcgcgacgattatgaggtcagctgccccgaactcgaccaactagtcgaggctgcattagcagtacctggggtgtacggctctaggatgactggcggaggatttggtggatgtacagtgacactcttggaagccagcgctgcacctcacgccatgcgccacatccaggagcactacggaggcactgccacattctacctcagtcaggccgcagatggcgcaaaagtgctctgtctgtag

SEQ ID NO: 3214 - DNA, 1179 bp, Artificial Sequence
  derived and/or modified sequence
atggccgcgctccgccagccccaggttgcagagctgctggcggaggctcgacgggcctttagggaggaattcggggccgaacccgagcttgcggtctccgcccctggaagagtgaacctcatcggtgagcacaccgattataaccagggccttgtcctgcccatggccctcgaattgatgacagtgttggttggatcgcccaggaaggatggcctggtgagtttactgacaacctccgagggtgcagatgagcctcagaggctgcagtttccgctcccaacagcacagaggagcttggagccaggtactccccgatgggctaactacgtaaagggtgtcattcagtattaccccgccgcccccctccctggattctctgccgtagttgtgagttccgtgcccctgggtgggggactgtccagttcggcttctctcgaagttgctacttacacttttctccagcagctgtgtccagattctggcactatcgcagcgagggcccaggtgtgccagcaggctgagcatagttttgccggaatgccttgtgggatcatggatcaatttattagcctgatgggacagaaaggtcacgccctgcttatcgactgccggtccctggaaaccagtctcgttccactgtccgatcctaaattggctgtgctgatcacaaatagtaacgtccgtcatagtttggcgtctagcgagtaccccgtccggagacgacaatgtgaagaggtggcaagagctctgggcaaagagtctcttagggaggtgcagctggaggagttggaggctgccagagatctagtgtccaaggagggcttccgcagggcccgtcacgtggttggtgagataagaaggaccgcccaggccgccgccgcgctgagacgcggagactatcgcgcatttggcagactgatggtcgaaagccacagaagtctgcgcgacgactacgaggtcagctgtcccgagctggatcagctggtcgaggcagccctggctgtgcctggtgtttacggatcaaggatgacagggggcggattcggaggttgcactgtcacgcttctggaagcatccgccgcccctcacgccatgcggcatatccaggagcactatggcggtaccgctacattctatctctctcaggcagcagacggcgcaaaagtgctctgtttatag

SEQ ID NO: 3215 - DNA, 1179 bp, Artificial Sequence
  derived and/or modified sequence
atggccgccctgcggcagccccaggtggccgagctgctggccgaggcacgacgggccttccgagaggagttcggtgctgaacccgagctggcagtgtctgcccccggtcgagttaacctgatcggagagcacactgactacaaccaggggttggtgctccctatggccctggagcttatgacagtattggtcggaagtccccgcaaggacggcttggtgtcactactgacaacctccgaaggagcggatgagccgcagagactgcagtttcccctgcccaccgctcagcgctccctggagccgggcacccccaggtgggctaattacgttaaaggcgtgatccagtactatcctgcagcccctcttccagggttcagcgcagttgttgtaagcagcgtcccactgggcggcgggctgagtagctccgcttcacttgaggttgctacttataccttcctgcagcagttgtgcccagactcaggaacgatcgcagctagggctcaggtgtgccagcaggctgaacattccttcgctggaatgccttgcggcatcatggatcagtttatcagcctgatggggcagaagggccatgctttactgatcgactgccgttcccttgagacatccttggttcccctttcggaccccaagctagccgtgctgatcacaaatagcaatgtccgccatagcctcgccagctccgagtaccccgtgaggagacgacaatgcgaggaggtggctagggccttaggcaaagagtccctgagagaagttcagctggaagagttagaagccgctcgtgacctggtctcgaaagagggcttccgaagggcacgtcacgtagttggcgagatcagacggacggcgcaggccgcagcagcgttgcgccggggcgattatcgagctttcgggaggctcatggttgagagtcaccgcagccttcgggacgactatgaggtgtcctgccctgagcttgatcagttagtagaggcagccttagcagtgccaggcgtgtacggcagtcgtatgaccggaggcggctttggcgggtgcactgtaacgctcttagaagcatccgccgcgccccacgccatgagacacattcaggagcactatgggggaacagccacattctacttgagtcaagctgctgacggtgctaaagtactgtgcctttag

SEQ ID NO: 3216 - DNA, 1179 bp, Artificial Sequence
  derived and/or modified sequence
atggccgctcttcgccagcctcaggtagccgaattgctcgctgaagcacgacgggctttccgcgaagagttcggcgctgaacccgaacttgccgtgagcgctcccggtagggtgaacctgatcggtgagcataccgattataaccagggactggtccttccaatggctctggagcttatgaccgttctcgtcggctcaccccgaaaggatggactggtgagcctgcttacaacaagtgaaggggctgacgaacctcaacgccttcagtttcccctgccgacagcacagcgatctttggagccgggaacaccgcgttgggccaattacgtcaaaggtgttatccagtattatcccgctgcacctctaccaggtttctctgccgtggtggtatctagtgtccctctgggcggtgggctgtcctcctctgctagcctcgaggtcgcaacatatacatttttgcaacagctgtgccctgactccgggacaatcgctgcacgcgcacaggtctgccagcaggctgagcattccttcgccggaatgccctgcggtatcatggatcagtttatatccctcatggggcagaaaggccacgctctactgattgactgccggagcctcgagacctctcttgtgcctttatcagatcctaagctggcagtcctcatcacaaatagcaatgttaggcacagcctggcctcctctgagtatccagtacggaggaggcagtgtgaggaggttgctcgagcgctgggcaaggagagcctgcgcgaagtgcagctggaggaactcgaggctgcacgtgatttggtgtcaaaggagggcttcaggcgggctagacacgtcgtaggcgaaattcggaggacagctcaggccgctgcggctttgcggaggggagattaccgagcatttggcagactcatggtcgaatcccatagatctctaagggacgactacgaggtttcatgtcccgagcttgaccagcttgtcgaggctgctctcgccgttcctggggtgtacggcagtcgtatgaccggaggcggtttcggcggatgtaccgtgacattactcgaagccagcgctgcccctcacgcgatgcggcacattcaggagcattatggaggtaccgcaactttttaccttagccaggcagctgacggtgccaaggtgctgtgtttatag

SEQ ID NO: 3217 - RNA, 1322 nt, Artificial Sequence
  derived and/or modified sequence
gggaaauaagagagaaaagaagaguaagaagaaauauaagagccaccauggcggccuugcgacagccgcaagucgcggaacugcuggcugaagcccggagagcguuccgcgaggaguucggagccgaacccgagcucgcgguaucagcaccaggacgggugaaccuuauuggggaacauacugauuacaaccaggggcucguauugcccauggcccuggaacuuaugaccguacuugucgggucaccccgcaaggacggcuuggugagcuugcuuacgacauccgagggugcugaugaaccgcagcgacuucaguucccucucccuacggcgcaacggucauuggagccagggacgcccagaugggccaauuaugugaaaggagugauucaguauuaucccgcagcgccgcucccuggauuuucagcaguaguggugucgagcguaccucuugguggaggacugucgucguccgcaucccucgaggucgcaaccuacacguuuuugcagcagcucuguccggacucggggaccaucgcggcgagagcccaagugugccaacaggcggagcacagcuuugccggcaugccauguggaaucauggaccaguucaucucgcugaugggucagaaaggacaugcucuccugaucgauugccgcucgcuggaaacaucgcuggugcccuuguccgacccgaagcuggcugugcugaucacgaauuccaacguccgccauagcuuggccucaagcgaguacccggugaggaggcgacagugcgaggaggucgcccgagcgcuuggaaaagaaucguugagggaggugcagcuugaagagcuugaagcggcgagggaucuugucucaaaggagggguuucgacgcgcgaggcacgucgucggggagauucggagaacagcccaggcggcugccgcacucagacgcggggauuauagggcguuuggacgguugauggucgagucgcacagaagcuugagggacgacuacgaagugucgugcccggagcuggaccagcucguagaagcggcucuugcgguccccgguguguacggguccagaaugacgggcgguggcuucggaggguguacagucacucucuuggaagcgucggccgcaccccacgcgaugcggcauauccaagaacacuacggagguacugcaaccuucuaucuuagccaggcggcagauggugcgaagguauugugucucugauaagcugccuucugcggggcuugccuucuggccaugcccuucuucucucccuugcaccuguaccucuuggucuuugaauaaagccugaguaggaag

SEQ ID NO: 3218 - protein, 379 aa, Artificial Sequence
  derived and/or modified sequence
MSRSGTDPQQRQQASEADAAAATFRANDHQHIRYNPLQDEWVLVSAHRMKRPWQGQVEPQLLKTVPRHDPLNPLCPGAIRANGEVNPQYDSTFLFDNDFPALQPDAPSPGPSDHPLFQAKSARGVCKVMCFHPWSDVTLPLMSVPEIRAVVDAWASVTEELGAQYPWVQIFENKGAMMGCSNPHPHCQVWASSFLPDIAQREERSQQAYKSQHGEPLLMEYSRQELLRKERLVLTSEHWLVLVPFWATWPYQTLLLPRRHVRRLPELTPAERDDLASIMKKLLTKYDNLFETSFPYSMGWHGAPTGSEAGANWNHWQLHAHYYPPLLRSATVRKFMVGYEMLAQAQRDLTPEQAAERLRALPEVHYHLGQKDRETATIA

SEQ ID NO: 3219 - protein, 84 aa, Artificial Sequence
  derived and/or modified sequence
MSRSGTDPQQRQQASEADAAAATFRANDHQHIRYNPLQDEWVLVSAHRMKRPWQGQVEPQLLKTVPRHDPLNPLCPGAIRANGE

SEQ ID NO: 3220 - DNA, 1137 bp, Artificial Sequence
  derived and/or modified sequence
atgtcacgctccggtaccgacccccagcaaaggcagcaagcaagtgaggctgacgcagcagcggctacatttcgagcaaacgaccatcagcatatcagatataacccactgcaagacgagtgggtcctcgtgtccgctcatagaatgaaaaggccttggcagggccaggtagagccacaactgctgaagaccgtcccaaggcatgacccccttaatcctctctgcccgggggctatccgagcaaacggagaggtgaaccctcagtacgattcaaccttcctgttcgacaatgactttcctgccctgcagccggacgcccctagtcctggaccatctgaccaccccctttttcaggccaagagcgctagaggagtttgtaaagtgatgtgctttcacccttggagcgatgtgaccctccctctcatgagcgtgccggagattcgtgctgtggtggatgcttgggctagcgtgaccgaggagctgggcgcgcagtacccttgggtgcagattttcgagaacaagggtgccatgatgggatgcagcaacccacacccacattgccaggtctgggcgtcatctttccttccagatatcgcccagagagaagagcggagccagcaagcctacaagagtcagcatggtgaaccactgcttatggaatactcaaggcaggaactgctgaggaaggaaaggcttgtcctgacttccgaacattggctggtgctagtgcctttttgggccacttggccctaccagactctgctgcttccccgcaggcacgtcaggcgattgccggagcttacaccagcagaacgggatgatttagcatcgatcatgaagaaactgctgacaaagtacgataacctgttcgaaacttcttttccttacagtatgggttggcacggcgccccaacaggttccgaggccggggccaactggaatcattggcaactgcatgctcactattacccccccctcctgcgatcggcgacggtgcgaaagttcatggtgggctacgagatgttggcacaggcccaacgggacttaaccccagagcaagcagcggaaaggctgcgggccctgcctgaagtccattatcatcttggccagaaggatcgcgagaccgcgaccatagca

SEQ ID NO: 3221 - DNA, 1137 bp, Artificial Sequence
  derived and/or modified sequence
atgagtcggagtggtaccgaccctcagcagcggcagcaggcgagtgaagcagacgctgcagctgccacgttccgagccaacgatcaccaacatatcaggtataatcctctgcaggacgagtgggtgctggtgtcagcccatcgaatgaaaagaccttggcagggccaagtggagccacaactgctgaagactgtcccgcgacatgatccactcaatcctctctgtcctggcgctatccgagccaatggggaggtgaatccacagtatgacagcacatttctgttcgacaatgactttcccgcgttgcagccagatgcaccgagccccggcccctcggatcacccgttgttccaagctaaatcggcccgcggagtttgtaaggttatgtgctttcacccctggagcgacgtcacactgccacttatgtccgtgcccgaaatccgggcggtggtggacgcctgggcttctgttacagaggaactaggagcgcaatacccgtgggtacagatcttcgagaataaaggagctatgatgggctgcagcaatcctcaccctcattgccaggtatgggctagcagctttttgcccgatatagctcagcgcgaggaaagatcccagcaggcatacaaaagccaacacggtgagcctctcttaatggagtactcaaggcaggaacttcttcgaaaagagcggcttgtattgacaagtgagcactggctcgttctagttcccttctgggcaacctggccataccaaactctactgctgccgaggaggcacgttcggagactcccagaactgacccccgccgagcgagacgacctcgcctcaattatgaaaaaactgttgacaaaatacgacaacctgttcgaaacttcttttccatattctatgggatggcacggagcccccaccggcagcgaagcaggcgcaaactggaaccactggcagctgcacgcccattactatccccccctcctacgctctgcaactgtgagaaagttcatggtagggtacgagatgttggcccaagcgcagcgggatctgacgcccgaacaagcagcagagcggctcagagccctgcctgaggttcactatcatttgggtcagaaagatagagagacggccaccattgct

SEQ ID NO: 3222 - DNA, 1137 bp, Artificial Sequence
  derived and/or modified sequence
atgtcacgctccggcactgacccacaacagcgccagcaggcctcagaggctgacgcggccgccgccactttcagagcaaatgaccaccaacacatccgctacaacccgctgcaggatgagtgggtgctggtgtcggcacaccgcatgaaaagaccatggcaaggccaagtggagccgcagctgcttaaaactgtgccgaggcacgacccgctgaacccgctctgtccaggggctattcgggccaacggagaagtgaacccgcagtacgacagcacttttctgttcgacaatgacttcccggcgctgcaaccggacgcgccttctcccggcccgtcggatcatccgcttttccaggctaaatcggcaaggggagtctgtaaggtgatgtgctttcacccgtggtcggacgtgaccctcccacttatgtcagttccagagatccgcgccgtggtggatgcttgggcgagcgtgactgaagaactgggagcacaatacccttgggtccagatcttcgaaaacaagggcgccatgatgggatgttcgaaccctcatccgcattgccaagtgtgggcaagcagcttcctgccggatatcgcacaacgcgaagaaagatcccagcaggcttacaagtcacagcacggagaaccactcctgatggaatactcaagacaggaactgctgcgaaaagaacgccttgtgctcacttctgagcattggctcgtgctcgtcccgttttgggcaacttggccataccagacgctcttgcttcctcgccgccacgtgcggcgactgccagagctcactccggctgagcgggacgatctggcctcgattatgaagaagctcctgaccaagtacgataacttgttcgaaacctcattcccatactcgatgggatggcacggggccccaaccgggtcggaggcaggagccaactggaaccactggcagctccatgcccattactacccgccgctgttgaggtcagcgaccgtgcgcaagttcatggtcggctacgaaatgctggcgcaggcgcaacgcgacctcactccagagcaagccgccgagcgactgcgcgcattgcccgaggtccactaccacctgggacaaaaggatcgggagactgctaccatcgcc

SEQ ID NO: 3223 - DNA, 1137 bp, Artificial Sequence
  derived and/or modified sequence
atgtctcgctccggcactgatccgcagcagagacagcaagccagcgaggctgacgccgcggcggccacttttcgcgcgaacgaccaccaacatatccggtacaacccgctgcaagacgagtgggtccttgtgtctgcccaccgcatgaaaagaccgtggcaggggcaagtcgagccacagcttttgaaaaccgtgcccagacatgacccgctcaacccgctgtgtcctggagctattcgagccaacggagaagtgaatccgcagtatgattccactttcttgtttgataacgatttccctgcgctgcaacctgacgcgccatcccctggaccgtcagaccacccactgttccaggcaaaatcagcccgcggcgtgtgcaaagtgatgtgcttccatccctggtcagacgtcactctgccattgatgtcggttccagagattagagccgtggtggacgcttgggcgtccgtcactgaagaactcggagcacagtacccttgggtgcagatctttgagaacaaaggtgccatgatggggtgctctaatccacacccacattgccaggtgtgggcgtcgtcctttctcccagacatcgctcagagagaagaacggtcacagcaggcatacaaatcgcaacacggcgaacccctcttgatggagtatagccggcaagagctgctgcggaaagaaagactggtgctgacttccgagcactggcttgtcctggttccgttctgggcgacttggccctatcaaacgctgctcctccctagacgccacgtgcggcgccttccagagctcactccggccgaacgagatgatctggcatccatcatgaagaagctgctgaccaagtacgataatctgttcgaaacgagcttcccgtacagcatgggttggcatggagcgcccaccggctccgaggccggggcgaattggaaccactggcagctgcatgcacattactaccctccattgctgcgctcagctaccgtcaggaagttcatggtgggatacgaaatgctggcgcaagcccagagagatttgactccggaacaggcggctgaacggctcagggctctcccggaggtgcactaccacctgggacagaaggacagagaaaccgcaactatcgct

SEQ ID NO: 3224 - DNA, 1137 bp, Artificial Sequence
  derived and/or modified sequence
atgtccagaagcggaacggatccccagcagcgtcagcaggcatctgaagctgacgctgcagccgcgacctttcgcgccaatgatcaccaacacataaggtacaatcctctgcaggacgaatgggtgctcgtctctgcacaccggatgaaacgcccctggcaggggcaagtagagccgcagctcctgaagacagtgccccggcacgatcccctgaaccctctttgtcccggggcaatccgggcaaatggagaggttaatccccagtatgatagcacatttctatttgataacgatttccccgcgctacaacccgatgccccctcacccgggccatctgatcatccattatttcaggctaaatccgcccgaggggtgtgcaaagttatgtgtttccacccctggtcagacgtgacactgccactcatgagtgtgcctgagatcagggctgtcgtggacgcctgggcgagcgtcaccgaggagctcggcgcacagtatccatgggtccagatttttgagaataaaggggcgatgatgggctgcagcaatcctcatcctcattgccaggtctgggctagctctttcttgcccgatatcgctcagcgggaagaacgatcccagcaggcatacaaaagtcagcacggagagccacttctgatggagtatagtcgtcaggaactcctgcgcaaagagcgcctggtgctgacatccgagcattggctagtgttggtgccgttctgggcaacgtggccataccaaactcttcttctgcctcgacgccacgtccgtagactgccagagctgacacccgctgagcgcgacgacctcgccagcatcatgaaaaagttattgacaaagtatgataacctattcgagacttctttcccttactctatgggctggcacggcgcaccaacaggaagtgaggccggagcaaactggaaccattggcagcttcatgcgcattattaccctcctttgcttcgcagtgccactgtgagaaagttcatggtgggatatgaaatgctcgctcaggcccaacgggacctcacacccgagcaggccgcagagcgactgcgggcactgcccgaagtgcactatcatctggggcagaaagatagagagacagcgacgatcgcc

SEQ ID NO: 3225 - DNA, 1137 bp, Artificial Sequence
  derived and/or modified sequence
atgagccgcagcggaaccgatcctcagcagcgacagcaggcctctgaagctgatgccgctgcagctacctttagggcaaatgatcatcaacatatcaggtataatcccctgcaggatgagtgggttttggtctctgctcatcgaatgaaacggccatggcagggccaagtggaacctcagctgctaaagacagtgcccagacacgatccgctaaatcccctctgtcccggggccatccgagctaatggagaggtaaacccccagtatgattctaccttcttattcgataacgattttcctgccctccagcccgacgcgcctagtccaggcccaagcgaccatccactcttccaggctaagagcgccaggggagtgtgcaaggtgatgtgtttccatccctggagtgacgtgacattaccactgatgagcgtgcctgaaattagagcggtagtggatgcgtgggcgagcgtgactgaagaacttggtgctcagtatccatgggtacagattttcgagaataaaggcgccatgatgggttgcagcaatccccatccccattgtcaggtctgggccagttcatttctgcccgatattgctcagcgcgaggagagatcacagcaggcgtataaaagtcagcacggggaaccgctcctaatggaatacagcaggcaggagctactccgcaaagagcggctcgtgttgacctctgaacactggctagttttggtgccgttctgggcaacctggccttaccagacgcttttgctccctagaagacacgtgaggcggctgcccgaacttactcccgccgagagggacgaccttgcttctatcatgaagaaacttctgacgaagtacgataatctcttcgaaactagcttcccgtattctatgggctggcatggcgccccaaccgggagtgaggccggagcgaactggaaccattggcaattgcatgcccattattatccaccattactgagatccgccactgtccgcaagttcatggttggctacgagatgcttgctcaggctcagcgggacctcacgccagagcaagccgccgaacgactccgcgcattgccagaggtgcattaccacttagggcagaaggatagggagactgccactatcgct

SEQ ID NO: 3226 - DNA, 1137 bp, Artificial Sequence
  derived and/or modified sequence
atgtccagatcaggaaccgatcctcaacaaagacaacaagcgtccgaggctgatgctgctgccgcgacttttcgagccaatgatcatcaacacatccgctacaaccccctccaggatgaatgggtgctcgtctcggcacacagaatgaaacgcccttggcaaggacaagtggaaccacagctgctcaaaaccgtgccccgtcacgatccgctcaaccccttgtgcccaggggcgattagggccaacggagaggtcaatccgcagtacgactcgacgtttctgtttgacaatgattttccggctctgcagcctgacgcaccttcgccaggcccgtcagatcatcccctgtttcaggcaaagtcggcgcgaggagtgtgtaaggtaatgtgtttccatccgtggtctgacgtgactcttcctctcatgtcggtgcctgagattagggcagtggtggatgcatgggcgtccgtgaccgaagaactcggggcgcagtacccgtgggtccagattttcgagaacaagggtgcgatgatgggctgttcaaatccacatccacactgccaagtatgggcatcatcctttcttccagacattgcgcaacgggaagagcgtagtcagcaagcgtataagagccagcacggggaaccactcctgatggagtactcgcggcaggaactgcttagaaaggaacgcctcgtgttgactagcgaacactggcttgtcctggtgcccttttgggcaacctggccttaccaaactcttctgcttcctagacgtcatgtgcgccgcctgcctgaactgaccccagccgagagagacgatctggcctccatcatgaagaagctgttgactaaatacgataacctcttcgaaaccagcttcccatattcgatgggctggcatggtgcacctactggctcggaagccggagcgaactggaaccattggcagctgcatgcacactactacccacctcttttgcgttcggctaccgtccgtaaattcatggtgggatacgaaatgcttgcacaagcacaaagagatctcacgcctgagcaggcagccgagcggcttagggccctcccagaagtgcattaccatctgggtcaaaaggatcgagaaaccgcaacgatagca

SEQ ID NO: 3227 - DNA, 1137 bp, Artificial Sequence
  derived and/or modified sequence
atgtcgagatcgggcactgaccctcaacaacgtcagcaagcgagcgaagcagacgcggccgctgcgacttttcgggctaatgatcatcagcatattcggtacaacccgctgcaggacgaatgggtgcttgtgtcagcacataggatgaaacggccttggcaaggccaagtcgaacctcagcttctcaaaactgtgccaaggcacgatcctctgaacccactgtgtccaggagcaattcgcgcaaacggtgaggtgaatccacaatacgattccactttcctgtttgataacgactttccagcactccaacctgatgcaccatcgcctggccctagcgatcatcctctttttcaagcgaagtctgcccgtggggtgtgcaaggtgatgtgcttccatccttggtcggatgtgacccttccactgatgtccgtgcccgagatccgtgccgtcgtcgacgcctgggcgtcagtgaccgaggaactcggagcccaatacccctgggtgcagatcttcgagaacaagggagctatgatgggttgtagcaacccccacccgcactgtcaggtctgggcgtcgtcattcctccctgatattgcacaacgggaagaaaggtcccagcaggcatacaaaagccaacatggagaaccccttttgatggaatattcacgtcaggagttgcttcgcaaggagcggcttgtgctcacttccgagcattggctggtcttggtccctttctgggcgacttggccataccagactcttctcctcccacgacgccatgtcagacgccttcctgaactgaccccagccgaacgggatgacctggcgtcgatcatgaagaaacttctcaccaagtacgacaacctgtttgaaaccagctttccgtacagcatgggctggcacggggcccccaccggatccgaggccggggcaaactggaaccactggcaactgcatgcccattactacccaccactgcttcgctcagcaaccgtgaggaaattcatggtgggctacgaaatgctcgcccaggcacaaagggatctgactccggaacaagctgcagaacgccttcgcgcactgcctgaggtgcactaccacctgggacaaaaggaccgagaaaccgccaccattgct

SEQ ID NO: 3228 - DNA, 1137 bp, Artificial Sequence
  derived and/or modified sequence
atgtctaggtctgggacagaccctcagcagaggcagcaagcctccgaggcagatgcggccgctgccactttccgggcaaatgatcaccaacatataagatacaatcctctgcaagatgaatgggtattagtgtccgcgcataggatgaagcggccctggcaggggcaggtggaacctcagctcctgaagactgtgcctaggcacgatcctcttaatcctctctgtccaggagctatccgcgccaacggagaagttaatccccagtacgatagtacattcctgtttgataacgatttccctgctctccagcctgatgctccttcccctgggccctctgatcacccattgttccaggccaaatctgcaaggggggtatgtaaggtgatgtgttttcacccctggagtgatgttacgctgccactcatgagtgtgccagaaatccgagccgtagtggatgcctgggcttccgtgacagaagaactaggggcccagtatccgtgggtacagatttttgaaaataaaggggcaatgatgggatgcagtaatccccaccctcactgtcaggtgtgggcctcatcttttctaccagatatagctcaacgcgaggagaggtcccagcaagcatataaaagtcagcacggggaacctctcctgatggaatactctcggcaggagcttctgcggaaagaacggctcgtgctgacatccgaacactggttagttttggtacccttttgggccacatggccttaccagacattactgctgcctcgtcggcatgtgcgcagactgccagaactgactcctgctgaaagagatgacttagcctctatcatgaaaaaactgcttactaaatatgataacctatttgaaacaagttttccctattcaatgggatggcacggggctcccacaggaagtgaagctggggccaattggaatcattggcaattacatgctcattactatcctcccctccttcgatcagccacagtgcggaaattcatggtcgggtatgaaatgctcgctcaggctcagcgggacctcacaccagagcaggctgcagagagattgagagcacttcccgaagtgcattatcatctcgggcagaaagatcgcgagactgccactatagca

SEQ ID NO: 3229 - DNA, 1137 bp, Artificial Sequence
  derived and/or modified sequence
atgtcccgttccggcacagatcctcaacaaagacaacaagccagcgaggctgatgctgctgcagctacttttagggcaaatgatcaccaacacatccgttacaacccgttacaggatgagtgggtgctcgtgagcgcccacaggatgaagagaccgtggcagggccaggttgagccgcaattgctgaagaccgtgccacggcacgatcccctgaatcccctgtgccctggcgccatcagggctaacggcgaagtgaacccacaatatgactcaacattcttgtttgacaatgatttcccagccctacagccagacgcaccaagcccgggcccatccgatcatcccctgttccaagcaaaatccgcgcgaggagtgtgtaaggtgatgtgctttcatccgtggtccgatgtcacgctacccctaatgtcggtcccagagattagggctgtcgtcgatgcatgggcgagtgtgacagaggagctgggtgcccaatacccctgggtgcagatattcgagaacaaaggagcgatgatgggatgttccaacccccacccacactgccaggtgtgggcgtcatcattcctccccgatatcgctcaacgtgaggaacgttctcagcaggcctataaaagccagcatggcgagccacttcttatggagtactcacgccaggagctgcttaggaaggaacggctggtgcttacgagtgaacactggctggtgctggtacccttctgggctacttggccctatcagacgctgcttttgccacggcgtcatgtccggagactgcctgagctcacaccagccgagcgtgatgacctggcctcgattatgaagaaactgttaacaaagtatgataacctgttcgaaaccagttttccctatagcatggggtggcacggcgcaccgactggatccgaggctggcgccaattggaaccattggcagctgcatgcacattattatccgcctctgctccgatccgctacggtgcggaagttcatggtgggatacgagatgctggcccaggctcagcgggacctgacgcctgagcaggccgctgagcgcctgagggctttgcccgaggtccactaccatctaggacagaaagaccgcgaaacagctacaatagcc

SEQ ID NO: 3230 - DNA, 1137 bp, Artificial Sequence
  derived and/or modified sequence
atgagccggtccggcacggaccctcagcaacgccaacaggcaagcgaagcggacgcagcagccgcaaccttccgtgccaacgaccatcaacatattagatacaaccctctccaggacgaatgggtgctggtgtcggcacatagaatgaagcgcccgtggcagggacaggtggagccacaacttctgaaaactgttcccagacatgatccactcaaccctctctgtccgggtgcgatcagggcaaatggtgaagtcaatccccaatacgactcgacctttctcttcgataacgatttcccagctcttcaacccgatgcaccttcccctggcccatccgatcatccactgtttcaagcaaagtccgcgagaggggtgtgcaaggtgatgtgtttccatccatggtcagacgtgacccttccgctgatgtcagtgccggaaatacgagctgtggtggacgcctgggcttccgtcactgaagaacttggggcacagtatccatgggtgcagattttcgaaaacaagggggctatgatggggtgttcgaacccccacccacactgtcaggtctgggcatcgtcattcctccccgatattgcacagagagaagaaagaagccaacaagcatacaagagccaacacggggagccgcttctcatggaatattcccgccaggaactccttaggaaggaaagacttgtgctcacttccgaacattggctcgtccttgtccccttctgggcaacctggccttaccaaactctgcttctgcccaggagacatgtccgccgtctccctgaacttacccctgcagaacgggacgacctggcctccattatgaaaaaacttctgaccaagtatgataacctgttcgagacttcgtttccctactccatgggatggcacggagcacctaccggatcagaagctggtgctaactggaatcattggcaactgcatgcccactattacccccctttgcttaggagcgcgactgtgcgcaagtttatggtgggctacgaaatgctggcacaggcccaacgagatcttactcctgagcaagccgcagaaaggctgcgtgcactgcctgaagtgcattaccacctgggacagaaggatagggaaaccgctaccatcgca

SEQ ID NO: 3231 - DNA, 1137 bp, Artificial Sequence
  derived and/or modified sequence
atgtctcggtctggaaccgacccgcagcagagacaacaggcgtctgaagccgacgctgcagcggcaaccttccgcgcgaacgatcatcaacatattcggtacaacccgctgcaggacgaatgggtgctcgtctcggcccaccggatgaagcgcccttggcagggtcaagtggaacctcaactgctcaaaactgtccccagacacgaccccctcaatccactgtgcccaggggcaatcagggcaaacggagaggtcaacccgcaatacgactccacctttctcttcgataacgacttccctgctctccaaccggacgctccttcgcctggcccgagcgaccatccgctgttccaggcgaagtccgcacgaggggtatgcaaagttatgtgctttcacccgtggagtgatgtgacccttcctctcatgagcgtgccagagatccgggccgtcgtggatgcctgggcttcagtgactgaagaacttggcgcccagtacccgtgggtgcaaatctttgagaataagggagccatgatggggtgcagcaatccgcacccacactgtcaggtgtgggcgtcatcgttcctgcctgacatcgcccagcgggaagaaagaagtcagcaggcgtataagtcccaacatggcgagccactgttgatggaatactcgcgacaggagctgttgcgcaaggaaagacttgtactgacttcagaacactggctggttctggtgccattctgggcaacgtggccctaccagaccctcctcctgccacgcagacatgtccgcaggctcccggagctgactccggcggagcgcgacgatctcgcgtccatcatgaagaagctgctcaccaaatatgataacctgttcgaaacctcgttcccttactcaatgggttggcatggagcgcccactggatcggaagcaggcgctaattggaaccattggcagttgcacgcccactactacccgccgctcctgaggtcggccactgtgcgcaagttcatggtcggatacgagatgcttgcccaggcacaacgggacctcacccccgagcaagccgccgagaggttgagggccctgccggaagtgcactaccaccttggccagaaagatcgcgaaaccgcgactattgct

SEQ ID NO: 3232 - DNA, 1137 bp, Artificial Sequence
  derived and/or modified sequence
atgtcgcgctccgggaccgacccccagcagagacagcaagcctccgaggcagacgctgccgccgcaacttttagggcgaatgaccaccaacacatccgctacaacccgctgcaggacgaatgggtgctcgtctcggcgcatcgtatgaagaggccttggcagggacaggtcgagccgcagttgcttaagaccgtcccgagacacgacccgctcaacccactgtgccctggagccatccgcgccaacggagaagtcaacccacagtacgactccacgttccttttcgataatgacttcccggctctgcagcccgacgcgccgtcccctggaccgtccgaccatccgctgttccaagccaagtcagcccggggtgtgtgtaaggtgatgtgcttccatccttggagcgacgtgactctgcccttgatgtctgtgcctgagattcgcgcagtggtcgatgcgtgggcatccgtgactgaagagctgggagcgcaatacccctgggtccagatctttgaaaacaaaggggccatgatgggatgctcgaatccccacccgcactgccaagtctgggcctcctcatttctgccagatattgcgcagcgggaggagagatcccaacaggcatacaaatcccagcacggagagccattgctgatggaatactctcgacaggaactgctcagaaaggagcggctggtcttgacttcggagcactggctggtgctggtgcctttctgggccacctggccataccagactctcctgctccctcggagacatgtgcgccggctcccagaactgacccccgctgagagagatgacctggcatccatcatgaaaaaactgctcactaagtacgacaacctcttcgaaacctccttcccttacagcatgggatggcatggtgcccccaccgggagcgaagccggagcgaactggaatcattggcagctccacgcgcattactacccgccgttgctgcgctcggccacggtgagaaagttcatggtgggctatgaaatgctggcccaggctcaaagggatctcactccggagcaggcggctgaacggctgcgcgcgttgcctgaagtgcactaccatcttggacagaaggaccgcgaaaccgctactatcgct

SEQ ID NO: 3233 - DNA, 1137 bp, Artificial Sequence
  derived and/or modified sequence
atgtcccgctctggcaccgatcctcagcaacgacagcaagcttcggaagccgacgctgctgccgccactttcagggcaaatgaccaccaacatatcagatataaccccttgcaggacgaatgggtgctcgtaagtgcacacaggatgaagagaccttggcagggtcaggtagagccgcagctgttgaagacagttccccggcatgaccccctgaatcccttatgccccggcgccatcagggctaatggagaagtgaaccctcagtacgactcaacgtttttattcgataacgattttcctgcactccaacctgatgcaccgagtcccgggcccagcgatcatcccctgttccaagctaagagcgctcgaggcgtctgcaaggttatgtgcttccacccctggtctgatgtgaccctacccctaatgtccgttcctgagatcagggccgtggtggacgcttgggcttctgtcacagaggaactgggcgcacagtatccctgggtgcagattttcgaaaacaagggggccatgatgggctgtagcaatccccatccacattgccaggtgtgggccagtagctttctgccagacattgcacagcgcgaagagaggagtcaacaggcttataagagtcagcatggtgaaccgctcttaatggagtacagcaggcaggaactgctgcggaaagaaaggctggttttgacgtccgaacactggctggtcctcgttccattctgggctacttggccctatcagacactgctgttgccgcggcgccatgtgagaaggctgccggaactaaccccggccgagagggatgatctggcgtctattatgaagaaattgctgaccaagtatgataatctttttgaaacttcctttccttactcgatgggttggcatggtgcccctactggctcagaagccggagccaattggaaccactggcaattgcacgctcattattacccacccctcctgaggagtgctacggttaggaaattcatggtggggtatgaaatgctggcccaggcccagcgggatctaacccctgaacaggcagccgaaagactgagagcactgccggaagtccattaccatcttggccagaaggatagagagaccgctacaatagcg

SEQ ID NO: 3234 - DNA, 1137 bp, Artificial Sequence
  derived and/or modified sequence
atgagcagatcagggaccgatcctcaacagcgtcaacaagcgtctgaagcagacgcagccgccgcaacttttagggccaacgatcatcaacacatccgatacaacccgctgcaagacgaatgggtcctggtgtcggcacaccggatgaaaagaccttggcaaggacaggtggaacctcagctgttgaaaaccgtgccccggcatgaccctcttaatcctctgtgcccgggcgctatccgtgctaacggtgaggtcaacccacaatacgatagcacgtttctttttgataatgatttcccagccctgcaacctgatgcaccttcgcccggtccatcagaccatccactctttcaagccaagtcggccagaggagtgtgtaaggtgatgtgctttcatccctggtcggacgtgacgctccctcttatgagcgtccctgaaattcgggcagtggttgatgcatgggcgtccgtgaccgaggagcttggagcacaatacccttgggtgcagatctttgagaataagggggcgatgatgggttgttcgaacccacaccctcattgtcaggtgtgggcatcatcgtttctgcccgatattgcacagagggaagaaagatcgcagcaagcgtacaagagccagcacggagaaccactcttgatggaatacagcagacaagaacttctgagaaaagagaggcttgttcttacctcagaacattggctcgtgctcgtccccttttgggcaacctggccttaccagacgctcctgcttcctcgcagacacgtccgtcgactccctgagctcacccccgccgaacgcgatgatctggcgtccattatgaaaaaacttcttacgaaatacgacaatctgtttgaaacttccttcccatacagcatggggtggcatggggcaccaactggttccgaggccggtgcgaactggaaccactggcagttgcacgctcattactacccaccacttctgcgctcagcaaccgtgagaaagtttatggttggctacgagatgctggctcaagcccagcgtgatctgactcctgaacaagccgcagagcgtctgcgagcactccccgaagtccactaccatctcggacagaaggaccgtgaaactgcgacgatagct

SEQ ID NO: 3235 - DNA, 1137 bp, Artificial Sequence
  derived and/or modified sequence
atgagccggtccggcaccgacccacagcagcgccagcaagcatctgaagcagacgccgccgcggctacctttcgggctaacgaccaccagcacatccggtacaaccccctgcaggatgagtgggtcctcgttagcgcacacagaatgaagcgaccgtggcaaggccaggtcgaacctcagctgcttaagacggtccctcggcacgacccgctcaacccattgtgtcctggtgcgatcagggctaatggagaggtgaacccacagtacgactcaactttcctgttcgacaatgacttcccggcactgcagccagatgccccgtcgccgggcccatcggatcatcctttgttccaagcaaagtcggcgcgaggagtgtgcaaggtgatgtgcttccacccgtggtccgatgtgaccctgccgctgatgtcagtgccagagatccgcgccgtcgtggacgcatgggcgtcggtgaccgaggagctgggggctcagtacccctgggtgcagatctttgaaaacaaaggagccatgatgggatgctccaatcctcatccccattgccaggtgtgggcgagctccttcctgccggacatcgcccagagagaggagcggagccaacaagcgtacaagagccagcacggggaaccgctcttgatggagtattcgcgccaagaactgctccgcaaggaacgccttgtgctgaccagtgaacattggctcgttctggtgccgttctgggccacctggccgtaccagaccctgctgctcccgaggagacacgtgcgtagactgccggagttgactcccgccgaacgcgatgacctcgcctcaattatgaagaaactgctgactaagtacgataatctctttgaaacttccttcccatactcgatgggatggcacggagccccaactggctcagaagccggtgccaactggaaccattggcaacttcatgcacattactaccctcctctgctgcgctccgccaccgtcagaaaattcatggtcggatacgaaatgctcgcgcaagcgcaacgggatcttactccggagcaagctgctgaacgcctgcgggcgctcccagaggtgcactaccacctcggacagaaagacagggaaacggccactatcgcc

SEQ ID NO: 3236 - DNA, 1137 bp, Artificial Sequence
  derived and/or modified sequence
atgagcagatcagggacagaccctcagcagcggcagcaggcgtcagaggccgatgcagcagctgccactttcagggctaacgaccaccagcatattcgctataaccctcttcaggatgaatgggtcctggtaagtgcacacagaatgaagcgaccttggcaaggccaggtcgagccacagcttctgaagacagttcccaggcacgacccacttaacccgctctgccctggggccatcagggctaacggagaggtcaacccccagtacgactccacattcctctttgacaacgattttcccgcactgcagcctgacgcgccgtctcccggcccttcagaccacccgttgtttcaagccaagagtgctaggggagtgtgcaaagtcatgtgtttccatccgtggtccgacgtcacactgccactcatgtccgtcccagagattcgcgctgtagtggacgcctgggcctcagtgacagaagagctcggggctcagtacccctgggtgcagatttttgaaaataaaggcgccatgatggggtgctcaaacccacacccccattgccaggtctgggcctcctcttttttgccagatatcgctcagcgagaagagaggagtcagcaagcttacaagagccagcatggcgagccactgctcatggagtacagccggcaagaactcctgcggaaggagcggctggtgctgacttccgaacactggctcgtgctcgtccctttctgggcaacctggccataccagaccttgttgctgccaagaagacatgtaagacggcttccggaacttacacccgctgagcgggatgatctggcatcaataatgaagaaactcctgaccaagtatgacaatctgttcgagacatcctttccgtatagtatggggtggcacggcgcgcccaccgggtctgaggccggcgctaactggaaccattggcagctccacgcacactactacccgcccctgctgagatcagcaaccgtgagaaagtttatggtgggatatgaaatgttggctcaggcacagcgggatctgacacctgagcaggcagcagaacgcttgagggcccttcctgaggttcactatcacctgggccaaaaagaccgcgagaccgcgaccattgcg

SEQ ID NO: 3237 - DNA, 1137 bp, Artificial Sequence
  derived and/or modified sequence
atgtcacggtcaggcacagacccccagcagaggcaacaggcctctgaagccgatgcggcagctgctacctttcgcgcgaacgaccatcagcacattagatataaccctttgcaagacgagtgggtacttgtatctgcacatagaatgaaacgcccatggcaaggacaggtggaaccacagctgttgaaaacagtgccaaggcacgatccattgaatcctctttgtcctggagccattcgggccaacggcgaggtaaacccacagtatgatagcaccttcctgtttgataatgattttccggcgttgcaacctgatgctcctagtcctggaccctcagatcaccctcttttccaggcgaagtcagcacgtggggtgtgtaaagtcatgtgcttccacccatggtcggatgtgacactaccactgatgtctgtccctgagatacgcgctgtggtcgacgcctgggccagcgtgaccgaagaactgggagctcagtacccatgggtgcagatattcgaaaacaaaggggccatgatgggttgctctaacccccacccccactgtcaagtgtgggctagctcctttctgccagacattgctcagagagaagaacgttcgcagcaggcgtataaatcacagcacggcgagcccctgctaatggagtactctcgacaagaactactccgcaaagaacgacttgtcctgacctcagagcattggttggtcctcgtgcccttttgggccacctggccatatcagacacttctgctgccacggaggcacgtgcgccggctgcccgagttaacccccgcagagcgcgatgacctcgctagcattatgaagaaactcctcacgaagtatgacaatctcttcgagacctcattcccctatagcatgggatggcacggagctccaaccggctctgaggccggggctaactggaaccattggcagctacacgcacattattacccacccctgctccggtccgcaactgtcaggaagtttatggttgggtacgaaatgctggcacaggcccagagggatcttacacccgagcaggctgcagagagattaagggctttgccggaagtgcactatcacctaggacagaaggatagggagactgccactattgcc

SEQ ID NO: 3238 - DNA, 1137 bp, Artificial Sequence
  derived and/or modified sequence
atgtcccgctctgggactgatccgcagcaacggcagcaggcaagtgaggccgatgccgcggctgctacatttagggccaacgaccaccagcacataaggtacaaccccttgcaagatgaatgggtattggtcagtgcccatagaatgaagcggccttggcagggacaggtagagccacagctgctcaaaaccgtcccgagacatgatcccttgaatccactgtgtcctggggctatcagggctaacggagaggttaatcctcagtacgactccaccttcctgtttgacaacgactttccagcactgcagccagatgccccgtctccgggtccatctgaccaccctctgttccaggccaaaagcgctcgcggtgtgtgtaaagtgatgtgctttcacccctggagtgacgtgactctccctctgatgtccgtgcccgagatacgggccgtggtggatgcatgggcctctgtcactgaagagctgggcgctcagtatccctgggttcaaatatttgaaaataagggagccatgatgggctgctcaaacccgcatcctcattgtcaggtatgggcatcttctttcctccccgacattgcacaaagagaggaaagatcccagcaggcctacaaatcccagcacggggagcctctgttgatggagtatagtcgacaggagctgctgcgcaaggagagattggtgttgactagcgaacattggctggtgctggtgccattctgggcgacctggccttaccagacactgctgttgccaagacgacacgtacgcagactccccgagctgacgcccgctgagcgggacgatctggccagcattatgaaaaagctgctgacaaagtacgataacctgttcgaaacatccttcccttattctatgggctggcatggcgctcctaccggttctgaagctggggccaattggaatcactggcagctgcacgctcattactatccccccctcctgcgaagcgcgaccgttaggaaatttatggtggggtatgaaatgctcgcgcaggctcagagagatcttactccagagcaggccgcggagcggttgagagctcttcccgaggtgcactaccatttgggccagaaggacagggagaccgccacaatcgct

SEQ ID NO: 3239 - DNA, 1137 bp, Artificial Sequence
  derived and/or modified sequence
atgtcgagatccggtaccgatccacaacagcgccaacaagcgtccgaagcagatgcggcggcggctacctttcgagctaatgaccaccaacacattaggtacaaccctcttcaagatgaatgggtcctcgtctcggcccataggatgaagaggccatggcagggacaggtggaaccccaactgctgaaaaccgtcccaagacatgatcctctcaacccgctttgccctggggccattcgtgcaaacggggaagtgaatccccagtatgacagcacctttctttttgacaatgactttccagcactgcaaccagatgcaccaagccctggaccatccgaccaccccctttttcaagcaaagtcagccagaggagtgtgtaaggtgatgtgttttcatccgtggtcagatgtcactcttcctctgatgtccgtgcctgaaattagagcagtggtggacgcatgggcgtccgtgactgaggaacttggagcacaatacccctgggtgcaaatcttcgaaaacaagggcgctatgatgggctgcagcaacccccatcctcactgccaagtttgggcctcctcatttctccccgacatcgcccagcgcgaagaaagatctcaacaggcttataagtcacagcatggcgaaccgcttctcatggaatactcccgtcaagaacttctgagaaaggagagattggtccttacttccgaacactggctggtcctcgtccctttttgggcaacctggccgtaccagactctgctgctgcctcgccgacatgtgagacgacttcctgagcttactcctgcagagcgcgacgatctggcatcgattatgaagaaacttcttaccaaatacgataatcttttcgaaacctcgttcccttactcaatgggatggcacggagcacctactggttccgaagcaggagcaaactggaaccactggcaactccacgcgcattactacccacctctccttcggagcgcaaccgtgcgcaagtttatggtcggctacgaaatgctggcgcaggcacaacgggacctcacgcctgaacaggccgcagagagactccgtgcgctgcctgaagtccactaccatctgggccagaaggacagagagactgcaactatcgct

SEQ ID NO: 3240 - DNA, 1137 bp, Artificial Sequence
  derived and/or modified sequence
atgtctcgcagcggcactgatccgcagcaacgccagcaggcttccgaggcggacgcggccgcagccaccttccgcgctaacgaccaccagcacataaggtacaacccgctccaggacgaatgggtgctcgtgtcagctcaccggatgaagaggccatggcagggacaggttgagccgcaactccttaaaactgttccgagacatgatccactgaatcctctctgtcctggggctataagagccaatggggaggtcaacccccagtacgactcaactttcctgttcgataacgatttcccagctcttcaacccgacgctcccagtccgggtccatccgatcacccgttgtttcaggcaaagtctgctagaggggtttgcaaagtcatgtgcttccacccatggtccgatgtcactttgccactgatgagcgtccccgagatccgggctgtggtggacgcttgggcatccgtgaccgaggaactcggcgcacagtatccatgggttcagatatttgagaataagggggcaatgatgggctgctcaaatccacaccctcactgccaggtgtgggcctcaagttttcttccggatattgcccagcgagaggagagaagtcaacaagcttacaaaagtcagcacggggagcccttgcttatggaatatagcagacaggaactcctgaggaaagagcgcttagtactcacgagcgagcattggcttgtcctcgtgcctttctgggccacgtggccctaccagacactgctactccctagacgacacgtgcgcagacttccagagttgactccagccgagcgtgacgacctcgcttccataatgaagaaactccttacaaagtacgacaatctgttcgaaacatccttcccctatagtatggggtggcacggggccccaaccggcagtgaggccggagccaattggaaccactggcagttgcacgcacactattacccccctctccttcgaagcgcaaccgttcgcaagtttatggtagggtatgagatgctggctcaagcccaaagggatctaacccccgagcaggccgcagagcggttgagggccctgcccgaggtgcactaccacctcgggcagaaagaccgcgaaacagccacaatcgcc

SEQ ID NO: 3241 - DNA, 1137 bp, Artificial Sequence
  derived and/or modified sequence
atgagccgatctggtacagaccctcagcagagacagcaggcttccgaggcagacgcagcagctgctaccttcagagcaaatgaccaccagcatatccggtacaatcccctgcaggacgagtgggtgctggtgtccgcgcacagaatgaagcggccatggcaaggacaggtggagcctcagctgctcaagactgtgccaagacacgatcccctcaaccctctgtgccccggcgccattagggctaatggtgaggtgaacccacagtatgattcaaccttcttatttgacaacgatttccccgcactgcagcccgacgctccatctccggggcccagtgatcaccctctgtttcaagccaagagcgcgcggggggtgtgcaaggtaatgtgttttcatccatggagcgacgtgacactgccactgatgtccgtacctgaaatcagagcggtcgtggatgcctgggcatccgtaacagaggagctgggtgcacagtacccctgggtgcagatcttcgaaaataagggagccatgatggggtgttcaaacccgcacccacactgccaggtttgggcttcctcctttctgccagacatcgcccagagagaagaaagaagccagcaagcatacaaatcccagcatggtgagcccctgctgatggagtatagccgccaggaactgctgaggaaagaacgcctggtgctgaccagtgagcactggctggtcttggtccccttttgggcgacttggccttaccaaacactgctgctgccacgccggcatgtgcggcgtctgcctgagctcacgcccgccgagagagatgacttagcaagcatcatgaagaagttgctgacaaaatacgacaatttatttgagaccagcttcccttactctatgggctggcatggagcccccactggctctgaggccggagcgaactggaatcactggcagctgcatgcccactactatcccccgctgcttcggtccgctaccgtccgaaagttcatggtgggctatgagatgctggcccaagcccaacgggatttgacccccgagcaggcggctgaaaggcttcgagccctgcctgaggtccactatcacctgggccaaaaagacagggaaactgcaaccatcgcc

SEQ ID NO: 3242 - DNA, 1137 bp, Artificial Sequence
  derived and/or modified sequence
atgtccaggtccggcactgaccctcagcaacgccagcaggccagcgaagcggacgctgcggctgcaacgtttagggctaatgatcaccaacacatcagatataacccactgcaggacgaatgggtccttgtgagcgcccacaggatgaaaagaccctggcaaggccaggtcgagccccagttgctcaaaaccgtgccgagacacgacccactcaatccattatgtcccggcgctatacgagctaatggagaagtcaacccccagtatgacagcaccttcttgttcgataatgacttccctgcacttcagcctgacgcaccctcaccaggcccgtcagatcacccactttttcaggccaagagcgctagaggcgtatgcaaggttatgtgtttccatccctggagcgacgtcacgcttccgcttatgtctgtgccggagatacgggcagtggtggatgcctgggcctctgtgacagaagaactgggggcccagtacccctgggttcagatcttcgaaaacaagggggctatgatgggatgcagcaatccacacccacattgccaggtgtgggcatcatcgtttctgcccgatatcgcccagagggaggaacggtcgcaacaggcctacaaaagccagcacggagagcccctgctgatggaatattcgaggcaagagctgttgaggaaggaaagactggtgttgaccagcgagcattggctcgttttggttccattttgggctacatggccttaccagacccttctgctaccaaggaggcatgtccgtcgactgccagagttaactccagccgagcgggacgacttggcctcaatcatgaaaaagctgctgactaaatatgacaacttattcgagacctccttcccatattcaatggggtggcacggagctccgaccggctcagaggccggagctaactggaaccactggcagctccatgcccactattaccccccactgttgcgttccgctacagtgcgcaaatttatggtaggttatgagatgttggcccaggctcagcgggatttaacccctgagcaggctgctgaacgtctgcgagcattgcctgaagtgcattaccatctgggtcagaaggatcgcgaaaccgctactatagct

SEQ ID NO: 3243 - DNA, 1137 bp, Artificial Sequence
  derived and/or modified sequence
atgtcacgtagtgggactgatccccagcaaaggcagcaggccagtgaggccgatgccgctgccgctacttttcgggcaaacgatcatcagcacatccggtataacccactccaggatgaatgggtgcttgtgtcggcgcataggatgaagagaccttggcaggggcaggtagaaccacagctcctgaagactgtccccagacacgaccctctcaatcccctctgccccggagccattcgcgccaacggggaagttaatccccagtatgatagtacatttctattcgataatgatttcccagctctccagcctgatgcacctagtccaggaccatccgaccatcctctttttcaggccaaatctgctcgaggagtctgtaaggttatgtgtttccatccttggtctgacgtgacattaccacttatgtccgtacccgagatccgggcggtcgttgatgcctgggcctcagtgactgaagaattaggggctcagtatccatgggtccagatattcgaaaacaaaggagctatgatgggatgttctaacccccatccccactgtcaagtctgggcatcatcctttctccccgatattgcacagcgggaggaacgaagtcagcaggcatataaatcccagcatggggagcccctactcatggaatatagtcggcaggagctcctgcgtaaagagagactagtgctcactagtgaacactggctcgtgctagttcctttctgggcgacatggccctatcagactttactgctgccgcgaaggcatgttagaaggctccccgagcttactcccgctgaaagggacgatcttgcctccatcatgaaaaaactcctgacaaaatatgacaatcttttcgagacatctttcccatatagtatggggtggcatggagcccccacagggtctgaggcaggagccaactggaaccactggcaacttcatgcccattattatcccccccttttaagatcagcgacagtacgcaagtttatggtgggatatgaaatgctcgcgcaggctcagcgtgatttaacaccagaacaggctgctgaaaggctgagggccctcccagaggtgcactaccacctgggacagaaagatagggaaacggcaactatcgcc

SEQ ID NO: 3244 - DNA, 1137 bp, Artificial Sequence
  derived and/or modified sequence
atgtcccggtccggtacggatccacagcaaaggcaacaggcttctgaggctgacgcagcggcagctacttttagggcaaatgaccatcagcatatcagatacaaccccctccaagatgaatgggtgctggtttctgcacacagaatgaaacgcccttggcagggacaggtggagccacagctgttgaagaccgtccctcggcatgaccccctcaaccccctctgtccaggcgcaattagagcaaacggcgaggtaaatccacagtacgactcgacatttctttttgacaatgattttcctgccctccagccagatgcgccttcccctgggccgtctgaccatcccttgtttcaagcgaagtccgctcgcggtgtatgcaaggtcatgtgctttcacccttggagtgatgtgaccctgcctcttatgtcagtgccagagatcagggctgtggtggatgcatgggccagcgtgactgaggagcttggcgcccagtatccctgggtgcagatttttgaaaataaaggcgcaatgatgggctgcagcaatccacatcctcactgtcaggtgtgggcctcctcattcctgccagatatagcccagagagaagagaggtctcagcaggcctacaaaagccagcatggggagcctcttctcatggaatattccaggcaggagcttctccgtaaggagaggcttgtgctcacctcagagcactggctggtcctggtccctttttgggctacttggccttatcagacactcttactgcctcgcagacacgtgaggcgacttcccgagctgaccccagcagagcgggacgatttggctagtatcatgaaaaaacttctgaccaagtatgacaacctattcgagaccagctttccttattcaatggggtggcatggtgccccgaccgggtcagaagccggagccaattggaaccactggcaactgcatgcacactactaccctccgttactgcggtcagctacagtgcgcaaattcatggtgggctatgagatgctggcgcaggcacaacgcgatctgacccccgagcaggccgcagaaagactgcgggcactacccgaagtgcattaccacctggggcagaaggatcgcgaaacagcaacaattgct

SEQ ID NO: 3245 - DNA, 1137 bp, Artificial Sequence
  derived and/or modified sequence
atgagccgctccggcactgacccgcaacaaaggcagcaggccagcgaagctgacgcggcggccgccacttttcgcgccaacgaccaccaacacatcagatacaacccgctccaggatgaatgggtgctggtgtccgcccatcggatgaagcggccgtggcaaggacaagtggagccccagctgctcaaaactgtcccccgccacgacccactcaacccgttgtgccccggagccatcagagctaacggggaggtgaacccacagtatgacagcactttcctttttgacaacgacttccccgccctccaaccggatgcaccttcaccgggaccttcagaccacccactctttcaggccaagtcagccagaggcgtctgtaaggtcatgtgttttcatccgtggtcagatgtgactttgccgctcatgtccgttcctgagatcagagccgttgtcgacgcatgggctagcgtgactgaggaactcggggcccagtacccatgggtgcagatcttcgagaacaaaggggctatgatgggatgtagcaacccgcatccgcactgtcaagtgtgggcgtcatccttcctcccagacattgcccagcgggaagaacggtcgcagcaggcctacaaatcgcagcacggagaaccgctgctcatggagtactcacgccaggagctgctgcggaaggaacgtctcgtcctgacctcggagcactggctggtcctggtccccttctgggctacctggccgtaccagaccctcctgcttccgcggcgccatgtgcgcaggctgccggaattgacgcctgcggaacgggacgacttggcctcaatcatgaagaagctcctgactaagtacgacaacctgttcgaaaccagcttcccgtactctatgggctggcacggtgccccgaccggctccgaagcgggagcaaactggaaccactggcagttgcacgcccattactaccctccgctgctgaggtcagcgacggtgcggaagttcatggtgggatatgaaatgctggcgcaggcccagcgggacctgaccccggagcaggcagccgagcgcctgcgcgccctgccggaggtgcactaccatcttggccagaaggatagagaaaccgcaaccattgca

SEQ ID NO: 3246 - DNA, 1137 bp, Artificial Sequence
  derived and/or modified sequence
atgtccagaagcggaaccgacccgcaacaacgacaacaagcctccgaagcagatgccgccgctgcaactttccgcgcgaacgaccaccaacacatcaggtacaatcctctgcaagatgagtgggttctagttagcgctcaccgcatgaaaaggccctggcagggccaagtcgaaccacagttgttgaagacagtgcccagacacgatccgcttaatcccctgtgtcccggtgctatcagagctaatggagaggtgaaccctcagtacgattcaactttcctgtttgataatgacttccccgcattacaaccagatgctcctagcccaggcccctcggatcatcccctctttcaggccaagagcgcccggggagtgtgcaaagtaatgtgctttcatccatggtctgatgtgactctgcccctgatgtcggtacccgaaatccgcgcggtggtggacgcttgggctagcgtgactgaagaactgggagctcagtacccatgggtgcagattttcgaaaataagggcgccatgatgggatgttctaatccacatccacattgccaggtttgggcctcttcattcctgcctgacatagcacagcgggaggagcggagccagcaggcctataaatctcagcatggagagccactcctgatggaatattcacggcaagagctgctgaggaaagagcgcctggtcctcacgtccgagcattggctggtacttgtccctttctgggccacatggccgtaccaaaccctcttactgccgcgtcggcatgtcaggaggcttccagaactcacgcccgcagaaagagacgaccttgcgtcaattatgaagaaacttctgacaaagtatgacaatctattcgaaacaagttttccgtattcaatggggtggcatggagctccaacgggttctgaggcgggggctaattggaaccattggcagctgcatgctcactattatcccccgctccttcgaagtgccacagtgaggaagtttatggtggggtacgagatgcttgctcaggcccagcgagacctcaccccagagcaggccgcagagaggctgcgagcacttcctgaagtccactatcatctggggcaaaaggaccgggagactgctaccattgcc

SEQ ID NO: 3247 - DNA, 1137 bp, Artificial Sequence
  derived and/or modified sequence
atgtccagaagcggcactgatccgcaacagcgccagcaagcatcggaggcggacgctgccgctgctactttccgggccaacgatcatcagcatataaggtacaatccgcttcaggacgagtgggtgttggtctccgctcaccgcatgaaacgcccgtggcagggacaagttgaacctcagctacttaaaactgtgcctcggcacgatccgctcaatcctctatgcccaggggcgattcgagctaacggcgaggtaaatccacagtacgacagtacgttcctgtttgataatgacttccctgccctgcagcccgacgctccatcccctggtccgtcagatcatcctctattccaggcgaaaagtgcacgcggcgtgtgtaaggtgatgtgcttccacccatggagcgatgtcactttgcccctgatgtccgtgcccgagatacgcgctgtcgtggatgcctgggcgtcggttacggaggagttaggagcccagtatccgtgggtgcagatattcgagaataagggcgccatgatggggtgtagcaacccccaccctcactgtcaggtctgggccagctcttttctgccagacatcgcacagagagaagagagaagtcagcaggcctacaagtcacaacacggggaaccgctactgatggagtacagtagacaggaattgctgcgcaaagagcgccttgttctgaccagcgaacactggctggtgcttgtgcctttttgggcaacgtggccataccaaacgttgctgctgccccgacgacacgtacgtagattgcccgaactgacgcctgcagagagagatgatctggccagcattatgaaaaaactgctgaccaaatacgataacctctttgagaccagtttcccatactctatgggttggcacggggctcctaccggctccgaagccggtgctaattggaatcattggcagctacacgctcactattaccccccactgcttcggtctgcaacagtaagaaagttcatggttgggtacgagatgttggctcaggctcagcgcgatctgactcccgaacaggccgcagagaggctccgtgcgctgccagaggtgcactatcacctcggacagaaggaccgcgagactgccaccattgct

SEQ ID NO: 3248 - DNA, 1137 bp, Artificial Sequence
  derived and/or modified sequence
atgtcgaggtccggtactgatcctcaacaaaggcaacaggcctctgaggcggacgccgcagctgcaactttccgagcaaatgatcaccaacacataagatacaatccgctccaagacgaatgggtcttggtcagtgcgcaccgtatgaagaggccgtggcagggtcaggtcgaacctcagctcctaaaaactgtacccagacatgatccgcttaacccactatgtccaggagcaatacgggctaatggtgaggttaacccgcagtatgactcaactttcctcttcgataacgattttcctgcgctacagccagatgccccttccccagggccaagtgatcatcctctctttcaagctaagagcgctcgcggagtgtgtaaggttatgtgttttcacccatggtctgatgtaacgcttcctttgatgagcgtgccagaaattcgtgctgttgtggatgcttgggcatcagttactgaagagcttggggcccaatacccatgggtgcaaatatttgaaaacaaaggagctatgatggggtgttctaatcctcaccctcattgtcaagtgtgggcttctagcttcctacccgatatcgctcaaagagaggaacggtctcagcaggcgtacaagtcccaacatggggagcctctgctaatggagtactcaagacaagagttgctgaggaaggaaagacttgtccttacttctgagcattggcttgtgcttgtgcctttctgggctacttggccctaccaaactctgctcctacctaggcgccatgttcgacgattgcccgaactcaccccggctgagcgggatgatctcgcatccataatgaaaaagttgttaacgaaatatgataatttgtttgagactagcttcccctattctatgggctggcacggagctccaacgggttccgaagcaggcgcaaattggaatcattggcagctgcatgctcattactatcccccattgctgcgcagcgctactgtcaggaaatttatggttggttatgagatgcttgcacaggctcaacgagatctaacgccagaacaagcggccgagaggcttcgagccctcccagaagttcactaccatctcggtcaaaaggatagagaaaccgccactatagct

SEQ ID NO: 3249 - DNA, 1137 bp, Artificial Sequence
  derived and/or modified sequence
atgagtaggtccggaacagatccacagcagcggcaacaggcaagcgaggccgacgctgcagctgcaacctttcgagcgaacgaccaccagcacattcgctataaccccctacaagacgaatgggtcttggtgagcgcccacaggatgaaaaggccatggcagggccaagtggagccccagctactgaagaccgtgccaaggcacgaccctctcaacccactttgtcctggtgccatcagggctaatggcgaagtcaacccacagtacgatagcacttttctgttcgacaatgactttcctgccttgcagccagatgctccctctcccggaccctctgatcaccccctcttccaggcgaagtccgcgcgtggagtgtgtaaggtgatgtgctttcatccatggtccgatgttaccctgccactgatgagcgtgcccgaaatcagagctgtggtggatgcctgggcctcagtgactgaggagttgggcgctcaatatccttgggtgcagatttttgagaataaaggggccatgatggggtgctctaaccctcatccccactgtcaagtctgggcttctagcttcctccctgatatcgcccaacgggaagagaggagtcaacaggcctataagtctcagcacggggaacctttgctcatggagtactcacggcaagagctgctcagaaaagaacgcctcgtgctaacttccgaacattggctggtgctcgtaccgttctgggcaacttggccgtaccagaccctgctgctgccccggagacatgtccgccgcctccccgaattgacccctgccgaacgagacgatcttgcttcaataatgaaaaagctcctcacaaaatatgacaatctcttcgaaacctcctttccatattccatgggatggcacggggctcccaccggttcggaggcaggggctaattggaaccattggcaattgcacgctcattattacccccccctgttgaggtctgcgacagtacggaaatttatggtcggatatgagatgctggctcaagcccagcgtgaccttacacctgaacaggctgccgaacgactgagagccctgcccgaggtgcactaccatctcggacagaaagacagggaaacggcgaccattgcg

SEQ ID NO: 3250 - DNA, 1137 bp, Artificial Sequence
  derived and/or modified sequence
atgtctaggagtgggacagatccacagcagcgacagcaggcctcagaggccgacgccgccgctgcgacgtttagagctaacgaccaccaacatatcaggtataatcccctgcaggacgagtgggtcctggtgtccgctcatcgcatgaaacgcccctggcaggggcaagtggagccccagctcctgaaaacagtaccccggcatgatcccctcaaccccctttgcccaggcgccattcgggcaaacggggaagtaaatcctcaatatgatagcactttcctcttcgataacgacttccctgccctgcaaccggacgccccatcccctggcccttccgaccaccctctgttccaggccaaatcagccaggggggtgtgcaaagtcatgtgtttccatccatggtctgacgtgactctgcctctgatgagcgtgcccgagattcgcgctgtggtcgatgcctgggcctccgtaaccgaggaattgggagctcagtacccctgggtccagatctttgagaataaaggcgctatgatgggatgctctaacccccacccccactgccaggtctgggcgagctcctttctgccggacattgcccagagagaggagcggagccaacaagcgtacaagtcccagcacggcgaaccacttctgatggaatattcccgccaggaacttcttaggaaagaaagactggtgttgacaagcgagcattggttggtcctcgtgcccttttgggctacgtggccataccagactctgcttctgccacgcaggcatgtgcgcagactgccggagctgacgcccgcagagcgggatgatttggcatctatcatgaaaaagctcctcaccaagtatgacaacctcttcgaaacctctttcccatactctatgggctggcacggggctccgaccggatcagaggccggggcaaactggaatcattggcagctgcacgcacactattacccacctcttctcaggtccgccacggtccgaaaattcatggtgggatacgagatgctggcccaggctcagcgggacctgacccccgaacaagctgcggaaagactcagggctctgcctgaggtgcattaccatctggggcagaaagatagagagaccgccacgatcgca

SEQ ID NO: 3251 - DNA, 1137 bp, Artificial Sequence
  derived and/or modified sequence
atgtcaagaagtggaactgatcctcaacaacgtcaacaagctagtgaagcggatgctgctgcagctactttcagagcaaatgatcaccagcatattaggtataatcctcttcaagatgaatgggtgttggtttctgcacatagaatgaaaagaccgtggcagggacaagtagagccacaattgttaaaaactgtgccacgtcatgatccacttaatcccctatgcccaggagccattcgagctaatggagaagttaatccgcaatacgatagtactttccttttcgataacgatttcccagccctgcaacctgatgctccgtcacctggaccaagcgatcacccgctgttccaggctaagagcgcaagaggggtttgtaaggtaatgtgtttccacccatggtccgacgtcactcttcctttaatgtcggtccctgaaatcagggcagtcgtggacgcttgggccagtgtgacggaagaattgggagcccagtatccgtgggtgcaaattttcgaaaataagggagccatgatggggtgttccaaccctcacccgcattgtcaagtttgggcgtcttcgttcctaccagatatagctcaacgagaagagcgcagccaacaagcatacaaaagtcaacacggggaacctttactaatggagtactctaggcaggagctccttcgaaaagaaagattggttctgacaagtgaacattggctagtgcttgttcctttctgggccacatggccatatcaaactcttcttcttccacgtcggcatgtgagacgattaccggaactgactccggctgaacgggatgaccttgcttctatcatgaaaaaactgctcacaaaatacgataaccttttcgagacttcctttccatatagcatgggatggcacggtgcgccaacaggatcagaggctggagccaactggaaccactggcaattacatgcacattattaccccccgcttctgcgttcagccaccgttcgtaagttcatggttggctatgaaatgttggcacaggcacagcgtgaccttacaccagagcaggccgcggaaaggctccgcgccttacctgaagtacattatcatctaggacaaaaagacagagaaacagcaaccatcgcc

SEQ ID NO: 3252 - DNA, 1137 bp, Artificial Sequence
  derived and/or modified sequence
atgagtagaagcgggaccgatcctcaacagaggcagcaggctagcgaggcagacgctgcagctgccactttcagagccaacgatcatcaacacatcagatacaaccccctgcaggacgagtgggttctggtttccgcacatagaatgaaaaggccatggcaaggacaggtggaaccccagctgttaaaaaccgtcccccgccacgacccactcaacccgttgtgcccaggagcaatccgcgcgaacggcgaggtgaatcctcagtacgatagtacctttttgtttgacaacgatttccctgcgttacagcccgacgctccaagccctggcccaagcgaccatccactgttccaagccaaatctgcccgtggagtgtgcaaggtgatgtgctttcacccctggtctgacgtgacattacctctgatgagcgtccctgagatcagggcagtcgtggacgcatgggctagcgtgacagaagaattgggagctcagtacccgtgggtgcagattttcgagaacaagggtgcaatgatgggctgcagcaacccacacccacattgtcaggtgtgggcatccagctttttgccagatatcgcccagagagaagaaaggtctcaacaagcctacaaatctcaacatggcgagcctctgttgatggaatactctaggcaggagctcctgcgaaaggagcggcttgtcttaacgtcagagcactggttggttctggtccccttctgggccacctggccctaccaaactctcttgttacctcgaagacacgtccgaagactgccagagctgacaccagcagagcgcgatgatctggccagcattatgaaaaaactccttacaaagtatgacaacctgttcgaaacatccttcccatatagcatgggatggcacggcgccccaaccggctcggaggccggagccaattggaatcattggcagctccacgctcattactatcccccattgttgaggagtgctacagttcggaagtttatggtgggatacgaaatgcttgcccaagcacagagagacctgacccccgagcaagctgctgagaggcttagagcccttcctgaggtccattaccacttgggacaaaaagatagagagaccgctactatcgcg

SEQ ID NO: 3253 - DNA, 1137 bp, Artificial Sequence
  derived and/or modified sequence
atgtcacgcagtgggaccgatccacaacaacggcaacaggcatccgaagcagacgccgcggcagcaactttccgcgcaaatgatcatcagcatatacggtataacccactgcaggacgaatgggtccttgtgtcggcacatcgtatgaagaggccctggcaaggccaggtggagccccagcttcttaagacggtgcccaggcatgatccgctgaaccctctgtgtcctggagcgattcgggccaacggagaggtgaacccccaatacgatagcacgttcctctttgataatgattttcctgccctgcagcctgatgcaccttccccaggcccatcggaccatccactctttcaggcaaaatcggcacgaggcgtttgtaaggtgatgtgctttcatccctggtcagatgtcaccctgcccctgatgtcggtgcctgaaatcagagctgtggttgatgcttgggcctcggtcaccgaggaactgggagcccaatatccgtgggtgcagatatttgagaacaagggagccatgatgggctgttccaacccacatcctcattgccaagtgtgggcatcttccttccttccagatattgcccagagagaggaaagaagccagcaggcatacaagtcccagcacggtgaacctctgcttatggaatacagcagacaagagctccttaggaaagaacgccttgtccttacctcggagcattggctcgtattggtgccattctgggcgacttggccatatcaaaccctgctcttgcccaggcgacacgttcggaggctccccgagctgactcccgctgaaagggacgatttggcctcgattatgaagaaacttcttactaaatacgataacctctttgaaacctcgttcccttactcaatgggctggcatggggcacccactggttccgaagcaggagcaaactggaaccactggcaactgcatgcacattactaccctcctttgcttcggtcggcaacggtgcggaaattcatggtgggttacgagatgctggcacaagcacaacgcgaccttactcctgaacaggcagcagaaaggttgagagcgctgcctgaagtgcactaccatctggggcagaaagacagggaaaccgcaaccattgca

SEQ ID NO: 3254 - DNA, 1137 bp, Artificial Sequence
  derived and/or modified sequence
atgtcccgcagtggaacagacccccagcaaaggcagcaagcttccgaggcggatgccgcagcggctacatttagagcaaatgaccatcagcatattcgttacaacccattacaggatgaatgggttctggtgagcgcccacaggatgaagcggccatggcaggggcaggtagaacctcagctgttaaaaacagtacctagacatgacccgttgaatcccctgtgtcctggcgctattagagccaacggcgaggttaacccacagtacgattcgaccttcctctttgataatgactttcctgcgctgcagccggacgccccaagccctggcccatctgatcaccccctgtttcaagccaaaagcgcccgaggcgtctgtaaggtgatgtgttttcacccttggtccgatgtgaccctcccactgatgtccgtccctgaaatcagggccgtggtggacgcctgggcgtcagtgactgaagagctgggagctcaatatccatgggtccagattttcgagaacaagggtgctatgatggggtgctccaaccctcaccctcactgccaagtatgggcttcatccttcctgcccgacatcgcgcagcgggaggaacgcagtcagcaggcttacaagagccagcatggagaaccattgctcatggagtattcacgacaggagctcctcagaaaagaacggctggtgttaacctccgagcactggctagtactggttccattctgggccacttggccatatcagacattgctgctccctcggagacacgttaggcgacttccggagctcacacctgcggagcgggacgatctggcttccataatgaagaaactgctcaccaagtacgataatctgtttgagaccagcttcccttatagtatgggatggcatggagcacctacaggtagtgaagccggagcgaattggaaccattggcagctgcatgctcattactatcctcccctgttgcgcagtgccacagtgcgcaaattcatggtgggttatgaaatgctggcccaggcccagcgggacctgacacctgaacaggcggccgagcgccttcgcgccttaccggaggtgcactatcacctcggccagaaggacagagagacagccacgatcgcc

SEQ ID NO: 3255 - DNA, 1137 bp, Artificial Sequence
  derived and/or modified sequence
atgtccagatcaggaaccgatccacagcaacgccagcaagcatcggaggccgacgccgcagctgccacgttccgcgcaaacgaccaccagcatattcggtataatccattgcaggatgaatgggtcttggtgtcggcgcatcgtatgaagcgcccatggcaagggcaggtggaaccacaactgctgaaaactgtcccacgccacgatcctctcaacccactctgtcctggggcaattcgcgcaaacggtgaagtcaacccgcagtatgactccacttttcttttcgacaatgattttccggctctgcaacctgacgctccttcgcctggaccgtcggaccatccactttttcaggcaaagtcggcaagaggagtgtgtaaggtgatgtgtttccatccatggtccgatgtcaccctgcccctcatgagcgtccctgaaatcagagccgtggtggacgcctgggcctccgtgaccgaggagctgggggcgcagtacccttgggtgcagatttttgaaaacaaaggcgcaatgatgggatgttcaaatccgcatccacactgccaagtgtgggcgagctcatttcttccagatattgcacaacgtgaagaacgatcgcagcaggcttacaaatctcagcacggagagccactgctcatggagtattccagacaagaacttttgagaaaagagcgcttggtgcttacttcggagcactggctggtcctggttcctttctgggcgacctggccgtatcaaactctcctgctgcctaggcgccatgtgagacgactcccagagttgactcctgcagaaagagatgatttggcctccattatgaaaaagctcctgactaagtacgataacctttttgaaaccagctttccttactccatgggatggcatggcgcacctactggttcagaggccggcgcgaactggaaccattggcaactgcacgcccattactacccacctctcctcaggtcggcaaccgtccggaagtttatggtgggttacgagatgttggcccaagcccaaagagatctgaccccagaacaagcagcagaaagactcagagcacttcctgaagtgcattaccatctgggacaaaaagaccgtgagacggcgaccatagca

SEQ ID NO: 3256 - DNA, 1137 bp, Artificial Sequence
  derived and/or modified sequence
atgtccagaagcggcaccgatccacaacagcgccagcaagcttcagaggccgacgcagcggccgccacctttcgcgcgaatgatcaccagcatattcgctacaacccactccaagatgagtgggtgctcgtgagcgcgcaccgtatgaaacggccgtggcagggacaggtggagccgcaattgctgaagaccgtacctcgccacgaccctctcaatccgttgtgtccgggcgcgattcgcgcgaatggtgaagttaaccctcagtatgatagcacattcctgtttgacaacgatttcccagcacttcaaccggatgcgccaagccctggcccctccgaccaccctctgtttcaagccaagagcgcccgcggtgtgtgtaaggttatgtgcttccacccgtggagcgacgtgacgttaccgctgatgtccgtcccagagatacgcgccgttgttgacgcatgggcatctgtgacggaagaattgggtgcgcagtacccttgggtgcagatcttcgaaaataaaggtgcgatgatgggttgtagcaacccgcaccctcattgtcaggtgtgggcgagctctttcctccccgatatcgcccagcgcgaagagcgctcacaacaggcctacaagtcgcagcacggtgagccattgctgatggagtactctcgccaagagttgctacgtaaagagcgcctggtgttaaccagcgaacactggttagtgttggtaccattctgggcgacctggccgtatcagacccttttgttgccgaggcgtcacgtgcgtagattgcctgaattgactcccgcagaacgcgacgacttggctagcattatgaagaagttgctaactaagtacgacaatctgtttgagacgagcttcccgtactccatgggatggcacggtgccccaaccggttctgaagcaggagccaactggaaccattggcaactgcatgctcattactaccctccgctgctgagatctgcgacagtcaggaaatttatggtgggttacgagatgctcgcccaagcacagagagacctgaccccagaacaagccgcagaacggctgcgagcgctgcctgaggtccactaccacttgggtcagaaggaccgcgagactgccaccattgca

SEQ ID NO: 3257 - DNA, 1137 bp, Artificial Sequence
  derived and/or modified sequence
atgagtaggtcgggaactgacccccaacagcggcagcaggcctctgaggcagacgccgccgctgctaccttccgcgccaatgatcatcaacacattcggtataacccactccaggatgagtgggtgcttgtgtcagcgcacagaatgaaaagaccttggcagggccaggtagagccacagctgctaaagaccgtgccaaggcacgacccactgaatcccctctgcccgggcgcgattcgcgcaaatggggaagttaaccctcagtatgatagtacatttctattcgacaacgatttccctgccttgcagccagatgctccctcacctggcccttctgaccatccactatttcaggcaaaatcggccagaggcgtttgtaaggtgatgtgttttcatccgtggtccgatgttactcttccactgatgtctgtgccagagatccgggccgtggtggacgcttgggcctctgtaaccgaagagctcggggcccagtacccatgggtgcagattttcgagaataagggcgccatgatgggctgtagtaacccccatccgcattgccaggtatgggccagttcatttctgcctgacatcgctcagagggaagagcggagccagcaagcttataaatcccagcacggagagcctctcctgatggagtactcccggcaagagcttcttagaaaggagcggttagtgctaaccagcgaacactggctggtgctcgtgcctttttgggctacatggccctaccagacgttgctgctgccgcggagacacgtgaggcgtttacccgagttgaccccggccgagcgcgacgatctggcgagcattatgaaaaagctgcttactaaatatgacaatctctttgaaacttcctttccgtattccatgggctggcacggtgcccccacgggctccgaggctggagccaattggaaccactggcaactccatgcccattattacccacccctgcttcggtccgcgaccgtgcggaaattcatggtaggatatgaaatgttggcccaggcccagcgggatctgaccccagagcaggcggcggaacgcctgcgggctctgccagaggttcactaccatttagggcagaaggatcgcgagactgctacgatagct

SEQ ID NO: 3258 - DNA, 1137 bp, Artificial Sequence
  derived and/or modified sequence
atgtctaggtctggaacggatccgcagcaaagacagcaggcttctgaagctgacgccgcagcagcaacctttagggctaacgaccatcagcacattaggtataacccactccaagatgagtgggttctcgttagcgctcatcgcatgaagagaccttggcagggacaggtggagccacagttgctgaagacagtcccaagacatgaccccctcaatccactgtgtccgggcgccatacgcgctaacggagaagtgaatccacaatatgactccaccttcctttttgataatgatttccctgccctgcaacctgatgccccctccccaggaccaagcgaccatccattattccaagctaagtctgctagaggagtatgtaaagttatgtgctttcacccttggtctgatgtaaccctgcctttgatgtcagtgcccgagataagggccgtggtggacgcctgggcctcggtcacagaagaactcggggctcaatacccttgggtgcagattttcgaaaacaaaggagcaatgatggggtgcagcaaccctcatcctcattgccaggtgtgggcctcgtctttcctgcctgatatcgctcagcgagaggagaggagccagcaagcatataaatcccagcatggtgagcctttgctgatggagtacagcagacaggaactcctgagaaaagagaggttagtccttacttccgagcattggctggtgcttgttccgttctgggctacctggccctaccaaacactactcctgcctcgtcgccatgtgcggcgattgcctgaactgacccccgccgagagggatgatcttgcctctattatgaaaaaattgctgacaaaatacgacaacctgttcgagaccagcttcccctattctatgggatggcacggcgcccccactggaagcgaagcaggggctaattggaaccactggcagcttcatgcgcactactacccccctttacttcgaagcgccacggttcggaagttcatggtcgggtatgaaatgctggctcaggcccaacgggacctcacccccgaacaagctgctgagagactccgtgctcttcccgaggtgcattaccatctgggtcaaaaggatagggagacagctactatcgcc

SEQ ID NO: 3259 - DNA, 1137 bp, Artificial Sequence
  derived and/or modified sequence
atgtcacgatctggcacagatccacagcagcgacaacaagccagcgaggccgacgccgctgctgccacgtttcgtgccaacgatcaccagcatatcaggtacaatcctctgcaggacgaatgggtgcttgtgtccgcccatagaatgaaacgcccctggcaggggcaagtcgagcctcagctcctgaagaccgtccctcgtcatgatcccttgaacccactgtgtcctggcgcaatccgggccaacggcgaagtcaacccccagtatgatagcactttcctatttgacaacgacttccccgccctacaacccgacgccccctcacctggcccttccgaccacccactttttcaggccaaatccgccaggggggtgtgcaaggtcatgtgttttcatccctggagcgacgtcaccctgcctctgatgtctgtgcctgagataagggccgtggtcgacgcatgggcaagcgtgaccgaagaactaggcgcgcagtacccttgggtacagatttttgagaataagggcgcaatgatggggtgtagcaacccccatccccactgccaagtgtgggctagctcattcctccccgatattgcacagcgtgaggaaaggtctcagcaggcatacaagtctcagcacggagaacccctcctcatggagtattcaaggcaggaactcctgagaaaggagcgactagtgctcacctccgaacactggctggtgctggtgcccttttgggctacttggccgtaccagactcttttgctgcccagacgacatgtgcgccggttgcctgagttgacacctgccgaacgcgatgatctggcctccataatgaaaaaattgctgacaaaatacgacaacctctttgaaacatcattcccttatagtatgggctggcacggggcccctaccggaagcgaggcaggcgcgaactggaaccactggcagctgcatgcccattattatcctcccctcctgcgctctgctaccgtgcgaaaattcatggtgggttacgaaatgctcgcacaagcccaacgcgatctgactcccgaacaggccgcagagcggcttcgcgctctgcctgaggtccactaccacctcgggcagaaggacagagagaccgccacaatcgcg

SEQ ID NO: 3260 - DNA, 1137 bp, Artificial Sequence
  derived and/or modified sequence
atgagtaggtcaggtactgatcctcagcagagacagcaggcgagcgaagcggatgctgccgccgcgacgttccgagctaatgatcatcagcacataaggtacaaccctctgcaggacgaatgggttctggtgagcgcccatcggatgaaaagaccctggcaaggccaggtggagccccagctgctgaagactgtgcccagacatgacccactgaatcccctgtgccccggcgccatacgagccaacggagaggtcaacccccagtacgattctaccttcctgtttgataatgacttcccagcactgcaacccgacgcgccctcccccggacccagtgatcatccgcttttccaggccaagtcggccagaggggtctgtaaagtaatgtgctttcacccttggagcgacgtcacactcccgcttatgtcagtaccagagattcgcgccgtggtggatgcctgggcaagcgtaacagaggaactcggagcccagtatccatgggtgcagatcttcgagaacaaaggcgccatgatgggatgtagtaacccccaccctcactgccaggtgtgggctagctcattcttgcccgatatagcccaacgagaagaaagatcccagcaggcctacaagtcacagcatggcgaaccactgttaatggaatactcccgacaagagcttctccgaaaggagagactggtgcttaccagtgaacattggctggtcctggtgccattttgggctacctggccctaccagactctcctcttacctcgtagacatgtgcggcgactgcctgaactcacccctgcggagagagatgacctggctagcatcatgaagaagctgctgactaaatatgacaacctcttcgagacctccttcccctactcaatgggttggcacggtgccccgaccgggtccgaggcaggtgcaaactggaaccactggcagttacacgcccattattatccccctctcctgcgatctgctaccgtccgcaaatttatggtgggttacgagatgcttgcgcaggcccagcgcgatttgaccccagaacaagcggcggaaaggctgagagctctccccgaagttcactatcacctcggacagaaagaccgagagacggctacaatcgct

SEQ ID NO: 3261 - DNA, 1137 bp, Artificial Sequence
  derived and/or modified sequence
atgtcccgtagtggaaccgacccccagcaacgtcagcaggcctctgaagccgatgccgcggcagccaccttccgagccaacgatcaccagcatatacgctacaatcccttgcaagacgagtgggtgttggtatctgctcatagaatgaagaggccttggcaggggcaggtcgagccacagctactgaaaacggtgcctcgccatgacccattgaaccctctatgtccgggcgcgatcagagctaacggcgaggtcaacccgcaatacgactcaacttttttgttcgataacgacttccctgctctccagcccgacgcacccagccctggacctagcgaccatcctctcttccaagctaagagcgcccgcggcgtgtgcaaagtgatgtgttttcatccttggtcagacgtaaccctgccccttatgtcagttcctgaaatacgagctgttgttgacgcctgggcttctgtcaccgaagagctcggcgcccaatatccttgggtgcagatttttgaaaataagggggccatgatggggtgctccaatccgcatccccactgtcaggtatgggctagctccttcttgccagacatagctcagcgagaggagcggtctcagcaggcatacaagtctcagcacggcgagcctctgctaatggagtattcaaggcaagaactgctcaggaaggagcggctcgtcctaactagtgaacattggcttgtattggtgcctttttgggccacttggccttatcagaccttgttgctcccgcgccggcatgtgaggaggctgcctgaactcacaccagccgagagagacgatctcgcatccatcatgaaaaaactgctcactaagtacgataacttattcgaaacgagctttccttattctatgggttggcacggggccccaacaggctctgaagccggagctaattggaaccactggcagctacacgcgcactattacccccccctgctgcgctcagccacagtgcggaagtttatggttggctacgagatgctcgcacaggctcagcgtgacctaacacctgaacaggccgccgagcgactgagagccctgccggaagttcattatcatctcggacaaaaggatcgagaaactgcgaccatcgct

SEQ ID NO: 3262 - DNA, 1137 bp, Artificial Sequence
  derived and/or modified sequence
atgtctcgaagcggaacggacccccagcaacgccaacaagctagcgaggctgatgctgctgcggcaacgtttagagctaatgatcatcagcatattcgatataacccgctgcaggatgagtgggtgctggtctcggctcatcgcatgaagcgaccttggcagggtcaagtcgagcctcagctactaaagactgtccctcgccacgacccattgaatcccctgtgcccgggcgccattcgcgcaaatggtgaggtgaatccccagtacgactctacatttctttttgacaacgactttcccgctctccagcctgatgctcccagcccggggccatctgaccacccactgttccaggctaaaagtgctaggggggtatgcaaggtaatgtgtttccacccatggtccgatgtcacactgcccctgatgagtgtgccagagatacgcgctgtagttgacgcctgggcttctgtgacagaggagctgggcgcccagtacccttgggttcagatatttgaaaataagggcgctatgatggggtgttccaaccctcaccctcactgccaggtgtgggccagctcctttttacctgacattgctcagcgcgaggagcggtctcaacaagcttataaatcacagcatggagagccgcttcttatggagtactcgcggcaggagcttttgagaaaggaacggctggtcctaaccagcgaacactggcttgtcttggtccccttctgggcaacctggccctatcaaaccctgctgctgccaagaaggcatgtgagacgccttccggaattgacccctgccgaacgcgacgacctggcctctatcatgaagaagctgctgacaaaatacgacaacctgttcgaaaccagcttcccatattctatgggctggcatggggcccctaccggcagtgaagctggggcaaactggaatcactggcagctccacgcgcactactatcctcctctcctccgttcagctacagttaggaagtttatggtaggctatgaaatgcttgcacaggctcagagagacctcacccccgaacaggcggccgagaggctgagggcactgcccgaagttcattaccatctgggtcagaaggatagggaaaccgcaaccatcgcc

SEQ ID NO: 3263 - DNA, 1137 bp, Artificial Sequence
  derived and/or modified sequence
atgagtcgcagcggtactgaccctcagcaaagacagcaggctagcgaggccgacgctgcagccgctacctttcgagctaacgatcaccagcatatacgatataaccccttacaggatgaatgggtcctagttagcgcacaccgaatgaaaagaccctggcagggccaggtggaaccccagctattaaagacagtgccacgtcatgaccctctgaatccactgtgcccaggcgctattagagcaaatggggaagtgaatccacagtacgactctaccttcctatttgacaacgatttccccgcactccagccagatgcacctagccctggcccaagtgatcatcccttgttccaagctaagtcagccagaggcgtttgcaaggttatgtgcttccacccctggagcgatgtgacacttcctctgatgtccgtccccgagatacgcgccgtggtggacgcatgggcctcagttactgaggagctgggcgcccagtacccatgggttcaaatcttcgagaataagggtgctatgatgggctgttccaatccccatccacattgtcaagtttgggcatccagctttctgcctgatatagcacaacgggaagaaaggtctcaacaggcttacaagtctcaacacggcgaaccactcctgatggagtattctcggcaggaacttctcagaaaggagcgacttgtgctaacttccgaacattggctggttctcgtgccattttgggcaacatggccttaccagaccctgctcctgccaaggaggcatgtgcggaggctgcccgaactgactccagcagagcgagacgatcttgcatcaattatgaagaagctgttaactaagtacgataatttatttgaaaccagcttcccttatagcatggggtggcatggtgccccaaccgggtctgaggctggagccaactggaaccactggcagctccacgcccactattatccaccactgctacggagtgctaccgtcagaaagttcatggtggggtatgagatgttagctcaggcccagagggacctaacaccagagcaggccgctgaaaggttaagagccctccctgaagtgcattatcaccttggacagaaagatcgagaaaccgctacaatcgcc

SEQ ID NO: 3264 - DNA, 1137 bp, Artificial Sequence
  derived and/or modified sequence
atgtcccgctcaggaaccgatccacagcaaagacaacaagcttccgaggctgatgccgctgctgccacatttagggctaatgaccatcagcatattaggtataatccgctgcaggatgagtgggttttagtatcggcgcatcggatgaaaaggccatggcaagggcaggttgaacctcagctgttgaaaacggttccgcgtcatgatcccctgaatccgttgtgcccgggagctattcgcgcaaacggagaagttaatcctcaatatgatagcacgtttttattcgataatgactttccagcactgcaaccggatgctccgtctccgggacctagcgatcatccgttgtttcaggctaaatccgcacgaggagtgtgcaaagtaatgtgctttcatccttggtcagatgtcacactgcctttgatgtcggttccggaaatacgcgctgtcgtcgacgcgtgggcgtctgtcacagaagagctgggtgctcaatacccttgggttcagatcttcgaaaacaaaggtgccatgatgggctgttcgaatccccacccgcattgccaggtctgggctagcagttttctcccggacatcgcgcagcgtgaagaaaggtctcagcaagcgtataaaagtcagcatggagaaccactgcttatggagtattcacggcaagaacttcttagaaaagaacgccttgtactcacctcagaacattggcttgtactggttccgttctgggcaacatggccgtaccaaaccttgctgcttccaaggcgccatgttcggcggcttccggaattaacacctgccgaacgcgatgatctggcgtcaatcatgaaaaaactcttaactaaatatgataatcttttcgaaacatcatttccgtatagtatgggttggcacggagcaccaacagggagtgaagcgggagctaactggaaccactggcaactgcatgcgcattattaccctccattgctgcggtctgcgacagtccgcaaatttatggtaggatacgaaatgctagcccaggcgcaacgcgatcttacgccagaacaggcagccgagcgcctgagggcgctcccggaagtccattaccatcttggacagaaagatagagagactgccacgatcgca

SEQ ID NO: 3265 - DNA, 1137 bp, Artificial Sequence
  derived and/or modified sequence
atgtcaagatccggtaccgatccacagcaacgccagcaggctagcgaagctgatgccgctgctgctacctttagagctaacgatcaccagcacataaggtacaaccctcttcaggacgaatgggttcttgtgtccgcccaccgtatgaagaggccttggcagggtcaggttgagccacaacttctcaagactgtgcccaggcatgatcctcttaatccattgtgccctggtgccatcagggctaacggtgaggtaaacccacagtatgactctacttttttgttcgacaacgacttccccgctctgcaacctgatgctccatcaccaggtccatctgaccaccctctctttcaggccaagagcgcaaggggagtttgtaaggtcatgtgcttccacccatggtcagatgtgactctgcctctgatgtctgtccccgagatcagagctgtcgttgacgcttgggccagcgtcaccgaggaactgggcgctcagtatccttgggtgcaaatttttgagaataaaggcgccatgatgggctgttcaaaccctcatcctcattgtcaagtgtgggcttctagttttctgcccgatatcgcacagcgcgaagaacgttcccaacaagcttacaagtctcaacacggtgagcctctgctcatggagtactccaggcaggaattgctgcgcaaggagcgtctcgtcttgacatccgaacactggctcgtcctggtgccattttgggctacatggccttaccagactctgttgctgcctcgccgccatgtgaggaggctccctgaactgactcccgcagagagagacgacctcgcctccatcatgaagaaactcctcaccaagtacgacaacctctttgagaccagttttccttactcaatgggttggcacggtgctcctaccggcagcgaagctggagcaaactggaaccactggcaactgcacgcccactactaccctccactgctgagatccgccactgtgaggaagtttatggtgggttatgagatgctggctcaagcccagcgtgatctcactccagagcaagccgccgagcgcctgcgcgccctgcctgaagtccactatcacctgggccagaaggaccgtgaaacagccaccattgca

SEQ ID NO: 3266 - DNA, 1137 bp, Artificial Sequence
  derived and/or modified sequence
atgtcccgatctggaactgacccgcagcaacgccaacaggcgagcgaggccgatgctgccgctgccaccttccgggcaaacgaccatcaacacatcagatacaatccgcttcaagatgagtgggtccttgtgtctgcacaccgcatgaagcggccatggcagggacaggtggagccacagctgctcaaaactgtgccccggcatgatccgctgaacccactttgcccgggtgctattcgcgcaaatggagaggtgaacccgcaatacgattcaaccttcctgtttgacaacgatttccctgcactgcagccggacgctccgtcaccgggcccttccgatcatccactctttcaggctaaaagcgccaggggcgtgtgtaaggtcatgtgcttccacccatggtcggacgtgaccctgcccctgatgtcggtcccggaaatcagggctgtggtggacgcgtgggcgtcggtgaccgaagagctgggtgcccagtatccatgggtgcagatcttcgaaaacaaaggggccatgatgggctgctcgaacccgcatcctcactgccaggtgtgggccagctcgtttctgccggacattgctcaacgggaggaaaggtcccagcaagcatacaagtcacagcacggggagccgctgctcatggagtactcccggcaggaactgctgcgcaaagaaagactggtcctgacctcggaacattggctggtgctcgttccgttctgggctacgtggccgtaccagaccctgctgctgcctcgcagacatgtccgccggttgcctgagctgactccagccgagagggacgacttggcctcgatcatgaagaagctgctgacgaagtacgacaacctgttcgaaacttcattcccatacagcatgggatggcacggtgccccgactggatctgaggcgggagcaaactggaaccattggcagctccacgcgcactactatccgccacttctgcggtcggcaactgtgcggaagtttatggtgggatatgaaatgttggcgcaagcccagcgggacctcactccagaacaggcagcagaacgcctcagggcgctgccggaagtgcactaccacctcggacagaaagatagggagactgccactatagct

SEQ ID NO: 3267 - DNA, 1137 bp, Artificial Sequence
  derived and/or modified sequence
atgtcacgtagtgggaccgacccccagcaaaggcagcaagccagtgaggccgacgccgccgccgcaaccttccgtgcgaatgaccaccagcatatcagatacaatccactccaggacgaatgggtattggtctcagctcaccgcatgaaacggccttggcagggccaggtggagccccagctattgaaaacagtcccacgccatgatcccttaaaccctctttgcccgggcgctatcagagctaacggtgaagtcaacccccagtacgattcaacttttttatttgacaatgatttcccggctctccaaccagacgccccctctcccggccccagtgaccacccactcttccaggccaaaagtgcgcgaggggtctgcaaagttatgtgctttcacccatggtcagacgtgaccttgcccctgatgtctgtgccagagattagagccgtggtagacgcgtgggctagtgttacggaagaactgggcgcccagtacccctgggtgcagatatttgaaaataaaggggctatgatgggatgttctaatcctcatcctcactgccaggtgtgggctagtagcttcctccccgacattgctcagagggaggaacggagtcaacaggcctacaaatcccagcatggggagccacttctcatggaatactcgcggcaggaactgctaagaaaagagagacttgtgctgacaagtgagcattggctggttttggtccctttttgggctacctggccataccagaccctcctcctcccccggcggcatgtgaggcggctgcccgaacttactccagctgaacgagacgacctggcttctatcatgaaaaagctgctgaccaaatacgataacctgttcgagacctcctttccatactccatgggttggcatggagctcctactggtagcgaagccggcgccaactggaatcactggcagctacatgcccactattatcctcctctgctccgaagtgccaccgtgagaaaattcatggtcggatatgaaatgcttgcgcaggcacagagagacttgacacccgagcaggccgctgagcgactgagggccctgcccgaggtccattatcatcttggccaaaaagaccgggagaccgccactatcgcc

SEQ ID NO: 3268 - DNA, 1137 bp, Artificial Sequence
  derived and/or modified sequence
atgtctaggtctggtacagacccgcagcagcgccagcaggcctccgaagccgatgccgccgcggccacttttcgcgcaaatgaccatcaacacattcggtacaatcctctccaggatgagtgggtgctcgtgtccgctcatcgtatgaaaagaccttggcagggccaggttgagcctcagctcctgaaaaccgtgcctcggcatgatcccctgaaccccctatgccccggagccatcagggccaacggagaagtcaacccgcagtatgacagcacgttcctgttcgacaacgacttccccgctctgcagcctgacgcaccctcacccggaccaagcgaccacccattattccaagccaaaagtgcacggggagtgtgcaaggtgatgtgttttcatccctggagtgacgtgaccctgcctctcatgtcagtacctgagatacgggccgtagtagacgcttgggccagcgtgacggaggagctgggcgcccagtacccatgggtgcagatctttgagaacaagggggcaatgatggggtgtagcaatccccacccccactgtcaggtttgggcaagctcgtttctccccgacatcgcccagagggaggagcgctctcagcaggcctataagagccaacatggcgaacctctgctgatggaatatagccgccaggagctgctccggaaagagcgtcttgtcttgacctcagaacattggttggtgttggttccgttctgggctacatggccctaccaaacactattgctgcctcgacgacatgttcggcggttgcccgaactcacccccgctgaaagagacgacctcgcttctataatgaagaaactcctgacgaaatatgataacctgttcgagacaagtttcccttactcaatgggctggcacggggcccctacgggctctgaggctggagccaattggaaccactggcagctgcacgcccattattaccctcctctgctgagatccgccacagtacggaagtttatggtgggttatgagatgttggctcaggcccagcgggacctaacaccggagcaagcggctgaaagattgagagccttacctgaggtgcattatcatctgggacagaaggatcgagaaactgctacaatcgcc

SEQ ID NO: 3269 - DNA, 1137 bp, Artificial Sequence
  derived and/or modified sequence
atgtcacgctcgggaactgatcctcaacaaagacagcaagcatccgaagccgatgcagcagcagctaccttccgcgcgaacgatcaccagcatattcgatacaaccctctgcaggacgaatgggtgcttgtgtcagcgcatcgcatgaagcgcccttggcagggccaagtggagccccagcttctgaaaactgtgcctagacatgatcccctgaatcctttgtgtcccggcgcgattcgagcgaacggggaagtgaatccacaatacgattcgacttttctttttgacaacgattttcctgcactgcaaccagatgcaccgtcccccggtccctcggatcaccctcttttccaggccaagtcggcacggggagtgtgtaaagtgatgtgtttccatccttggtcagatgttactctccctctcatgtcagttccagaaattcgcgcagtcgtcgatgcatgggcctcagtgactgaggagctgggagcacagtacccatgggttcaaatcttcgaaaacaagggggccatgatgggttgctccaacccacatcctcattgccaggtctgggcatcgtcctttcttcccgacatcgcgcagcgcgaagagagatcacagcaagcatacaagtctcagcatggtgagcctcttctgatggaatattcgaggcaggaacttctgagaaaagagagacttgtccttacttccgaacattggcttgtcttggtgcccttctgggcaacctggccttaccaaaccttgcttcttcccaggagacatgtgcgtaggctcccggaacttacccctgccgagcgagatgatctggccagtattatgaagaaactgcttaccaaatacgataatctgtttgaaaccagctttccttacagcatgggttggcatggggcgccgaccggttccgaagcgggcgctaactggaaccactggcagctgcacgcgcactactaccccccactgctgcggtccgcaaccgttcgtaagtttatggttgggtacgagatgttggcccaggcccaaagggacctcacgccagagcaggctgcagaacgtttgcgcgcactcccggaagtccactaccacctgggtcaaaaagaccgggaaacggcgactatcgca

SEQ ID NO: 3270 - DNA, 1137 bp, Artificial Sequence
  derived and/or modified sequence
atgtcgcgttcgggtacggatccgcaacaacgacaacaagcgtcggaagcggatgcggcggcggcgacgtttcgtgcgaatgatcatcaacatatacgttataatccgttacaagatgaatgggtattagtatcggcgcatcgtatgaaacgaccgtggcaaggtcaagtagaaccgcaattattaaaaacggtaccgcgacatgatccgttaaatccgttatgtccgggtgcgatacgtgcgaatggtgaagtaaatccgcaatatgattcgacgtttttatttgataatgattttccggcgttacaaccggatgcgccgtcgccgggtccgtcggatcatccgctatttcaagcgaaatcggcgcgtggtgtatgtaaagttatgtgttttcatccgtggtcggatgtaacgttaccgctaatgtcggtaccggaaatacgtgcggtagtagatgcgtgggcgtcggtaacggaagaattaggtgcgcaatatccgtgggttcaaatatttgaaaataaaggtgcgatgatgggttgttcgaatccgcatccgcattgtcaagtatgggcgtcgtcgtttttaccggatatagcgcaacgtgaagaacgttcgcaacaagcgtataaatcgcaacatggtgaaccgctattaatggaatattcgcgtcaagaattattacgtaaagaacgattagtactaacgtcggaacattggctagttttagttccgttttgggcgacgtggccgtatcaaacgttactactaccgcgacgtcatgtacgtcgtctaccggaattaacgccggcggaacgtgatgatttagcgtcgataatgaaaaaattactaacgaaatatgataatctatttgaaacgtcgtttccgtattcgatgggttggcatggtgcgccgacgggttcggaagcgggtgcgaattggaatcattggcaactacatgcgcattattatccgccgctattacgatcggcgacggtacgaaaatttatggttggttatgaaatgctagcgcaagcgcaacgagatttaacgccggaacaagcggcggaacgtctacgtgcgctaccggaagttcattatcatttaggtcaaaaagatcgtgaaacggcgacgatagcg

SEQ ID NO: 3271 - DNA, 1137 bp, Artificial Sequence
  derived and/or modified sequence
atgagccgcagcggtaccgatccgcaacaacgccagcaagcgtcggaagcggatgctgccgccgcaacttttcgcgcgaacgatcaccagcatatccgctacaatccgctgcaggacgaatgggtccttgtgtccgcccaccgcatgaagcggccatggcagggacaggtggagccgcaactgctgaaaactgtgcctagacatgacccactcaacccactgtgtccaggagccatcagggcgaacggagaggtgaacccgcagtacgactcaactttcctctttgacaatgacttcccagcactgcagccggacgcccccagcccgggtccgtctgaccatccgcttttccaggccaagtccgcgaggggagtctgcaaagtgatgtgcttccatccttggagcgacgtcactctgcctctcatgtccgtccccgaaatccgggctgtcgtcgacgcgtgggcatcggtgactgaagaattgggagcgcaatacccgtgggtccagatcttcgaaaacaagggtgccatgatgggatgttccaacccccatccacactgccaagtgtgggcatcgagctttctccctgacatcgcccagagagaggagaggtcccagcaggcgtacaagtcccaacacggcgaacctttgctgatggaatattcccgccaggaactgctccgcaaggaacgcctcgtgctgacgtccgaacattggctggtcctggtgccgttctgggccacttggccgtaccaaaccctgctgctcccacgccgacacgtgcggcggctgccagaactcacccctgccgagcgggacgaccttgccagcatcatgaagaagttgctgaccaaatacgataacctgtttgaaacctcctttccatactcgatgggctggcatggcgccccaactggatctgaggcgggtgccaactggaatcactggcagctccacgcccactactatccgccactcctgagatcggcaaccgtgaggaaattcatggtggggtacgaaatgcttgcccaggcacagcgggacctgaccccagaacaggcggccgagcggctgagggcgcttcccgaggtgcactaccacttgggccagaaagacagagaaactgcgactatcgcc

SEQ ID NO: 3272 - DNA, 1137 bp, Artificial Sequence
  derived and/or modified sequence
atgtcgaggagtggtaccgatcctcagcagcggcaacaggcttcagaagcagacgccgcagcggcaacgtttcgggccaacgaccaccagcatattaggtataatccccttcaggatgaatgggtcctagtaagtgcacatcgcatgaagaggccgtggcagggccaggttgaacctcagctacttaaaaccgttccccggcatgatccgctcaatcctctctgcccgggcgccatacgcgccaatggcgaggtgaacccacagtacgacagcacgtttctcttcgataatgacttccctgctctgcaaccagatgctccttcccccggaccctctgatcaccccttgttccaagcaaaatcggctcgaggagtatgcaaagtgatgtgttttcatccttggtccgatgtgacgctacctctgatgagcgtcccagagataagagccgtagtggacgcttgggcgtccgtaactgaggagctgggtgcgcaatacccctgggtccagatttttgaaaacaagggagccatgatgggttgtagcaatcctcatccccattgtcaagtttgggcttcctcttttctgccagacattgcccaacgagaagagagatcccagcaggcatataagagtcagcatggggaacctctactgatggagtatagtcgccaagagctcctcaggaaagaacgcctggtgcttacgtcggagcattggctggttcttgtcccattctgggcaacgtggccttaccagaccctgctgctcccgcgccggcatgtgaggcggctgcccgaattgacgcctgcggaacgagacgacctggcaagtataatgaagaagctccttactaagtacgataatctgtttgaaacatccttcccctacagcatgggttggcacggcgcacccactggctctgaagcaggagctaactggaaccactggcagctacatgcacactactacccacctctgctcagaagtgctacggttcggaaatttatggtgggctacgaaatgctagctcaagcccaaagggatttgacgcctgagcaggcagcagagcgcttacgggcactgccagaggtacactaccacttggggcagaaggatcgagagacagccaccatcgcc

SEQ ID NO: 3273 - DNA, 1137 bp, Artificial Sequence
  derived and/or modified sequence
atgtcacgcagcggaaccgacccccagcaaaggcagcaggcttccgaagctgacgcagctgcagcaacattccgggcaaacgatcatcaacatataagatacaacccgttgcaggacgagtgggtgctagtctccgcccacagaatgaaacgaccatggcaaggtcaggtcgaaccccagctactcaaaaccgtacccagacatgatcccctgaacccactgtgtcccggagctattcgggccaatggggaagtcaatccacagtatgattctacatttctgttcgataacgacttccctgccctgcagcccgacgcaccaagccccggcccttccgaccaccccttgttccaagctaagtctgctagaggcgtctgcaaagtcatgtgcttccatccctggtcagatgtgaccctgccactaatgtcagttccagagatcagagccgtggtagatgcttgggcctccgtgaccgaggagctaggcgcccagtatccttgggtacagatcttcgagaataagggcgcaatgatggggtgctctaatccacatccacactgccaagtctgggccagttccttcctgcccgacatcgcccagcgggaggagaggtcacagcaagcctataagtcacaacatggcgaacccctgttgatggaatatagccgacaggaactcctccgaaaggaacggcttgttctcaccagcgagcactggctcgttctagtccctttctgggctacctggccctaccagacccttttgctgcccagaaggcacgtgcgaaggctgcccgagctgaccccagccgaaagggatgatctggcctctatcatgaagaaacttctaacgaaatacgataacctattcgaaacgtcttttccttactctatgggctggcatggagctcctacgggaagcgaggcgggcgctaattggaatcactggcagctgcatgctcattattacccccctttgttacgatcagctacagtgagaaagtttatggtcggatacgaaatgttggcacaggcccagcgggatttaacaccagagcaagcagccgagcgtttgcgcgcgttgccagaagtgcactaccatttggggcagaaggatagggaaactgctaccattgcc

SEQ ID NO: 3274 - DNA, 1137 bp, Artificial Sequence
  derived and/or modified sequence
atgtcgcgatctggaaccgaccctcaacaaaggcagcaggcatcggaagccgatgcagcagcagcaaccttcagggccaatgaccaccaacatattcgctacaatcctctgcaggatgaatgggtgcttgtgtcagcacatcgtatgaagaggccttggcagggtcaggtggaaccccagttgcttaagaccgtccctcgccacgatcccctgaacccactctgtccaggagcaattagagcaaatggcgaggtcaatccacaatacgacagcacgtttctgttcgataacgatttcccggccctgcaaccggacgcaccatcgcctggtcccagcgatcaccccttgtttcaagccaaatcggcccgtggagtgtgtaaggtgatgtgttttcatccctggtcggacgtcaccctgccgctcatgtccgtgcctgaaatccgggcggtggtggacgcatgggcatcggtcaccgaggaactcggggcacaatacccttgggtccagattttcgaaaacaagggagcgatgatgggttgttcgaaccctcatccccattgtcaagtgtgggcatcgtcctttctgcctgacatagcacaaagagaggagcgatcccagcaggcatataagtcacaacatggagagcctctcctgatggaatactcccgccaggagttgctgcggaaggagaggctggtccttacgagcgagcattggcttgtcctcgtcccattttgggcgacctggccttaccaaaccctcctcctccctcgccggcatgtccgtagactgccagaattgactccagcggaacgagacgatctcgcatccattatgaagaagctccttaccaaatacgataacctcttcgagacttcgtttccttacagcatgggatggcatggagcaccaactggcagcgaggcaggcgcgaactggaaccattggcagctgcatgcccactattaccctcctcttttgcggtcagcgactgtgagaaagtttatggtcggctacgagatgctggcacaagcccagcgcgatctcaccccagagcaagcggcagaaagattgcgggcactgccggaagtgcactaccacctgggacaaaaggaccgcgagactgcaaccattgca

SEQ ID NO: 3275 - DNA, 1137 bp, Artificial Sequence
  derived and/or modified sequence
atgtccaggtcggggacagatccacaacaacgccagcaagcatcagaggcagatgcggcagccgccacattccgggcaaacgaccatcagcatattcgttataatcctttgcaggacgagtgggtactcgtttcagcccaccgcatgaaacgaccgtggcaaggacaagttgaacctcaattgctcaaaactgtcccgagacacgatcccttgaaccccctatgccccggtgcgattcgtgcgaacggcgaggtgaaccctcagtatgactctacatttttatttgataacgactttccagccttgcaacctgacgctccgagcccgggtccctccgaccatccactttttcaggcgaagtccgcccgcggggtctgtaaggttatgtgttttcatccgtggtctgacgtgaccttgcccctcatgagtgtaccagagatccgggcggtagttgatgcatgggcaagtgttacagaagagttgggggctcagtacccctgggttcagatttttgaaaacaaaggagccatgatggggtgcagtaacccacacccacactgtcaagtttgggcctcgtccttccttccagacatcgctcagcgagaggagagaagccagcaagcctataaatctcaacatggtgagccactactcatggagtactccaggcaggaattactgcgaaaagagagactggtcttaacaagcgagcattggctcgttctcgttccattctgggctacgtggccataccagacgctactgctcccgcgacgacatgtcagaaggcttccagaacttacccctgcagagagggacgatctggctagtataatgaaaaagctgttgactaagtacgataacctttttgagacgagcttcccctacagcatgggatggcacggcgcaccgaccggcagtgaagctggcgcgaattggaaccattggcaacttcatgctcattactaccctccgttgctccgaagcgctacagtccgcaagttcatggtcggatatgaaatgctggcgcaggcacagcgggaccttacccccgaacaggctgcggaacgacttcgggccttgccagaggtgcattatcacctggggcaaaaggatagagagactgcaaccattgcg

SEQ ID NO: 3276 - DNA, 1137 bp, Artificial Sequence
  derived and/or modified sequence
atgtccagatcggggaccgatcctcagcagcgccaacaggcttcggaggctgatgctgctgcagctacctttcgggcaaatgatcatcaacacattcgctacaatccgctgcaagatgaatgggtgcttgtgtccgcccatcgcatgaagaggccgtggcagggacaggtggaaccccaactgctcaagaccgtccctcggcacgacccgctcaaccctctctgcccgggggcaatccgggccaacggcgaggtgaaccctcaatacgacagcacctttctcttcgacaatgatttccctgccttgcagcctgacgctccttcgccgggcccgtccgatcacccactgtttcaagctaagtccgcgcggggcgtctgcaaggtgatgtgcttccacccctggtcggatgtcaccctgccactgatgagcgtcccggaaatcagagctgttgtggacgcttgggcatctgtgaccgaagagctgggcgcgcaatacccatgggtccagatcttcgaaaacaaaggtgccatgatgggatgttccaacccccatccgcattgtcaggtgtgggcttcctcatttctgccggacattgctcaaagggaggagagatcacagcaggcttacaagtcgcagcatggagagccccttctcatggaatactcccgccaggaactcttgcggaaggagcgcctcgtcctgacctcggaacactggttggtgctggtgccgttctgggcgacgtggccgtaccagactcttctgctcccacgccgacacgtccgtaggctgccggaattgactccggcagagagagacgatctcgcttcaatcatgaagaagctcctcaccaaatacgacaatctgttcgaaacctcattcccgtattcaatgggatggcatggcgccccaaccgggtctgaggccggagctaactggaatcactggcaactccacgcccactattacccaccgctccttagatccgcgaccgtgcgcaagttcatggtggggtacgagatgctcgcacaagcacagcgcgacctgacgccagaacaggccgcggaacgactgcgggcgctgccggaagtgcattaccatctgggccaaaaagaccgggaaaccgccactatagcc

SEQ ID NO: 3277 - DNA, 1137 bp, Artificial Sequence
  derived and/or modified sequence
atgagcagatcaggaactgatccgcaacaacgccagcaggcatcggaggctgatgctgcggctgcaaccttccgcgctaacgaccaccagcatatcagatataacccgttgcaggacgaatgggtgttggtatcggcccatcggatgaagcggccgtggcaaggccaggtggaaccgcaactgctgaaaacggttccacgccatgatcctctgaatccactgtgtccaggcgcgatcagggcaaatggagaggtgaacccgcagtacgactccacgtttctgttcgataatgatttcccagccctccaaccagacgctccgtcacctggccccagcgaccatcctctctttcaggcaaaatccgcgaggggcgtgtgcaaagtcatgtgcttccacccgtggagcgacgtgactctcccgctgatgagcgttccagaaatccgcgccgtggtcgacgcatgggcttccgtgactgaggaactcggagcccagtacccttgggtgcagatattcgagaacaagggagccatgatgggttgttcaaatccgcacccgcattgccaggtctgggcatcgtcgtttctcccggatatcgcgcagcgggaagagcggagccagcaggcctacaaatcccaacatggcgaacccctcctgatggagtacagcagacaggaactgctgcgcaaagagcgtctcgtcctgacgtcggagcactggctggtccttgttcccttctgggcaacctggccgtatcagacgttgctgctgccacgcaggcacgtgagacgcctcccagagcttacccctgccgagcgggatgacttggcatccatcatgaagaagctgctgactaaatacgacaatttgttcgaaacttcattcccttattcgatgggatggcacggtgccccgactgggagcgaagcaggagctaactggaaccattggcaactgcatgcccattactacccgcctcttctgcggagcgcgactgtgcgaaagttcatggtcggatacgagatgttggcccaagctcaacgggatctgaccccagaacaggccgcggaaagactgcgggctctgcctgaggtgcactaccatctcggccagaaggaccgcgaaaccgcgaccatcgct

SEQ ID NO: 3278 - DNA, 1137 bp, Artificial Sequence
  derived and/or modified sequence
atgtctaggtcaggaaccgacccacagcaacgacagcaggcatcagaagcagacgcagctgcagcaacctttagggcgaatgatcaccagcacatcaggtacaatcctcttcaagatgaatgggtgctcgtgtcagcacatcgcatgaaaagaccgtggcaaggccaggtggagccacagcttctgaaaaccgtgcctcgccatgatccgctgaacccactttgcccgggagctattcgcgctaacggagaagtcaacccacagtacgatagcacttttctgtttgacaacgactttccagcactccaacccgacgcaccctctccagggccttccgatcatcctctgttccaggcaaaaagcgcaaggggagtctgtaaagtcatgtgttttcatccttggagcgatgtgaccctgcccctcatgtccgtccctgaaattcgagccgtggtcgatgcctgggcaagtgtgactgaagagcttggagcacagtacccgtgggtccagatcttcgagaacaagggtgcgatgatgggatgttcgaaccctcatccgcattgtcaggtgtgggcctcgtcatttctgcccgacattgcacagcgtgaagaaagatcgcagcaagcatataagtcgcagcatggggaaccattgcttatggagtattccaggcaagaacttttgcggaaggaacgcttggtacttacctctgagcattggctggtcctcgtccccttctgggctacttggccataccaaactcttctgctgcctcggagacacgtgaggagactgcccgaacttactccagcagagcgggatgacctggcatcgattatgaagaagctgttgaccaagtacgataatctgttcgaaacttcgtttccttattccatgggatggcacggtgcacctactggttccgaagcgggggccaattggaatcattggcaactccatgcacattactaccctccactcctgagatcggccactgtgcgaaagtttatggtcggatacgaaatgctcgcacaagcgcagcgcgatctcacccctgagcaggcagccgagcggctcagggctcttcccgaagtgcattaccatttgggccaaaaggaccgcgaaaccgccaccatagcc

SEQ ID NO: 3279 - DNA, 1137 bp, Artificial Sequence
  derived and/or modified sequence
atgagtcggagcggaacagatccgcaacagaggcagcaagcctctgaagctgatgccgcggccgcaacattccgcgccaacgatcaccaacatatccgctataatcccctgcaggacgagtgggtgttggtgtccgctcaccggatgaaaaggccctggcaggggcaggtcgaaccccagctgctgaagaccgtccctcggcatgaccccctgaatcccctttgcccaggtgccatccgtgccaatggggaggtcaatcctcagtatgatagcacttttctgttcgataatgatttcccagcattacagccagatgctccatcgccaggcccatctgatcatccactgttccaggctaagagtgcaaggggtgtctgcaaagtgatgtgtttccatccttggtcggacgtgacgctgccgctaatgtctgtacccgagatcagggctgtagtcgacgcttgggcctctgtgacagaagagcttggcgctcagtatccttgggtgcaaatttttgagaataagggagcaatgatgggttgcagtaacccccatcctcactgtcaggtttgggcctcaagctttctgccagacattgcacagagggaagagagatctcagcaggcctacaaaagccagcacggagaacccctcttaatggaatattcacgccaggaattgctccgcaaagaaagattagtccttacttctgagcactggttagttctggtccccttctgggccacctggccttaccaaactttgttattgcccaggagacatgtcagacggctgccagagttaacccccgccgaaagggatgatctggcttctattatgaaaaaactgctgaccaaatacgacaacctgtttgaaacatctttcccttatagtatgggttggcacggcgctccaaccgggagcgaagcgggggccaactggaaccattggcagcttcatgcacactattacccccctctcctccgaagcgccacagtgagaaagtttatggttggatatgaaatgcttgctcaagcgcaaagggacttaacgcctgaacaggcagcggagagactacgggcacttccggaggttcactatcacctaggccagaaagatagagaaacagctaccatagcc

SEQ ID NO: 3280 - DNA, 1137 bp, Artificial Sequence
  derived and/or modified sequence
atgtccagatccggtaccgaccctcagcaaagacaacaagcctccgaagcagacgctgcggccgcaacgtttagggcaaacgaccatcagcacatccggtacaacccactgcaagacgagtgggttctcgtcagcgcacacagaatgaaacgaccttggcaaggtcaggtcgagccccagctcctcaagactgtccctcgacatgaccctcttaacccactgtgccccggtgcaattagagcaaacggtgaggtgaatccacaatacgattcgacgtttctctttgataatgactttccagcacttcaacccgatgcaccctctcctgggcctagcgatcatcctttgttccaggcgaagtcagcgcgtggcgtgtgcaaagtgatgtgttttcacccctggtcggatgtgaccctgccactcatgtccgtgccggaaatcagagcagtcgtggacgcgtgggcttcggttaccgaagaacttggggcacaatacccttgggtacagattttcgagaataagggggccatgatgggatgtagcaaccctcatcctcattgtcaggtgtgggcatcgtcatttcttccggacatagcacagcgcgaggaaagatcccagcaggcatacaagtcgcaacatggtgagccactgctgatggaatactcgcgccaagaactgcttcggaaggaacgtcttgtgctgacgtcggaacactggctggtccttgtgccgttttgggctacttggccttaccaaacgctgcttctccctcgtcgccacgtgcgaaggctgccagaactgacgcctgccgaaagggatgatctcgcaagcattatgaagaagctgcttacgaagtatgataacctctttgaaacctcgtttccatactcgatgggatggcatggggcaccgactggatccgaagccggcgcaaattggaaccactggcaactgcatgcacactactaccctcccctcctccgtagcgccactgtgcgtaagtttatggtcggatacgaaatgctggcacaggcacaacgtgatttgactccagagcaggcggcagaaaggcttagagcattgccagaggtgcattaccatctgggacagaaagatcgggaaacggctaccattgct

SEQ ID NO: 3281 - DNA, 1137 bp, Artificial Sequence
  derived and/or modified sequence
atgtcgaggtcgggaactgatccccaacaacgccaacaggcatcagaggcggatgcagccgcggcaacttttagggcaaatgatcaccagcatatccggtacaacccactccaagatgagtgggtgcttgtctccgcgcatcgcatgaaaagaccttggcagggacaagtggaaccgcagctgttgaaaaccgtgcctaggcatgatcctttgaaccccctttgtccaggcgccatccgcgcaaacggtgaagtcaatcctcaatacgattcgacgtttctgtttgacaatgattttcccgcactccaaccagacgccccatcgcctgggccctcggatcatcctctgtttcaagcaaaaagcgcaagaggcgtgtgcaaggtgatgtgttttcatccgtggtccgatgtcaccctgcctctcatgagcgtccctgaaattagagcagtggtggatgcctgggcctcagtgaccgaggagctcggtgcgcagtacccctgggttcagatctttgagaataaaggggccatgatggggtgctccaacccgcacccacactgtcaggtgtgggcatcgtcattcctgcctgacatagcacaacgcgaagaaagaagccaacaggcttacaagtcgcagcatggtgagcccctgctgatggaatacagccgccaagagctcctgcgcaaggaacgcctcgtgcttacttcggaacattggctggtgctcgtcccattttgggcaacttggccataccaaactctcctgctgccacggcgtcatgtgagacggttgcctgaactcactcccgcagaacgcgatgatcttgcaagcatcatgaagaaactgctgaccaagtacgataatctgtttgaaacgtcgttcccttactcaatgggctggcatggtgcacccaccggttctgaggcaggtgccaattggaaccattggcagcttcacgcccactactaccctccgctgcttagaagcgccaccgtgaggaagtttatggtcggatacgaaatgctcgcacaagcccagcgcgatcttacccctgaacaagctgcggagagactgcgtgcactcccagaagtgcactaccatcttggccaaaaggatagggaaaccgcaactatcgct

SEQ ID NO: 3282 - DNA, 1137 bp, Artificial Sequence
  derived and/or modified sequence
atgtcgcgctctgggacggaccctcagcagcggcagcaggcctcggaggcggatgccgcagcagcgaccttccgcgccaacgaccaccagcacatccgctacaaccctttgcaggatgagtgggtgctcgtctcggcccacagaatgaagcgaccatggcagggtcaagtggaaccacagctcctgaaaactgtgccgagacatgacccgctgaacccactctgtcccggagctatcagggcgaatggcgaagtgaacccgcaatacgattcgacctttctgttcgataacgacttcccggctctccagccggacgctccgtcccctggcccatcagatcatccactgttccaagctaaatcagctagaggagtgtgtaaagtgatgtgctttcatccatggtccgatgtgactctcccactgatgtctgtccctgaaatcagagctgttgttgacgcttgggcctcggtcactgaagaactcggcgcacaatacccttgggtgcaaatcttcgagaacaagggtgccatgatgggatgctcaaacccgcatccacactgccaggtgtgggcatcctcgtttctcccggatatcgcccagcgcgaggaacgcagccagcaggcttacaagtcgcagcatggcgaaccgctgctgatggaatactcaagacaggaactcttgcggaaagaacgccttgtcctcacttcggaacattggctggttctggtccctttctgggcgacctggccgtaccagaccctgcttctgccgagaaggcacgtgcggagactgcccgaactgactccagccgaacgcgacgacctcgcttcaatcatgaagaagctgcttactaagtacgacaacttgtttgagacgtcgttcccttatagcatgggctggcacggagccccgaccggatccgaagccggagctaattggaaccactggcaattgcatgcacattactatccgccgcttctgcgctcggccactgtgaggaagttcatggtcggatacgaaatgttggcacaagcccagcgcgacctcactccagagcaagcagcggaacgcctgcgggccctcccagaggtccactaccatctgggacagaaagaccgcgaaaccgcaacgatcgcg

SEQ ID NO: 3283 - DNA, 1137 bp, Artificial Sequence
  derived and/or modified sequence
atgagccgctcaggaacggacccacaacagagacaacaggcatccgaggctgacgcggcggcggcaacctttagggcgaatgaccatcaacacataaggtacaaccctctgcaggacgaatgggttctcgtgagcgcacacaggatgaaaagaccttggcaaggacaggtggaaccgcagctgctcaagaccgtgccaaggcacgaccctctgaaccctctttgcccaggagccatcagagccaacggcgaggtcaacccgcagtacgacagcacctttctgttcgacaacgatttcccagccctgcagcctgatgcaccaagcccaggcccctcggatcatccgctttttcaagcaaaatcggcgcgcggagtgtgcaaagtgatgtgcttccatccatggagcgatgtcactctcccattgatgtccgtgccggaaatcagagctgtggtggacgcctgggcctcagttactgaagagctcggagctcagtacccgtgggtgcagatcttcgagaacaagggagctatgatgggctgcagcaacccgcacccgcactgccaggtctgggcctcgtctttcctgccagacattgcccagcgggaagaacggtcccagcaggcttacaagtcgcaacacggagaacctctcttgatggaatactcccgccaggaactcctccgaaaggagcgtctggtcctgacttcggagcattggcttgtccttgtccccttctgggccacctggccataccagactttgttgctgccgcgcagacacgtgcggcgcctgccagaactgaccccggccgagagggatgatcttgcttcaatcatgaaaaagctcctgactaagtacgataaccttttcgagactagcttcccgtacagcatgggatggcatggtgcacccaccggctccgaggccggagcaaactggaatcactggcaacttcatgctcactactatccaccgctgctgcgctcggcaaccgttagaaagtttatggtcggatacgaaatgcttgcacaggctcagcgcgatctgactcccgagcaggcggctgagcgcctcagagccttgccagaagtgcattaccatctgggacagaaggatcgcgaaacggcgaccattgcc

SEQ ID NO: 3284 - DNA, 1137 bp, Artificial Sequence
  derived and/or modified sequence
atgagccgatcaggcactgatcctcagcaacgccaacaagctagcgaagccgacgcagccgcagcaactttccgggctaatgaccaccagcatataagatataaccccctgcaggacgagtgggtgttggttagtgctcaccgaatgaaacgaccctggcagggacaggtcgagccccagcttttgaaaaccgtcccgagacacgatcctctcaatcccctctgtccgggtgcgattcgcgccaacggcgaggtcaaccctcagtatgactctacctttcttttcgacaacgacttcccagcactgcagcctgacgccccgagtcccgggccttcagatcatccactattccaggcaaaaagcgcccgcggagtgtgtaaggtgatgtgctttcacccatggagcgatgtaacactgcccctgatgtcagtgccagagattcgcgcggtagtggatgcctgggcctccgttaccgaagagttgggggctcagtatccatgggttcagatcttcgagaacaaaggtgcgatgatgggatgctccaaccctcatccacactgtcaggtctgggcctcaagctttcttccagatattgcccaaagagaagagcggagtcagcaggcatataagtcacagcacggagaaccactattgatggaatatagtcgtcaggagttgctccgaaaagagaggctcgtgctcactagtgaacattggctcgttctggtcccattttgggcaacctggccgtatcagaccctgctgctaccccggcgccacgtccggaggctgccggaattgacccctgctgagcgcgatgatttagcttctattatgaaaaaactgctgactaaatacgataatttgtttgagactagttttccctactcaatgggctggcacggggcacccaccggaagcgaggcaggggcaaattggaaccattggcagctccacgcgcactattatccgccccttctgcgtagcgccacggtgaggaaattcatggtgggttatgaaatgctcgcacaggctcaacgggacttgactcccgaacaagcagccgagaggctgagggctctacccgaggtgcattaccatctgggacaaaaagatagagagacagcaactattgcc

SEQ ID NO: 3285 - DNA, 1137 bp, Artificial Sequence
  derived and/or modified sequence
atgtcacgttccggtaccgatccacaacagcgtcagcaagccagcgaggcggatgccgccgccgccacgttccgcgctaatgaccaccagcacatccggtacaaccccctgcaggacgagtgggtcctggtctctgcgcatcgcatgaagaggccgtggcaaggacaggtcgagccccaacttctcaagaccgtcccccgtcacgacccacttaacccactgtgtcccggtgcgatccgtgccaacggtgaggtcaaccctcagtacgactccacctttcttttcgataatgatttccctgcacttcagcctgatgccccctctcccggtccaagcgatcaccccctgttccaagctaagtcggctcggggcgtatgcaaggtgatgtgctttcacccctggtcggacgtcaccctgcctctcatgtccgtcccggagattcgtgccgtggtggatgcttgggcttccgtcactgaggaattgggtgctcagtacccctgggtccagatctttgagaacaaaggcgccatgatgggctgctcgaacccccacccccactgccaggtctgggcgtcgagcttcctccctgacatcgcccagcgcgaggagcgctcccagcaggcctacaagtcccagcacggggagccgttgttgatggagtactcaagacaagaattgcttcgaaaggagcgcctcgttcttactagcgagcattggctggttctggttcctttttgggctacctggccctaccagaccctcctactcccgcggcggcatgtgcgtcgactgccggaattgactcccgccgagcgcgacgacctcgctagtattatgaagaaactgcttacaaagtatgacaatctcttcgagaccagctttccttactctatggggtggcacggagccccaactggctcagaagccggcgcgaactggaatcactggcagctgcacgctcattactacccgccgctcctcagaagcgccaccgttcggaagttcatggtcgggtacgagatgctggcgcaggcccaacgcgatctgacacctgaacaggccgccgagcgtcttcgggccctgcccgaggtacactaccacctgggtcaaaaggaccgggagaccgccaccattgcg

SEQ ID NO: 3286 - DNA, 1137 bp, Artificial Sequence
  derived and/or modified sequence
atgtcgcggagcggaactgacccccagcagcgccagcaagccagcgaggccgacgcggcagctgccacgtttagagcaaacgatcaccagcatatccgctacaacccgttgcaggacgagtgggtgctggtcagcgcacaccgcatgaagcgcccatggcaagggcaagtggagcctcagctgcttaagactgtgccaagacacgatccgctcaacccactgtgtccaggagccattagggccaacggggaggtgaatccgcaatacgatagcactttcctgtttgataatgatttcccggcgctccagccagacgccccttcgccggggccatccgatcacccactgtttcaggctaagtcggcaagaggagtttgcaaggtgatgtgctttcacccatggtccgacgtgaccctgccgttgatgtccgtcccggagatcagggcggtggtggatgcctgggcaagcgtgactgaggaactgggagcccagtacccctgggtgcagatcttcgaaaacaagggcgctatgatgggttgctcaaacccccacccgcactgtcaagtgtgggcctcttccttcctccccgacattgcacaacgggaagaacggagccagcaggcatacaaatcccaacatggagagccgctgcttatggaatactcgaggcaggaactgctgagaaaggaacgcctggtgctgacttccgagcattggcttgtgctggtgccgttctgggctacttggccgtaccaaaccctcctgcttcctcggcggcacgttaggcgcctgccagaactgaccccggcggagcgcgacgatctggcctccatcatgaaaaagctgctgactaaatacgacaacctcttcgaaacctcgtttccttactcgatgggctggcatggtgccccgaccggatccgaagctggagccaactggaatcactggcagctccacgcacactactaccccccgcttctgcgtagcgctactgtgaggaaattcatggtgggctacgaaatgctggcccaagcgcagagagacttgacgccggaacaagccgcagaaagactgcgggcgctgccggaagtgcattaccacctgggacagaaggaccgggagactgctactatcgcc

SEQ ID NO: 3287 - DNA, 1137 bp, Artificial Sequence
  derived and/or modified sequence
atgtctcgatccggtactgaccctcaacaacgccagcaggcatccgaagctgatgcagcggctgcaacttttagagcgaacgatcatcaacacatcagatacaatcctcttcaggacgagtgggtgctcgtcagcgcgcaccgcatgaagaggccgtggcaaggccaggtggaaccccaactgctgaaaacggttcctaggcatgatcccttgaatcctctctgcccaggagcaattcgggcaaacggggaagtgaacccccaatatgactcaacgtttctcttcgacaatgacttccctgcactgcaacctgacgcgccttcaccaggtccatcagatcatcctcttttccaagctaagtcggcaaggggggtctgcaaagtcatgtgttttcatccttggtcggacgtcactcttcctttgatgtcagtcccggaaataagagcggtggtggacgcatgggcatcagtcaccgaagagctcggcgcgcagtacccttgggtgcagattttcgagaacaagggagcgatgatgggttgttcgaacccacatccgcactgccaagtgtgggcctcgtcattcctccctgacatagcacaacgggaagaacgaagccaacaggcatacaagtcgcaacacggagagcctctgcttatggagtactcgagacaggaactgttgagaaaggaacggcttgtgttgacttccgagcattggcttgtgctcgtgcctttctgggccacttggccataccagacccttctgcttccgcggcgtcatgtgcgtagactcccagagctgaccccagcagaacgtgatgaccttgcttcgattatgaaaaaacttctcactaaatacgataacttgtttgaaacctcgtttccctacagcatgggatggcatggagcaccgaccggaagcgaagcaggggcaaactggaatcactggcagctccacgcacattactaccctccattgctgcggagcgcaaccgtgcggaagttcatggtgggctacgaaatgctggcccaagcgcaaagggaccttaccccggagcaagccgctgagcgattgagagcactgccagaagtgcactatcatcttggtcaaaaagatagagaaactgcaacgattgca

SEQ ID NO: 3288 - DNA, 1137 bp, Artificial Sequence
  derived and/or modified sequence
atgagccgttcaggaactgatccacaacaaagacaacaagctagtgaagctgatgctgcagctgcaacttttcgtgctaatgaccatcaacatattcgttataatccattacaagatgaatgggttttagtttctgcacacagaatgaaaagaccatggcaaggacaagttgaaccacaattacttaagacagttcctagacatgatccattaaatcctttatgtcctggagcaattagagccaatggagaagttaatcctcagtatgactcaacatttctttttgataatgattttccagcattacaaccagacgctccttcccctggaccatcagatcatcctttatttcaggctaaatctgcacgaggtgtttgtaaagttatgtgttttcacccatggtcagacgttactcttccattgatgtctgtaccagaaataagagcagtcgttgatgcttgggcaagtgttacagaagaacttggagcacaatatccatgggttcaaatatttgaaaataaaggtgcaatgatgggatgttcaaatcctcatcctcattgccaagtttgggcatctagtttccttccagatattgcacaaagggaagagagatcacaacaagcatataaatctcaacatggagaaccattattaatggaatattcaagacaagaattattaagaaaagaaagacttgttctaacatcagaacattggttagtcttagttccattttgggcaacatggccatatcaaacattacttcttccaagacgacatgttagaagacttccagaattaacaccagcagaaagagatgatttagcttctattatgaaaaaattattaaccaaatatgataatttatttgaaacatcatttccatacagtatgggttggcatggtgctccaacaggatcagaagctggtgccaattggaatcactggcagttacatgctcattactatccaccattgttaagatcagcaacagttcgtaaatttatggttggatatgaaatgttggctcaagctcaaagagaccttacaccagaacaggctgcagaaagattaagagcacttccagaagtacattaccatttaggtcaaaaggatagagaaacagctacaattgct

SEQ ID NO: 3289 - DNA, 1137 bp, Artificial Sequence
  derived and/or modified sequence
atgtctcgtagtgggaccgaccctcaacagcgtcagcaggcctctgaagcggatgccgctgctgccacatttcgtgctaacgatcaccaacacatccggtataacccccttcaagacgagtgggtcttagtgtccgcccatcgcatgaagcggccttggcaaggacaggttgagccacaactcctgaaaactgtaccacggcatgatcctctaaaccccttgtgtcccggcgctatacgcgccaacggcgaggtgaacccgcagtacgatagcacattcctgttcgacaacgactttcctgcacttcaaccggatgcaccgtcccccggcccgagcgaccatccactttttcaagctaaatccgcacgtggtgtgtgcaaagtcatgtgttttcatccgtggagcgacgtgactctcccactgatgagtgtccctgagatacgcgctgtggttgatgcttgggcatctgtgactgaagagctgggggcacagtacccttgggtgcagattttcgagaacaaaggtgccatgatgggttgcagcaacccacatcctcattgccaggtctgggcgtctagtttcctacccgacattgcccagagagaggagcgatcccagcaggcgtataagtctcaacacggcgagcccctactcatggagtattctcgtcaggagctgctgcgaaaagagagattggtgttgacttctgagcattggctggtgctcgtaccgttttgggcaacgtggccttaccagactctgctgttgcctcgtcgccatgtgagacgcctgccggaacttacaccagctgaaagagatgaccttgcatctataatgaaaaaattgttgacgaagtacgataatctgttcgagacttccttcccatatagcatgggctggcacggcgcgcctaccggttctgaggccggcgccaattggaaccactggcaacttcatgcccactattacccccccctcctacggtcggccaccgttaggaaattcatggtgggatacgagatgcttgcccaggcacagcgcgatttgacaccggagcaggctgctgagcgcctcagagcgcttccagaggtccactatcatctgggacaaaaggaccgcgaaacagcgacgatcgcg

SEQ ID NO: 3290 - DNA, 1137 bp, Artificial Sequence
  derived and/or modified sequence
atgtctagaagcggcacggacccgcagcaaaggcagcaagccagtgaggcggatgccgctgctgccacatttcgcgcgaatgaccatcagcatatccgctacaacccactgcaagatgagtgggttcttgtctcagcccacaggatgaagaggccctggcagggccaggttgagccgcagcttctcaagactgtgccccgccatgaccctctcaaccctctttgtccaggcgctatcagagctaacggtgaggtaaacccccaatacgattctactttcctgtttgacaacgacttcccagctctgcagccggatgctccctcaccgggaccctccgaccatcccctgtttcaagcgaaatctgcgaggggtgtgtgcaaggtgatgtgcttccacccatggtccgacgtcactttgccgttgatgagcgttcctgagatccgcgccgttgtggatgcatgggcctctgtgactgaggaacttggcgctcagtacccctgggtgcagatctttgaaaacaaaggtgccatgatgggttgctccaatcctcatccccattgccaggtatgggctagctcattcctccccgatatcgctcagagggaggagcgcagtcaacaagcgtacaaatcccagcatggcgagcctttgctgatggagtacagtaggcaggagctgctgagaaaggaacgcctggtcctcacttccgaacactggctggtgctggtgcccttttgggcaacttggccctaccagacactcctgttgccacgcagacacgtgcgccgcctgcctgagttgacccccgcggagcgcgatgatcttgcctccatcatgaaaaagctgcttactaaatatgataacctgttcgagacctctttcccgtactccatgggttggcatggagctccaactggcagcgaagccggtgcaaactggaaccactggcaactgcatgcacactactatcctcctctcctgagaagcgctacagtaagaaagttcatggtcggctacgaaatgctggcacaggcccagagagacctcactccagaacaggccgctgagaggctcagggcgctcccggaggtccactatcacttgggccagaaagaccgcgaaaccgccacaatcgcc

SEQ ID NO: 3291 - DNA, 1137 bp, Artificial Sequence
  derived and/or modified sequence
atgagtagaagcgggactgatccccagcaaagacaacaggcatccgaagccgatgcagccgcagcaacctttagagccaacgatcatcagcatatacgatacaatccattgcaggacgaatgggtgctggtttcggcccatcggatgaagcgcccttggcaagggcaggtggaacctcagttgctcaaaactgtacccagacatgatccccttaatcctctttgtcctggggcaatccgcgctaacggcgaggtgaaccctcaatacgactcaacctttctgttcgataatgattttcctgcactgcaacccgacgcaccgagtcctggaccgagcgaccatcctctcttccaagcgaagtccgctcgaggagtgtgcaaagtgatgtgtttccacccctggtcggatgtcaccctcccgctcatgtcagtgccagaaattagagcagtggtggatgcatgggcaagcgtgaccgaggagctgggtgcacaatacccttgggttcagatttttgaaaacaaaggtgcgatgatgggatgcagcaacccccatccgcactgtcaagtctgggcatcatcgttcctgccagatatcgcacagagggaagaaaggagtcaacaagcgtataagtcccagcacggtgaacccctgctcatggaatatagcagacaagaacttttgcgaaaggaaaggttggtcctgacgtccgagcactggcttgtgcttgtgcctttttgggcaacttggccttaccaaacccttctgctcccccgtcgccacgtgcggcgactgccggaactcacccccgcagagcgcgatgacctcgccagcattatgaagaagctgcttaccaaatacgataacctttttgagacttcgttcccatactcgatgggctggcatggagcacctaccggttccgaagcaggagcgaactggaatcattggcagctgcacgcccattactacccccctctgcttcgttcggcgacggtccgcaagtttatggtcggatacgagatgttggcccaagcacagcgggaccttaccccagagcaagcagcagaacgccttcgggctctcccagaagtccattaccaccttgggcaaaaggacagagagactgccactattgca

SEQ ID NO: 3292 - DNA, 1137 bp, Artificial Sequence
  derived and/or modified sequence
atgtctagatcgggtactgatccccagcagcgccagcaagcttccgaggctgacgctgcagctgcaaccttccgcgccaatgatcatcagcacatcaggtataaccccctccaggacgaatgggtgctcgtgtccgcccacaggatgaaacggccatggcaggggcaggttgagccgcagttgctgaaaactgtgccaagacacgaccccctcaaccctctgtgtcctggcgccattcgggctaatggtgaggtcaatccacagtatgattctacatttctcttcgataatgacttcccagcactccaacccgacgccccttctcccggcccgagcgaccatccattgttccaggccaagagtgcgcggggtgtgtgtaaagttatgtgttttcacccatggagcgatgtcaccctgccactaatgtccgtgcccgagatacgggcagtcgtagacgcatgggctagcgtgacagaggaactcggcgcccaatatccctgggtccagatttttgagaacaagggggcgatgatgggctgcagcaatccacatcctcattgccaggtgtgggcctctagctttctacccgacatcgcccagcgtgaggagcggtcacagcaggcctataaaagccagcacggagaacctctcctcatggagtattcaagacaggaactgctccgtaaggagcggctggttctgacatcagaacattggctggtcttagtacccttttgggccacttggccttatcagactctcttgctccctcgacgacacgtgaggcgcttacctgagctgacaccagcagaacgggacgacctagcatcaattatgaagaagcttttaaccaaatacgataacctcttcgaaaccagctttccctactcaatgggatggcacggggccccaactgggtccgaggctggcgccaactggaaccactggcagctgcacgcgcattactatcctccactactgcgttccgccactgtgcggaagttcatggtgggttatgagatgctggcgcaggcccaaagagaccttacccctgagcaggcagccgagcggctgagggcactgcccgaggttcattaccacctgggccaaaaagacagagagacggcaacaatcgca

SEQ ID NO: 3293 - DNA, 1137 bp, Artificial Sequence
  derived and/or modified sequence
atgtccagatcagggactgacccacaacaacgccagcaggcttcggaagctgacgctgccgccgcgaccttccgggcgaacgatcaccagcacatccgctacaatccgctgcaggacgaatgggtcctcgtctcggcgcatcggatgaaacgcccgtggcagggccaggtcgagccacaactgctcaagaccgtcccgcgccacgacccgctcaaccccttgtgtcctggcgccatcagggcaaatggagaggtgaacccacaatacgattcaactttcctgttcgacaacgatttcccagcccttcagccagacgcaccatcaccaggaccgtccgaccacccactgttccaggcaaagtcagcaagaggcgtctgtaaggtcatgtgctttcacccgtggagcgacgtcacccttccgctcatgtcggtccccgaaatccgggcagtcgtggatgcatgggcctccgtgaccgaggaactgggagcacagtacccatgggtgcagatctttgagaacaaaggagcgatgatgggatgctcgaatccgcatccgcactgccaggtgtgggctagctccttcctccctgatatcgcccagcgggaggagaggtcccagcaggcttataagtcgcaacacggggagccactcttgatggagtacagccgccaggaactgctgcggaaggagcgccttgtgctgacttcggagcattggctcgtgctggtccctttctgggcgacttggccgtatcagactctccttctgcctaggcgccacgtgagacgcctgcccgaactgaccccggcggagcgggacgatctcgctagcattatgaagaaactgctgaccaagtacgataatctctttgaaacctctttcccgtactcgatgggctggcacggagccccgactgggtctgaagccggggctaactggaatcattggcaacttcacgcccattactacccgcccttgctgcggtcggcaaccgtacggaagttcatggtgggatacgagatgctggcccaagcccagcgcgacctcacccctgagcaggccgcggagagactccgggcactcccagaggtgcactaccatctgggccagaaggaccgggaaacggccaccatcgct

SEQ ID NO: 3294 - DNA, 1137 bp, Artificial Sequence
  derived and/or modified sequence
atgtcccggtccgggacagatccacagcaacgtcagcaggcctccgaggcagacgccgccgctgccacttttcgagccaacgatcatcagcatatacgatacaatcctctgcaggatgaatgggtcctggtatcggctcaccggatgaagcgaccctggcaaggacaggttgagcctcagttgctcaaaaccgttcctagacacgaccctctcaatcctctgtgtcccggcgctataagagccaatggggaggtcaatcctcaatatgactcaacattcctgttcgacaatgactttccagccctccagcctgatgcccccagcccagggccttctgaccaccctctgtttcaagctaaatcggctaggggagtctgcaaggtgatgtgtttccatccgtggagcgacgtgacattgccgctcatgagcgtcccagaaatccgggccgtggtggatgcctgggcctcagtgacggaggaactgggggctcagtacccctgggtgcagatcttcgagaacaaaggtgccatgatgggatgttcaaacccacacccccattgccaagtgtgggcatcttcctttctgcctgacatcgcacaacgggaagaaaggtcacaacaggcatataagtctcagcatggggaaccactgttgatggaatactcccgccaggagttgttgcgtaaggagagactggtactgacaagcgagcattggttggtccttgtgcccttctgggcaacctggccctatcaaaccctgctgctgccacggagacacgtaaggaggcttccggagctcacacccgctgaaagggacgacctggccagcattatgaagaaacttctgacaaagtacgacaacctcttcgagacctccttcccgtacagcatgggctggcatggcgcccccactggtagcgaggctggcgccaattggaatcactggcaactgcacgcacattattacccccctttgcttagatcggccactgttcgaaagttcatggtgggctacgagatgctggctcaagcccagcgggatttaacaccggagcaggccgccgagagattaagggccctgcctgaagtccattatcatctcggccagaaagacagggaaaccgctaccatcgca

SEQ ID NO: 3295 - DNA, 1137 bp, Artificial Sequence
  derived and/or modified sequence
atgtcccgctcgggtaccgacccgcagcagcgccagcaagcctccgaggccgacgcagccgcagccaccttccgggccaatgaccaccaacacatccgctacaacccgctgcaggacgagtgggtcctcgtgtcggcgcatcgcatgaaaagaccgtggcaagggcaggtcgaaccgcagctccttaaaactgtgccgcggcatgaccctcttaacccattgtgtccgggagccatccgcgccaacggcgaggtgaacccgcagtacgactccaccttcctcttcgacaacgacttcccggccctccagccagatgctccgtcgccgggcccctccgatcatccgctgttccaggccaagtcagcgagaggtgtgtgcaaagtcatgtgctttcatccatggtccgatgtgactcttcctctgatgtcggtgccggaaatccgggcagtggtggatgcatgggccagcgtgactgaggagctgggtgcccagtacccgtgggtccaaatctttgagaataagggagccatgatggggtgttcaaacccccacccgcactgccaagtgtgggcctcctcgttcctcccagatatcgcccagagagaagaaagatctcagcaggcttacaagtcgcagcacggggaaccgctgctgatggaatactcaagacaagaactgctgcgcaaagaacggctcgtcctcacctcggagcactggctggtgctcgttccgttctgggcaacgtggccttaccagaccttgttgctgccgcggagacacgtgcgcagactgccggagcttaccccggcggagcgcgacgatctggcttcaatcatgaagaagctgcttaccaagtacgataacctgttcgaaacctcatttccgtacagcatggggtggcacggcgcgcccactggatctgaggccggagccaactggaaccactggcaacttcacgctcactactaccccccgctcctcaggtcggctaccgtgcggaagttcatggtgggatatgagatgctggcccaagcgcagcgcgatctcaccccagaacaggccgccgaaagactgagggctctcccggaagtgcattaccatttggggcagaaggatcgggaaaccgcgactattgca

SEQ ID NO: 3296 - DNA, 1137 bp, Artificial Sequence
  derived and/or modified sequence
atgtctcgaagcggcactgatccacagcagcgacaacaggccagtgaggccgacgcagccgctgccacttttcgagcaaacgaccaccaacacattcgctataatccactccaagacgagtgggtcctggtctctgcccaccggatgaagcgtccctggcagggccaggtggagccgcagctactaaagacggttccgcggcacgacccgctcaatccgctgtgtcccggagcaatccgagcgaatggcgaggtcaatccacagtacgattccacgtttctgtttgacaatgactttcccgcactgcaaccggatgcaccctcccccggcccatcggaccatcctctgttccaagccaagagtgcccgcggcgtgtgcaaggtcatgtgcttccatccctggagcgatgtgaccctgccgttgatgtccgtccccgagattagagcggttgtcgacgcctgggccagcgttaccgaagagctgggcgcccagtatccctgggtccagatcttcgagaacaagggcgcaatgatgggatgcagtaatccacacccacattgccaagtgtgggcaagcagctttctgcccgatattgcccagagggaagaacggtcccaacaagcttacaagtcgcagcacggagagcctctgctgatggagtactcccgacaggaactactcagaaaggagcggctggtgctaaccagtgagcattggctggttcttgtgcccttttgggcaacctggccatatcaaaccctgctgctgccacgtcgtcatgttcgtcgcttacctgaactgaccccagctgagagggatgatctcgcctcaattatgaaaaagcttctgaccaaatatgacaacctttttgagaccagttttccatattcgatgggatggcacggtgccccgacgggaagcgaggcaggcgcgaattggaatcattggcagctgcacgcccactactacccgcccctcctgcgtagcgccactgttcgtaaatttatggtgggctacgagatgcttgctcaagcccagcgcgacctgacacccgagcaggccgccgagagattacgagcccttccggaagtgcactaccacctgggccaaaaggatcgtgagacagccacaatcgct

SEQ ID NO: 3297 - DNA, 1137 bp, Artificial Sequence
  derived and/or modified sequence
atgtcaagatcaggaaccgatcctcagcaaagacaacaggcatccgaggctgatgcagcagcagccactttcagagcaaatgaccatcaacacatccgatacaatccacttcaggacgagtgggtgctcgtctcggcacaccggatgaagcggccctggcagggacaggtggaaccacagctgttgaaaacggtgcctagacatgatcctctcaacccactgtgcccgggcgcgatacgggcaaacggagaagtgaaccctcaatatgattcgacttttctgtttgataacgattttcctgccctgcagccagacgcaccctcgcctggcccaagcgatcatcccctttttcaagcgaagtcggccagaggcgtgtgtaaggtcatgtgttttcatccatggagcgacgtcaccttgccattgatgagcgtgcctgagattagagccgtggtcgatgcctgggcttccgtcaccgaagagctgggagcccaatacccctgggtgcaaatctttgaaaacaaaggagccatgatgggatgttccaacccacaccctcactgccaggtgtgggcctcatcatttctgccagatattgcacagagggaggaaagaagccaacaggcttacaaatcccaacacggagaacccctcctcatggaatacagccgccaggagctgctgcgaaaggaacgcctggtcctcacttcggagcattggctcgtcctcgtgccattttgggcaacttggccttaccaaactttgttgctcccgcggcggcatgtcaggaggctcccagaacttacccccgcggaaagggatgatcttgcttcaataatgaaaaaacttcttaccaagtacgacaacctgtttgaaactagcttcccatactcgatgggttggcacggcgctcccactggatcggaggcaggcgccaactggaatcattggcaactgcatgcacattactacccgcctttgctgcggtcggcaaccgtgcggaagtttatggtgggatacgagatgctcgcacaggcacaaagagatcttactccagagcaggccgcagaaaggctccgcgcacttccagaggttcattaccatctggggcagaaggaccgtgaaacggcgacgattgcc

SEQ ID NO: 3298 - DNA, 1137 bp, Artificial Sequence
  derived and/or modified sequence
atgtctcggtcaggcacagatcctcagcagcggcagcaggctagtgaagccgacgctgcggctgcgaccttccgggctaacgaccaccaacacatcaggtataatcccctgcaggacgagtgggtgctggtgtcagcgcaccgcatgaaaaggccatggcagggccaggtggaaccgcagctgctcaagaccgtcccacggcatgacccactgaaccccctgtgccctggcgcgattagagccaacggagaagttaacccccagtacgatagcacattccttttcgataatgactttcctgccctacaacccgatgctcctagcccaggcccgtcagaccatccgttgttccaggctaagagcgctcgcggagtgtgtaaggttatgtgtttccatccttggtccgacgtcacactacccttgatgtcagtgcccgagatcagggcagtggtcgacgcctgggctagcgtcacggaggagctgggtgcacagtatccttgggtgcaaattttcgagaataagggggctatgatgggctgttcaaaccctcatcctcactgccaagtgtgggcttctagttttctcccagatattgcgcagcgcgaggaacggtcacagcaggcttacaaatctcaacatggtgaacccctgcttatggaatactctcgccaggaacttctccgcaaggaacgactggtgcttaccagcgagcattggcttgtgttagtgcccttctgggccacctggccctatcagacgctcttgttgccacgccgccatgtcagacgcctacctgagcttacgcccgcagagcgggacgatctagcctctattatgaaaaagttgttaaccaagtacgataacctattcgagacatcctttccctatagtatgggctggcatggcgctccgacgggcagcgaggccggcgccaattggaaccactggcagctccatgctcattactatccgcctttgctgagatcagccactgtgcggaagttcatggtgggttatgagatgctcgctcaagcacagcgggatcttaccccagaacaggccgccgagcggttacgagctctgcccgaggttcactaccacctgggtcaaaaggatcgagaaaccgcgactattgct

SEQ ID NO: 3299 - DNA, 1137 bp, Artificial Sequence
  derived and/or modified sequence
atgtcgagatccggtaccgacccccagcaaagacaacaggcgtcagaagcagatgcagcagccgcaaccttcagagccaatgatcaccaacacattagatacaaccctcttcaggacgagtgggtcctggtgagcgcacatcgtatgaagcgcccttggcaaggccaggtggaaccccagctgcttaaaaccgtccctcggcatgaccctctcaacccactttgcccgggagcaattagggccaacggtgaagtgaatccacaatatgactcgactttcctttttgataatgatttcccggccctgcaacctgatgcaccatcgcctggacctagcgatcatcctctgttccaggccaaatcagcaaggggagtgtgtaaggtgatgtgttttcacccttggtcggatgtcaccctcccactcatgtccgtccccgaaattagagcagttgtggatgcatgggcatccgtcactgaagaactgggggcacagtacccttgggtgcagatttttgaaaacaaaggtgcaatgatgggatgctcaaatccccatccgcattgtcaagtgtgggcatcgtcgttccttcctgatatcgcccaacgagaggagcgttcacaacaagcgtataagagtcagcacggagagcctctgttgatggaatactcgcgccaggagttgttgagaaaggagcgcctggtgttgacttcagaacactggctggtccttgtgccgttttgggcaacctggccataccagacccttcttctgcctcgacgtcatgtgcgacgcctgcctgaacttactccggcagaaagggatgacctcgcatccataatgaagaagctgcttaccaaatacgataaccttttcgaaacctctttcccttactccatgggctggcacggggctccaactggtagcgaggcaggtgcaaattggaaccattggcagcttcacgctcactactacccaccactccttcgttcggccactgtgagaaagtttatggtgggctatgagatgcttgcccaagcacagcgggatcttacgccggaacaagctgcggagcggctgcgagcgcttccagaagtacattaccacctcgggcaaaaggatcgcgagacggcaaccatagct

SEQ ID NO: 3300 - DNA, 1137 bp, Artificial Sequence
  derived and/or modified sequence
atgtcgcgcagcgggaccgacccgcagcagaggcagcaagcgtccgaggcagatgctgcagcggccaccttcagggcgaacgatcaccagcacatccggtacaacccgctccaggatgagtgggtgctcgtctcagcacacagaatgaaacggccttggcaaggacaggtggagccgcagctgctgaaaaccgtcccgaggcacgatccgttgaatccgctctgcccgggggccatccgggcaaatggagaagtgaacccacaatacgacagcacttttctcttcgacaatgacttcccggcgttgcaaccagacgccccttcgcctggaccctcagaccatccgctgtttcaggccaaatcggctcggggagtgtgtaaggtgatgtgcttccacccctggtcggacgtgaccctgccactgatgagcgtccctgaaatccgggccgtcgtggatgcatgggcttccgtgaccgaagagctgggcgctcagtacccgtgggtgcagatcttcgagaataagggcgcgatgatgggatgctcaaaccctcatccacactgtcaggtgtgggcctccagcttcctgcctgacatcgcacaacgtgaggagcggtcgcagcaagcatacaaatcccagcacggggaacctctgctgatggagtattccagacaagaactgctgagaaaagagcgtctggtcctcactagcgaacattggcttgtcctggtcccgttctgggccacctggccgtaccaaaccctgctgctgcctcggcggcacgtgcgtcggcttcctgagctgactccagcggagcgggacgacctcgcttcaatcatgaagaagttgctgactaagtacgacaacctgtttgaaacctcattcccctactctatgggttggcacggagctccgaccggctcggaggccggagccaattggaatcactggcagctgcacgcacactactacccaccgctcctcaggtccgccactgtgcgcaagtttatggtcggatacgaaatgttggctcaggctcagcgcgatttgaccccagagcaagccgccgaacgcctccgggcactgccggaggtgcattaccatctcggccagaaagatcgagaaaccgccacgatcgcc

SEQ ID NO: 3301 - DNA, 1137 bp, Artificial Sequence
  derived and/or modified sequence
atgtcccgctcaggaacggatccgcagcaacgacaacaggccagcgaagctgacgccgcggcggctactttccgggcgaacgaccatcaacacatccggtacaacccgctgcaggatgaatgggtgctcgtgtcggcccaccgcatgaagcggccttggcaaggacaggtggaaccgcaactcttgaaaaccgtcccacgccacgacccactgaatccactctgcccgggggcgattcgtgcgaacggggaagtgaatccgcaatatgacagcactttcctcttcgacaatgatttcccggccctgcaacccgacgccccatctccgggtccgtccgatcacccactctttcaagcaaagtcagccaggggtgtgtgcaaggtgatgtgtttccacccgtggtcagacgtgacgctcccactgatgtcagtcccagagatcagagctgtcgtcgacgcgtgggcatcggtgactgaagaactgggagcccagtacccttgggtgcagatcttcgaaaacaagggtgcgatgatgggatgctccaacccacacccgcattgccaggtgtgggcctcgtcgtttctccccgacatcgcgcaaagggaggaacgatcccagcaggcgtataagtcccagcacggagaacccctgttgatggaatattcccgccaggagcttcttcggaaagagaggctcgtgttgactagcgagcactggctggtcctggtgccattttgggccacctggccgtaccagacccttttgctgccgagacgccacgtgaggcggctgccagaactgactccagcggagcgggacgatctggcgtcaattatgaaaaagctgctgactaagtacgataacctgttcgaaacctccttcccatactcgatgggatggcatggcgccccgactgggtccgaagcgggggcgaattggaatcactggcagcttcatgctcattactacccgccattgcttagaagcgctaccgtccgcaaattcatggtcggatacgaaatgctcgcacaggcccaacgcgacctgaccccagagcaagccgccgagcgcctgcgcgcactgccggaggtgcactaccacctgggacagaaggacagggaaaccgccactatcgcc

SEQ ID NO: 3302 - DNA, 1137 bp, Artificial Sequence
  derived and/or modified sequence
atgtcccgttcgggaactgacccccagcagcgacagcaggcatcagaggcagatgccgccgccgcaacttttcgtgcaaatgaccatcaacatattcgctacaacccgcttcaagatgaatgggtgcttgtcagcgcccatcgcatgaaaagaccatggcaaggccaggtggaaccacaactgctcaagacggtccccagacatgatcccctcaaccccctgtgtcctggagctatccgggctaacggtgaggtgaaccctcaatacgattccaccttcctttttgacaacgatttccctgctctgcagccggatgcaccttcacctgggccatccgatcatccgctcttccaggcaaagtcggcacgcggcgtgtgtaaggttatgtgttttcacccatggtccgatgtcaccctgccactgatgagcgtgccagaaatccgggcagtcgtcgacgcgtgggcatcggtcaccgaggaattgggtgcacaatatccttgggtgcagatttttgagaacaagggggcaatgatgggatgtagcaatccacatcctcactgtcaggtctgggcttctagcttcctcccagatattgcccaacgcgaggagcgcagccagcaagcctacaagagccagcatggcgaaccactgctgatggaatacagccgacaagagcttcttagaaaggagagacttgttctgacgagcgaacattggctggtgcttgtccccttttgggcaacgtggccataccagaccttgcttctgcctagacgccatgtgcggcggctccctgagcttactcctgcagaaagggacgacctcgcatcgatcatgaagaagctgcttactaagtatgacaatctttttgaaacctcgtttccttactcaatggggtggcatggagcacctaccggttcggaagccggtgccaattggaatcattggcagctccacgcacactactacccaccactgcttaggtccgcaaccgtcagaaagtttatggtgggatacgaaatgctggctcaggcacaaagagacttgacccctgaacaggcagcagaaagacttcgggccttgcccgaagtgcattaccacctcggacagaaagacagagaaactgccactattgca

SEQ ID NO: 3303 - DNA, 1137 bp, Artificial Sequence
  derived and/or modified sequence
atgtccaggtcgggcaccgatccacaacagcgccagcaggcatcagaagccgacgccgctgcagccactttccgcgccaatgatcaccaacacatcaggtacaatccactgcaggacgagtgggtcctggtttcagcccaccggatgaagcgcccttggcaaggccaggtcgaaccgcaactgcttaagaccgtcccgcggcatgatccgctgaacccgctctgccctggagccatccgagcaaatggagaggtgaatcctcaatacgacagcaccttccttttcgacaacgatttcccggcgctccaacctgacgctccgtcgccaggtccgtcggaccatccactctttcaggcgaagtcggcaagaggagtgtgcaaagtgatgtgttttcatccttggtccgacgtgaccctccctctcatgagcgtcccggaaatccgggccgtcgtggatgcgtgggcgtcggtcactgaggagctgggtgcccagtacccgtgggtgcagatctttgagaataagggagccatgatgggctgctccaaccctcatccgcactgtcaggtgtgggcgtccagcttcctgccggacattgcccagcgcgaagagaggtcccagcaggcatataagtcacagcacggcgaacctctgcttatggaatactcgcggcaggaacttcttaggaaggaacgcctcgtgctcaccagcgaacattggctcgtcctggttccgttctgggccacctggccttaccaaactctcctgctgccacgccggcacgtccgaagattgccggagctgactccggcagagagagacgatttggcgtcgattatgaaaaagttgctgactaaatacgacaacctctttgaaacgagctttccgtacagcatgggatggcacggggccccgaccggatcagaggcgggggccaattggaaccattggcagcttcatgcccactactacccaccgcttctgcgctcagccaccgtgcgcaagttcatggtcggctacgaaatgctggcgcaagcccagcgcgatctgaccccggagcaggctgcggaacgcttgagagcgctgccggaagtgcactatcacctcgggcagaaggatagagaaaccgcgactatcgca

SEQ ID NO: 3304 - DNA, 1137 bp, Artificial Sequence
  derived and/or modified sequence
atgtcgagaagcggaaccgatccgcagcagcgccagcaggcctcagaggctgacgcggccgccgccactttccgggcaaacgaccatcaacacatccgctacaatcccctgcaggacgagtgggttcttgtctccgcgcacagaatgaaaaggccttggcaagggcaggtggagccgcagctgttgaaaactgtgccacgccacgatcctctgaacccactttgcccgggggcaatccgggcaaatggagaagttaacccccaatatgattccactttcctgttcgacaatgattttccggctctgcagccggacgccccttcccctgggccaagtgaccaccctctgttccaggctaagagcgctcggggcgtttgcaaggtgatgtgcttccacccttggtccgacgtgactctgccgctgatgtcagtcccggagatccgcgcggtggtggatgcatgggcgtcagtgactgaggagctgggagcacaatatccgtgggtgcaaatcttcgagaataagggggcaatgatgggctgctccaacccgcacccgcactgtcaagtctgggcgagctccttcctgccagatatcgcacagcgcgaagagcgctcccagcaagcgtacaaatctcagcacggagaacccctcctgatggaatactcaaggcaggaattgctcagaaaagaacgccttgtgctgacctcagaacattggctggtgctcgtgcctttctgggccacctggccctatcagaccctcctcctgccgagacgccatgttagaaggctccctgagctcaccccagccgagcgggacgatttggcttcaataatgaagaagctgctcacgaagtacgacaatctgttcgaaacttcatttccatactcgatgggctggcacggagctccaactggctcagaagcgggggcgaactggaaccattggcaattgcacgcacattactacccaccgctgctgcggtcggccacggtccggaagttcatggtgggatacgagatgctggcccaagcgcagcgcgatcttaccccggagcaagctgccgagcggctgcgcgccctccccgaggtccactaccatctcgggcagaaggacagagaaactgcgactattgcc

SEQ ID NO: 3305 - DNA, 1137 bp, Artificial Sequence
  derived and/or modified sequence
atgtctaggtccggaaccgacccccagcagcgacaacaagctagcgaggctgatgctgctgccgcaacttttcgagccaacgatcaccaacacattcgatacaacccactgcaggatgagtgggtgctggtttccgcacatcgcatgaagcgtccttggcaaggacaagttgagccacagttattgaaaaccgtacccagacacgaccctctgaaccccctctgccccggtgcgatcagagcaaacggggaagtgaatccgcagtatgacagcacctttctcttcgacaatgatttccccgcactgcagccagacgccccctcacctggaccgtccgatcacccactgtttcaagcaaaaagcgcccgaggggtgtgcaaagtaatgtgtttccacccgtggtcagatgtcaccctccccctaatgtctgttcctgagataagagctgtcgtggacgcctgggcatctgtcaccgaagaactcggtgcccagtatccctgggtgcagatttttgagaacaaaggggcgatgatggggtgcagtaacccacatcctcattgccaggtttgggcctcgtccttcctgcctgacatcgcccaacgggaagaaaggtctcagcaggcatacaaatctcagcacggggagccactgctcatggaatactcgaggcaggaactgctaagaaaggagaggctcgtccttacttccgagcactggctggtactggttccattttgggccacctggccataccaaaccctactattacctcgaagacatgttcgaagactgccagaactgacacccgcggagcgggacgatttagcttctattatgaagaaactactgaccaagtacgataacctgttcgagacaagtttcccctactccatgggttggcatggagctccaactggctccgaagcgggcgccaactggaaccattggcagttacacgctcactattaccctccgctgctcaggtcagctactgtgcgaaagtttatggtgggatacgaaatgctggctcaggctcagcgagatttgactcctgaacaggctgccgagcgactccgtgcgctgcctgaagtacactatcatctggggcagaaggacagggagaccgcgaccattgca

SEQ ID NO: 3306 - DNA, 1137 bp, Artificial Sequence
  derived and/or modified sequence
atgagccgctctggaacagacccgcaacagagacagcaagctagcgaagccgatgcagctgctgccacttttcgcgcgaacgaccatcaacatatcaggtataacccacttcaagatgaatgggttttggtgtccgcgcatcgaatgaagaggccatggcaaggccaagtagagccgcagctacttaagaccgtccctaggcatgatccgctgaatcccctctgtcctggtgccatccgtgccaatggtgaagtgaatccccagtatgactcgacgtttttatttgacaatgatttcccggcattacagccagacgcaccgagccctggcccatctgatcatccgttattccaagcaaagtctgcccgcggtgtctgcaaggttatgtgctttcacccgtggtccgatgttactctcccgctaatgtcggttccagaaatccgggcagtggttgacgcttgggcaagcgtcaccgaggaattgggtgctcaatacccttgggtccaaatttttgagaataaaggcgcgatgatggggtgtagtaatcctcatcctcattgtcaagtatgggcctcttcttttttgccggatatcgcgcaacgggaggaaagatcacaacaggcctataagtcacaacatggagaaccacttttgatggagtactcaagacaagaattacttagaaaagaaagacttgtacttacgagcgaacattggctggtacttgttccgttttgggcgacttggccttaccagacccttcttttaccgcgacggcatgtccggcgccttcctgaattaactccagcggaaagggatgatctagctagtataatgaaaaagttattgacgaaatatgataatctgtttgaaacgtcttttccatatagcatgggctggcatggagcgccaaccgggtcagaagcgggggctaattggaatcattggcagctgcatgctcactattatccgcctcttctgcgatcagctaccgttaggaaatttatggtagggtatgaaatgcttgctcaggcccaaagagatctgacacccgaacaagccgcagagcgtctacgtgcattacctgaggtacattaccaccttggccaaaaagatagagagacagctacgattgcg

SEQ ID NO: 3307 - DNA, 1137 bp, Artificial Sequence
  derived and/or modified sequence
atgtcgcgcagtggtaccgatccccagcagcgccagcaggcaagcgaagccgatgcagccgctgccacgttcagggccaatgaccaccagcacatccgttacaatcctctgcaggatgaatgggtcttggtgtctgcccaccgaatgaagcggccctggcagggtcaggtggagcctcagctgttaaagaccgtcccacggcacgaccctctgaaccccttatgtccgggggcgatccgcgcaaacggcgaggtgaacccccaatacgactctacttttttgtttgacaatgatttcccagcacttcaacccgacgccccatccccaggtccctcggatcatccactgttccaggcaaagtctgctaggggggtgtgcaaagtgatgtgtttccacccttggtccgacgtgaccttaccacttatgagtgtcccagagatccgtgcagtcgtggatgcatgggcaagtgtcacagaagagctgggtgctcaatatccgtgggtccaaattttcgagaataagggggctatgatgggatgtagtaatccacatccccactgccaagtttgggctagctccttcctccccgacattgctcaaagggaagagcgctcacagcaggcttacaaatcccagcatggcgagccactgttaatggagtactcccgccaggagctactcagaaaagagagacttgtgcttacttctgagcactggctggtgcttgtgccattctgggccacatggccataccagaccctactgctcccccggcggcatgtacggcgtctccctgaactcactcccgcggagcgggatgacctcgcaagtattatgaagaaattgctcaccaagtacgacaatctcttcgagactagtttcccgtacagcatggggtggcacggagcccctactggttctgaggccggcgccaactggaatcactggcagctgcatgcccactactacccacccctgctgaggagtgccacagtgaggaaattcatggttggctacgaaatgctcgctcaggcccaacgggacctcacacccgagcaggccgccgagaggcttagggccttgcctgaggtgcattatcacctgggacagaaagaccgcgagactgccaccatagca

SEQ ID NO: 3308 - DNA, 1137 bp, Artificial Sequence
  derived and/or modified sequence
atgagcagaagtggaactgatccacagcagaggcagcaggcttctgaggctgatgccgctgccgcgacatttcgcgctaacgaccaccaacatatcagatacaaccccttgcaagatgaatgggtattggtgtccgcccatcggatgaaacgcccttggcagggccaggtggaaccccaactgctcaagacagtcccaaggcacgaccccttgaaccccctgtgccctggtgctattagagctaacggggaagtgaacccacaatatgactctacctttctgtttgacaatgatttccctgcgttgcaaccagacgcaccaagtcccgggcctagcgatcatccacttttccaggccaaaagcgctaggggtgtgtgtaaggtcatgtgtttccatccctggtccgatgttactctgcccctgatgagcgtgccagaaatcagggctgtggtggatgcctgggcttcagtgactgaggaacttggagcgcagtacccatgggtgcagatattcgaaaacaaaggcgcaatgatgggatgcagcaaccctcacccccattgccaagtatgggctagttcatttctgccggacatagcccagagggaagagaggtctcagcaggcgtacaaatcccaacacggcgaaccactcttgatggagtactctcgccaagagctccttaggaaggagcgactggtgttgacatccgaacattggctggtgttggtgccattttgggcaacctggccttaccaaaccctgcttctgccaagacgtcacgtcagacggttgccggagcttacccccgctgagagggatgacctcgctagtatcatgaagaagctgttgaccaagtatgacaatctgttcgaaacctcatttccttattctatgggatggcatggtgcacccacaggttctgaagctggcgccaactggaaccactggcaacttcacgcacactattaccctcccctgctgagatccgccactgtgcgcaaattcatggttggctatgaaatgctggcccaggcccagcgggacctcacccccgaacaggcagctgaacgactgagggccctccccgaagtgcattatcatttgggccagaaggacagagagacagccacaattgct

SEQ ID NO: 3309 - DNA, 1137 bp, Artificial Sequence
  derived and/or modified sequence
atgtctcggtccggtacggatccgcaacagcgccagcaagctagcgaagcagatgctgccgccgcgacgttccgcgccaatgaccatcagcacatacggtacaacccattacaggacgaatgggttctggtctcagctcaccggatgaagaggccctggcagggtcaagttgaaccccagcttctcaagacagtgccccggcacgatcccttgaacccactctgcccaggggctattcgggctaacggggaagttaacccccagtacgattctacattcctctttgataatgactttccagcgcttcagccggatgcaccttcacctgggccctccgatcacccccttttccaagctaaatccgctcgaggagtgtgtaaagtaatgtgtttccacccatggtctgacgtgaccctgccgctgatgtctgtgcctgaaattcgggcagtggtcgacgcatgggccagtgttaccgaagagctgggcgctcaatacccctgggtccagatcttcgagaacaaaggcgcaatgatgggctgctctaatccccatcctcattgtcaggtatgggcttcatctttcctacctgacatcgcccagcgagaagagcggtcacagcaggcatataaatcacagcacggcgagcccctgttgatggagtactcaagacaagaactgttgcggaaagaacgcctggtcttaacctccgaacactggctggtgctagtgcctttctgggcaacttggccctatcagactcttctgcttcccagacgtcacgttagacgcctgcccgagctgacccccgccgaaagagatgacctggcatcgatcatgaagaagttgcttactaagtacgacaacctcttcgaaaccagtttcccctactcaatgggttggcacggagcacccacggggtcagaggcaggcgcaaactggaatcattggcagttgcatgcacactattaccctccattacttaggtccgctaccgtcagaaagtttatggtcgggtacgagatgctggctcaggctcagagggatctaacacctgagcaggcagccgagcgactacgcgccctgccagaggtacattaccacttgggacagaaagatcgagaaactgctacgatagct

SEQ ID NO: 3310 - DNA, 1137 bp, Artificial Sequence
  derived and/or modified sequence
atgagccgctccggtaccgatccacagcaacggcagcaggccagcgaggcagatgccgccgcggccacgttccgcgcgaatgaccatcagcatatccgctacaacccacttcaagatgagtgggttctcgtctcggcccatcgcatgaagcgaccctggcagggacaggtagaaccccagctactaaaaacagtccctcggcacgaccccctgaaccccctgtgtcctggcgcaatcagggcaaacggagaggtgaatcctcaatacgattcgactttcctgttcgataatgatttcccagcactgcaaccagacgcgccgtcaccaggtccatcagaccaccccctctttcaggccaagtccgctaggggcgtgtgtaaggttatgtgcttccacccttggtcagacgtgacactcccactgatgagtgtgcctgagatcagggccgtggtcgacgcatgggcatcagtgaccgaggagcttggagcacagtatccgtgggtgcagatcttcgagaataagggcgcaatgatgggctgttctaacccccaccctcattgtcaggtctgggcctcttctttcctgcctgatatagcacagcgggaggaaaggagccaacaggcctataagtcccagcacggcgaaccactgctgatggagtatagccgccaggagctgcttcggaaggagagattggtgctgacatccgaacactggttggtcctggtccccttctgggctacctggccctaccagaccttgcttctaccgcggcggcacgttaggcggttgcccgagcttacacccgctgagagggatgacctcgcgtcaattatgaaaaagctactgacgaagtatgacaacctgttcgaaacatcattcccttacagcatgggttggcatggcgcacccactgggtctgaggcaggtgccaattggaaccactggcagcttcacgctcattactacccacccctcctgcggtccgccaccgtgaggaagttcatggttggatatgaaatgctagcccaagcgcagagggacttgacccctgagcaggcggctgagcgcctaagggccttacctgaagtacactaccacctcggccagaaggaccgcgagactgccacgatcgct

SEQ ID NO: 3311 - DNA, 1137 bp, Artificial Sequence
  derived and/or modified sequence
atgtctagatccggcacagaccctcagcaaagacagcaggcttccgaggccgacgccgctgcggccacctttcgcgccaacgatcaccagcatatcagatataaccccctgcaggatgagtgggtgctggttagcgcacacagaatgaagcgcccttggcagggacaggtggagccccagctgctcaagacggtgccgcgacacgacccactcaacccactctgcccaggagcaatccgcgccaacggcgaagtcaatccacagtacgattccaccttcctctttgacaacgatttccctgcattgcagccggacgctccctcacctggccccagtgatcacccactgtttcaggcaaagagtgcacgtggcgtctgcaaggtgatgtgtttccatccctggtcggacgtcacactgcccctaatgtcggtgccggagatccgtgcggtagtggacgcttgggccagcgtcaccgaggagttgggtgcacagtacccttgggttcagatcttcgagaacaagggagcaatgatggggtgttctaacccgcacccccattgccaggtctgggctagttctttcctgcccgacattgcccagcgagaagagcggagccagcaggcctacaagtcccagcacggcgaaccgctgctcatggagtactctcgtcaggagctgctgcgtaaggagcgcctggtgctcacgtccgagcattggctggtactggtccccttttgggccacctggccgtatcagaccctgcttcttcctcgtcgtcacgtccgccgcttgccggagctgaccccggccgaacgggatgacctggcgtcgatcatgaagaagcttctgaccaaatatgacaatttgttcgagacgtctttcccatactccatgggatggcatggcgcacccaccggctccgaggcaggagcaaattggaatcattggcaacttcatgctcattattacccgccgttgcttcgctccgccaccgtgcgcaagttcatggtgggatacgagatgctcgcccaggctcagcgcgacctgacccccgagcaggccgctgaacgtctacgtgctctcccagaggttcactaccacctcggccaaaaggatcgtgagacagctacaatcgcg

SEQ ID NO: 3312 - DNA, 1137 bp, Artificial Sequence
  derived and/or modified sequence
atgtctcgaagcggaacggatccacaacaaagacagcaggcttcagaggccgatgcggccgcagcgacttttcgtgctaacgaccaccagcatataagatacaaccccttgcaagacgagtgggtacttgtttctgcgcatcgtatgaagagaccttggcaaggccaggtggagcctcagttgctgaagacagtgccccgacacgacccgctgaaccccttatgcccgggggcaattagagctaacggagaggtcaatccccagtacgattctacctttctgttcgataatgattttccagctctccagccagacgcgcctagcccaggtccctctgatcaccccttgttccaggctaagtctgcacgcggcgtatgcaaagttatgtgttttcacccatggagcgatgtcactctcccactcatgtctgtgcctgaaattagagccgtcgtcgacgcctgggcgtcagttaccgaagaactgggagctcaatacccatgggtgcaaatcttcgagaacaagggcgcgatgatgggctgttccaacccccatccccactgtcaggtctgggcctctagctttttgcccgatattgctcagagggaggagcgaagccagcaggcttataagagccagcacggagagcccctgttgatggaatactcacgacaggaactgctgcgtaaggaacggcttgtgctaacctctgagcattggctcgtgctggttcctttttgggccacgtggccataccaaaccctgttgctaccacgacgacatgttcgtagactgcctgaactgactccagcggagcgagatgacttagcaagtattatgaagaaactcctgactaagtatgacaatctattcgaaacctctttcccttatagcatgggttggcacggggccccaaccggtagtgaggccggggctaattggaaccactggcagttgcacgcgcattactacccaccccttcttagaagtgccactgttagaaaattcatggtaggatatgaaatgcttgctcaagcacaacgtgatcttacccctgagcaagctgctgaaaggttgcgagccctacctgaggtccactaccacctaggccaaaaggaccgggagactgccacaattgct

SEQ ID NO: 3313 - DNA, 1137 bp, Artificial Sequence
  derived and/or modified sequence
atgtcgcgttcgggtacggatccgcaacaacgacaacaagcgtcggaagcggatgcggcggcggcgacgtttcgagcgaatgatcatcaacatatacgatataatccgttacaagatgaatgggtactagtatcggcgcatcgtatgaaacgaccgtggcaaggtcaagttgaaccgcaactactaaaaacggttccgcgacatgatccgttaaatccgttatgtccgggtgcgatacgagcgaatggtgaagtaaatccgcaatatgattcgacgtttttatttgataatgattttccggcgctacaaccggatgcgccgtcgccgggtccgtcggatcatccgctatttcaagcgaaatcggcgcgtggtgtatgtaaagttatgtgttttcatccgtggtcggatgttacgctaccgctaatgtcggtaccggaaatacgagcggtagttgatgcgtgggcgtcggtaacggaagaactaggtgcgcaatatccgtgggtacaaatatttgaaaataaaggtgcgatgatgggttgttcgaatccgcatccgcattgtcaagtttgggcgtcgtcgtttctaccggatatagcgcaacgagaagaacgttcgcaacaagcgtataaatcgcaacatggtgaaccgttactaatggaatattcgcgtcaagaactattacgaaaagaacgactagttctaacgtcggaacattggttagtactagtaccgttttgggcgacgtggccgtatcaaacgctattattaccgcgacgacatgttcgacgtttaccggaactaacgccggcggaacgtgatgatctagcgtcgataatgaaaaaactattaacgaaatatgataatctatttgaaacgtcgtttccgtattcgatgggttggcatggtgcgccgacgggttcggaagcgggtgcgaattggaatcattggcaactacatgcgcattattatccgccgctactacgttcggcgacggtacgtaaatttatggtaggttatgaaatgctagcgcaagcgcaacgtgatctaacgccggaacaagcggcggaacgattacgtgcgttaccggaagttcattatcatttaggtcaaaaagatcgtgaaacggcgacgatagcg

SEQ ID NO: 3314 - DNA, 1137 bp, Artificial Sequence
  derived and/or modified sequence
atgtccagatcaggaacagatccacaacaaagacaacaagcaagtgaagcagacgcagcagctgcaacttttagagcaaatgatcatcaacatattcgttataatccacttcaagatgaatgggttttagttagtgctcatagaatgaaaagaccatggcaaggacaagtcgaacctcaattacttaaaactgttccaagacacgatccactaaatccactttgtcctggagcaataagagctaatggtgaagtaaatccacaatatgatagtactttcttatttgataatgattttccagctcttcaaccagatgcaccatctccaggaccatctgatcatccattattccaagctaaatcagcaagaggtgtttgtaaagttatgtgtttccatccatggtcagatgtaacattaccattaatgtcagttccagaaatacgtgcagtagttgatgcatgggcttcagttactgaagaattaggagctcagtatccatgggttcaaattttcgaaaataaaggagctatgatgggatgttctaatcctcatccacattgtcaagtatgggcatctagtttcttaccagatatagcacaaagagaagaaagatcacaacaggcatataagtcacaacatggagaaccacttttaatggaatactcaaggcaagaattattaagaaaagaacgtttagttctaacaagtgaacattggcttgttttagttccattttgggctacatggccatatcaaactcttttacttccaagacgacatgttagaagattgccagaattaacaccagcagagagagatgacttagcttcaattatgaaaaaattattaacaaaatacgacaatttattcgaaacatcatttccttattcaatgggttggcatggtgctccaacaggatcagaggctggagctaattggaatcattggcaattgcatgctcattattatccaccacttttaagatctgctactgtaagaaaatttatggtgggatatgaaatgcttgctcaagcacaaagagaccttactccagaacaagccgcagaaagattaagagcattacctgaagtacattatcatcttggtcaaaaggatagagaaacagcaactatagca

SEQ ID NO: 3315 - DNA, 1137 bp, Artificial Sequence
  derived and/or modified sequence
atgagtcggtccggcacggacccccagcaacgtcaacaggcctccgaggccgatgctgccgccgctacttttagggccaatgaccatcagcacatcagatataacccgctgcaggatgagtgggttcttgtgagcgcccatcgcatgaaacggccctggcagggacaggtggaaccccaacttctaaagaccgtgccgagacatgatccactgaatcccttgtgcccgggagctatacgggccaacggggaagtcaacccccaatacgattcgacattcctgtttgacaatgacttccctgctcttcagccagatgcacccagccctggaccatctgatcatcccctgttccaggccaagtctgcccggggcgtctgtaaggtgatgtgcttccacccatggtcagatgttacacttccgctaatgtccgtgccggagattagagcagtggtagatgcctgggcctctgttactgaggagctcggtgcacaatacccatgggtgcagatcttcgaaaacaagggggccatgatgggatgctcaaaccctcatccacactgccaagtttgggcctcttctttcttgcccgacatagctcagagggaggaacgttcgcagcaggcctataaaagccaacacggagaacctcttctgatggagtatagccgccaggagctgcttcgtaaggagcggcttgtgctcacaagcgaacattggctcgtattggtgccattctgggcaacttggccctatcaaacgttactccttcctcggagacatgtccgtagactgcccgaactcacgccggctgagcgggatgacctggccagtattatgaaaaagctgctgaccaagtatgataaccttttcgagacgtcatttccgtactctatggggtggcacggcgcccctacaggttcagaggccggcgccaattggaaccactggcagctgcatgcacactactaccccccgttgctgcgcagtgctacagtccggaaatttatggtgggctatgaaatgctggcccaggcccaaagggatctgactcctgagcaggcagcagagagactaagagctctcccagaggtacactaccacctaggacagaaagacagggaaacagcaacaatcgct

SEQ ID NO: 3316 - DNA, 1137 bp, Artificial Sequence
  derived and/or modified sequence
atgtcaagatcaggtaccgatccccagcagagacagcaggcttccgaggccgacgcagcggccgccaccttcagggcaaatgaccaccagcacattcggtacaatcccctccaggatgagtgggtgctcgtgagtgcccaccggatgaagaggccttggcagggccaggtcgagccccagctgctcaagacagttccccgccacgatcccttaaacccgttgtgccctggagcgatccgggctaacggagaggtcaaccctcagtatgacagcactttcctcttcgataacgatttcccggcactccagccagatgcaccttcacccggtccttctgatcaccctttgttccaagcaaaatctgctcgcggggtgtgcaaagtcatgtgcttccatccgtggtctgacgtgacactgcctttgatgtccgtcccagagatcagggccgttgtagacgcgtgggcttcagtcacggaagaactcggagcacaatatccgtgggttcaaatctttgaaaataaaggggctatgatggggtgctcgaacccacatccacactgtcaggtgtgggcgagttcctttctgcctgacattgcacagcgagaagagaggagtcagcaggcttacaaatcacaacatggagagcccttgctgatggagtatagccgccaggagctgctgcgtaaagaaaggctcgttctgacctccgaacactggctcgtgttggtgccgttctgggcgacatggccgtatcagaccctgttactcccaaggcggcacgtgcgtcgccttccagagctgactcctgctgagcgtgacgatctggcttctataatgaagaaactgttgacaaagtatgacaacttattcgagacaagcttcccgtacagcatgggatggcacggagccccaaccgggtccgaggccggcgctaactggaaccattggcagctgcatgcccactactacccaccactgctgaggagtgccaccgtgagaaagtttatggtgggctacgaaatgctggcacaggcacaaagagacctgactccagaacaggctgccgagcgtctgcgagctttacccgaagtgcactaccacctgggccagaaggatagagaaactgctacaatcgct

SEQ ID NO: 3317 - DNA, 1137 bp, Artificial Sequence
  derived and/or modified sequence
atgagtagatccgggacagacccgcagcaaagacaacaagcttctgaagcggacgctgctgcagcgacctttcgagctaacgaccatcaacacattcgatacaatccactgcaagacgaatgggtacttgtgtctgcccaccgaatgaaaagaccgtggcaaggacaggtcgagccacagttgctaaaaactgtgccgagacacgacccactaaacccactctgtcctggagctatcagggccaatggagaagtgaaccctcagtatgactctacatttttattcgataacgactttccagcccttcaaccggacgctccatcgccaggaccatcagaccacccacttttccaggcgaagtccgcacggggagtctgtaaagttatgtgcttccatccatggagcgatgttacgctccctctcatgtccgtgcccgagatcagagctgtggtggacgcctgggcctctgtgacagaagaactgggagctcaatatccatgggttcagatcttcgagaacaaaggggccatgatgggatgttctaacccgcacccacactgccaggtatgggcatctagcttccttcctgacattgctcagcgggaagaaaggtcacaacaagcctataagtcacaacacggagagccattgcttatggagtactcacgtcaggaattgctcagaaaggagcgccttgtgttgacatcagaacactggctggttctcgtgccattctgggccacatggccataccagacattgctgttgcccagacgtcatgtgcggcgacttccagaactgactcctgctgaacgagacgacctcgcatcaattatgaagaagctactgacaaagtatgataatcttttcgagacatcattcccgtacagtatgggatggcacggagctccaacgggatccgaagcaggtgcaaactggaatcattggcaattgcacgcacactattatcccccgctgttgcgctcggccactgttcgtaagtttatggtcggatatgaaatgcttgcgcaagctcagagagatctcactcctgaacaagctgccgagagactcagagctcttccggaggtccattatcatctgggtcaaaaggacagggaaactgcaactatagca

SEQ ID NO: 3318 - DNA, 1137 bp, Artificial Sequence
  derived and/or modified sequence
atgtcacggtcaggcaccgacccacaacagcgacagcaggcctctgaagcagacgcagctgctgcaacattccgagccaacgaccatcagcatatcagatataacccattgcaggatgaatgggtcctggtgtcagcccaccgtatgaagcgcccgtggcaaggccaggtggaaccccagctgctaaagacagtgcccagacatgatcccctgaacccactctgcccaggagctattcgagccaatggagaagttaatccgcagtatgatagcaccttcctctttgataacgattttcctgcattgcagccggacgcccctagccctggacctagtgaccacccgcttttccaggcaaaatccgctcgcggggtgtgtaaggtgatgtgcttccacccgtggagcgacgtgaccttacccctgatgtccgtacccgaaatcagggccgtcgtcgatgcctgggctagcgtcactgaagagctaggtgcccaatatccatgggtccagatctttgagaataagggagcgatgatggggtgtagcaacccacaccctcactgtcaagtttgggcatctagcttcctgcccgacattgcacagagagaagagagatctcagcaggcttacaagagccagcacggtgagcctctgctaatggagtactcgcgacaggaattgctgcgaaaggaacgtctcgtgctgaccagtgagcattggctggtccttgttcctttttgggcaacctggccctatcaaacactgttattgcctcgaaggcatgtccggcggcttcccgaactgacccccgcagaaagagatgacctggcctcgatcatgaagaagctgcttactaagtacgataatctttttgaaacctcttttccctactccatgggctggcacggtgccccaacagggagcgaagctggcgcaaactggaaccattggcagttgcacgcacactattatcctccgctgttgagaagtgcaaccgtgcgcaagttcatggtcgggtacgaaatgctcgcacaagctcagagagatttaactcccgagcaggctgctgaaaggttgcgggccctgccagaggtccattatcacctgggtcagaaggaccgggaaactgccacgatcgcc

SEQ ID NO: 3319 - DNA, 1137 bp, Artificial Sequence
  derived and/or modified sequence
atgtcgcggtcgggaactgatcctcagcagcgccagcaagccagcgaagctgacgcagccgccgctaccttcagagccaatgatcaccagcatatccggtacaatccgctgcaggatgaatgggtactggtgtcggctcatcgcatgaaacggccgtggcaaggacaggtggaaccccagctccttaaaaccgtcccacgccatgacccgctcaatcctctttgccctggtgccattcgggccaacggagaggtgaacccccagtacgactcaacgtttctgttcgacaacgacttcccggcgctgcagccggatgccccttcgccaggcccctcggaccatccactgttccaggcgaagagcgcgagaggggtgtgcaaggtgatgtgttttcacccctggtctgacgttaccttgccgctgatgagtgtgccagagatccgcgctgtggtggacgcgtgggcctccgtcactgaagagctgggagcccagtacccgtgggtgcagatcttcgaaaacaagggagccatgatggggtgcagcaacccacacccgcattgccaagtctgggcttccagcttccttccggacatcgcgcaacgagaggaacgttcacaacaggcctacaagtcccaacatggagaacctctgctcatggagtattcccgccaggagctcttgcggaaggagcggctggtgttgacctcagaacactggctggtcctggtgccgttctgggcaacttggccgtaccagaccctgctgctccctcgccgccatgtccggcgcctgccggagctcactcctgcagagagggatgacctcgcatccatcatgaagaaattgctcactaagtacgacaaccttttcgaaacctcgttcccgtactcaatgggatggcacggcgccccaacgggttccgaagcaggcgccaattggaaccactggcagctccacgcccactactacccaccactgctgagaagcgcgaccgtgagaaaatttatggtgggctacgagatgctggctcaagcgcaacgcgatctcactcccgaacaggcggcggagaggctgagagcactgccggaagtccactaccacctcggacaaaaggatagggaaactgccaccatcgca

SEQ ID NO: 3320 - DNA, 1137 bp, Artificial Sequence
  derived and/or modified sequence
atgtcgaggtccggaaccgatccacaacagagacagcaggcatcagaagctgacgctgctgcagccacttttcgagcaaacgaccaccaacatattagatataatccgctgcaagatgaatgggtcctggtttctgcccaccgcatgaaacggccgtggcagggccaggttgaaccccagcttcttaaaaccgtcccgcgacatgacccactgaacccgttgtgcccaggggccatcagagctaacggagaagttaacccgcagtatgactcgacgtttctcttcgataatgacttccccgcactacagcccgacgcaccgtcacccgggccttcagatcacccattgttccaggcgaagtcagcacgcggtgtctgtaaagttatgtgttttcacccttggagcgacgttaccctgcctctgatgtccgttcccgagatccgggcggtggttgatgcctgggcgtcagttacagaagagctgggagcgcagtatccatgggttcagatctttgagaataaaggtgccatgatgggctgcagcaatccacatccccactgtcaagtttgggcttcgtcattcttacctgatattgcgcagcgagaggaacgaagtcaacaggcgtataagagccagcatggagaaccgctcctcatggaatactctcgccaagaactcctccgcaaggagcggctcgtgctcacgagcgagcattggttggtccttgtgccgttctgggcaacatggccttaccagactttgctacttcctcgacgccacgtacgccgtctgcccgaattaactccggcggagcgggacgatctggcgtcgataatgaagaagctgctaaccaagtatgacaacctattcgagacaagcttcccgtactctatgggttggcatggtgccccgactggatctgaggcgggagctaattggaatcattggcaacttcatgcccattactaccctcctttactgcgcagtgcgactgtgcgcaagttcatggtcggctatgagatgctcgcgcaggcccaacgcgatctgactccagaacaagccgcagagcgccttcgcgcgttgccggaggtccactatcatctcggccaaaaagacagggaaactgccacgatcgcg

SEQ ID NO: 3321 - DNA, 1137 bp, Artificial Sequence
  derived and/or modified sequence
atgtcccgttcaggcacggacccccagcagcgacaacaagcatccgaggccgacgcggcagcagccacctttcgcgcgaatgaccaccagcacatccgttacaaccctcttcaagatgagtgggtgctggtatctgcccaccggatgaagaggccgtggcaaggccaggtggaaccccagctcctgaagaccgtgcctcgccacgacccgcttaaccctctctgtcccggggctataagagccaatggggaagtcaacccacagtatgactcaaccttcttgttcgataatgatttccctgcactgcagcccgatgctccgtcacctggaccctctgatcaccctttgtttcaggctaaatctgcaaggggcgtgtgtaaagtaatgtgcttccacccatggtcggatgtcacactcccgctgatgtccgtccccgaaattagagccgtggtggatgcatgggcctctgtgacagaggaactgggtgctcagtatccctgggtccagatttttgagaataagggagctatgatggggtgttccaacccccatccccactgtcaggtttgggcatcttcattcctccctgatatcgcccagcgggaggagcgtagccaacaggcttacaagagtcagcatggagagccactcctgatggagtattcgcgtcaggagctgctgcgcaaagaaagactcgttttaacttctgagcattggctcgtgctcgtcccattctgggcaacctggccatatcagacacttctgctgccaaggaggcatgtgcggaggctgcccgagcttacacctgccgaaagagacgacctggcaagcataatgaagaagctcttgaccaagtatgataatctgttcgaaacatcattcccatacagcatggggtggcacggtgcgcctacgggctccgaggccggcgccaactggaatcattggcagttacacgcccattactacccacccttactgaggagtgccacagtgagaaagtttatggtgggctatgagatgctggcacaggcccaacgggaccttacgccagagcaggcagcagaacgcttgcgagccctgccagaggtccactatcatctcggtcagaaagatcgcgagacagctacgattgcc

SEQ ID NO: 3322 - DNA, 1137 bp, Artificial Sequence
  derived and/or modified sequence
atgagcagaagtggaaccgacccccagcagaggcagcaggcaagcgaggccgacgccgccgctgccacattcagggccaacgatcaccagcacatccgttacaatccactgcaggatgagtgggtcctggtgtctgctcatcgtatgaagaggccctggcagggacaagtggaaccacagctcttgaaaaccgtgccccgccatgaccccctcaatcccctgtgcccaggcgctattagggcaaacggagaggtgaaccctcagtacgatagcaccttcctcttcgacaacgactttccagcacttcagcccgatgctccaagtcccggccccagtgaccatcctctcttccaggccaaatcagcacgtggtgtatgcaaggtgatgtgtttccatccttggtccgatgttaccttgcccctcatgagcgtgcccgagattagggctgtggtggacgcttgggcatccgtgaccgaggagctgggtgctcagtacccctgggtgcagattttcgagaataagggtgccatgatgggatgtagcaacccccatccccattgccaggtgtgggctagttccttcctgcctgacattgcccaacgtgaggagaggagccagcaagcttataaaagccagcacggagaacctcttttgatggaatattccaggcaagagctgcttcgtaaggaacgcttggtcctgacaagcgagcactggcttgtactcgtacctttttgggctacatggccctatcagacactgcttctgcctaggagacacgtgagacgccttcctgagctgacacccgccgaacgtgacgatcttgcttccatcatgaaaaagctgctcacaaagtatgataatctgtttgagacttcattcccatatagcatgggttggcatggcgcccccaccggatccgaagccggcgcaaactggaaccattggcaactgcatgcacactattatcctcccctgttgcgttctgccacagtgcgcaagttcatggtgggctacgaaatgcttgctcaggctcagagagacttgactccagagcaagctgccgaacgccttcgcgctttgccagaagtccactatcacttgggacagaaggatagggagacagctactatcgca

SEQ ID NO: 3323 - DNA, 1137 bp, Artificial Sequence
  derived and/or modified sequence
atgagtcgttctggtactgatccacaacaaagacaacaagcttcggaagctgatgctgcagcagcgaccttcagagctaacgatcaccaacacattcgatataacccattacaggatgagtgggttttggtttcagcgcaccgaatgaaacgtccttggcagggccaggtggaaccacagctcttaaagaccgtcccacgtcatgatcctcttaatccactttgcccaggtgcaataagagctaatggcgaagtaaacccacagtatgattcaactttcctgttcgataatgactttcctgcgttgcagccagatgcaccatcacctggtcctagtgaccatcccttgtttcaggccaagtctgctcgaggcgtgtgcaaagttatgtgttttcacccttggagtgatgtcaccctgccacttatgagtgtgccagaaataagggccgtggttgatgcatgggcatcagttaccgaagagctgggagcccaatatccttgggtccagattttcgaaaacaagggtgctatgatgggttgctctaaccctcatccacactgtcaagtttgggcctcctcttttctacctgatattgctcaaagggaggaacgatcacaacaagcttataaatcccagcatggagaaccacttcttatggaatatagtagacaggaactcctccgtaaggagcgacttgtgcttacaagcgagcattggcttgtgctcgtgcctttttgggctacctggccataccaaacgttgctacttccgaggcgtcacgttcgacgcttacccgagctcactcctgctgaaagagatgatcttgctagcataatgaagaagttgctcacaaagtatgataaccttttcgagacctcatttccttatagtatgggatggcatggagctccaactgggtcggaggccggagccaattggaatcactggcaactgcatgctcattactatccacctctgctgcggtccgctaccgtgagaaagttcatggttggatacgaaatgcttgcgcaggctcaaagggatttgacgcctgaacaagcagctgagcgtcttcgagcgttgccagaagttcattatcatttaggacaaaaggatcgggagaccgctacaatcgcc

SEQ ID NO: 3324 - DNA, 1137 bp, Artificial Sequence
  derived and/or modified sequence
atgtcccgatccgggacagacccccagcagagacagcaggcaagtgaagctgatgccgccgccgccacattccgagccaacgatcaccagcacatacgatataaccctctccaggatgaatgggtgcttgtgtcagcccatcggatgaaaagaccctggcagggacaggtggaaccacagctgctaaagacagtcccaaggcatgatcccctcaatcccctatgccctggagctatacgcgctaacggggaagtcaacccccagtatgattctacttttttatttgataacgatttccccgccttacagcctgatgctccatcacccggacctagtgatcacccactcttccaggccaaaagtgccagaggagtctgtaaagtgatgtgttttcatccatggtccgatgtgactctacccctcatgtccgtccccgaaatcagggcagtcgtcgatgcttgggcatctgtgactgaagagctcggggcccagtacccctgggtccaaattttcgaaaacaaaggggccatgatgggatgtagtaatccccatcctcactgtcaggtgtgggcttcctcgtttttacctgacatagctcagagggaagaacggtcccagcaggcttataaatcccagcatggggaacctctgcttatggaatattctagacaggaactgcttcggaaagaaaggctggtgttaacttccgaacattggctcgtgctcgtgcccttttgggcaacatggccatatcagacactacttcttccccggcgacatgtccgacgcctcccagagctcacaccagcggaaagggacgatttagcttcaataatgaagaagctcctgacaaagtatgacaaccttttcgaaacttcttttccttactcaatggggtggcacggggctcctactgggtctgaagccggggcaaattggaatcattggcagcttcatgctcattattatccacctctactgaggtccgccactgtgcgcaaatttatggtaggatatgagatgcttgcccaggcccagcgggatcttactccggaacaggcagccgaacggctccgggctctgcctgaagttcactaccacctgggacagaaagatcgagagacagccactatagct

SEQ ID NO: 3325 - DNA, 1137 bp, Artificial Sequence
  derived and/or modified sequence
atgagtcgctctggaacggatccccagcagaggcagcaggcatccgaggcagatgcagctgctgcgacatttagagccaacgaccatcaacatattaggtataacccgctgcaggatgagtgggtgctggtcagcgcacatagaatgaaaagaccatggcaaggtcaggtagagccccagctgctgaaaacagtgcctaggcacgacccgttaaacccgctgtgtccaggtgccatccgggccaacggcgaggttaacccgcaatacgattctacatttctcttcgataatgatttccccgccttacaacccgatgctccaagtccgggcccctctgaccatccactcttccaggccaagtcagcacgcggtgtctgtaaagtgatgtgtttccatccctggtctgatgtaacgcttcccctgatgtcagtgccagagattcgggccgtcgtcgatgcatgggcgagcgttactgaggagctgggcgctcagtatccatgggtgcagatatttgaaaacaaaggtgccatgatgggatgctccaatccccatcctcactgccaggtctgggcgtcttctttcctgccggatatcgctcagcgtgaggagcgtagccaacaagcttacaaatctcagcacggcgaacccctgctaatggaatattctcggcaggaattgctccgaaaagagagattggtgctaacttccgaacattggctagtcctcgtcccattctgggcaacgtggccatatcagacgctactactgcctcgtaggcacgtccgaagactgccggagctgacacctgctgaacgcgatgatctcgcctcaataatgaaaaaacttctaacgaaatatgataatctatttgaaacatccttcccatacagcatgggatggcacggcgccccgaccggttctgaagcaggagctaactggaatcactggcagttgcatgcccactactaccctccccttctgcggtccgctacagttcggaagtttatggtcgggtatgagatgttagcacaggctcagagagatctgacgcctgagcaggcggcagaaagactccgcgctctgcccgaagtgcactaccatctgggacaaaaggacagagagaccgccacaatagcc

SEQ ID NO: 3326 - DNA, 1137 bp, Artificial Sequence
  derived and/or modified sequence
atgagccgcagcgggaccgatccgcagcagcgtcagcaggcgtctgaagcggatgctgccgctgcgacgtttcgggcgaacgatcatcagcacatccgctacaaccctctgcaggacgaatgggtgctggtgtctgcacacagaatgaagcgtccgtggcaaggccaggttgaaccgcagttgctgaagaccgtccctcgacatgatcctctgaatccgctgtgcccaggcgccatacgtgcaaacggagaggtcaatccgcaatacgacagcacattcctatttgataacgatttccctgcattacaacctgacgcgccttcgccgggtccaagtgatcatccgctgttccaagccaaatctgctcgaggtgtgtgtaaggtgatgtgcttccatccgtggagcgatgtgaccctgcccctgatgtctgttccagagataagggcagtggtcgatgcgtgggcttccgttaccgaggagctgggcgcgcagtacccatgggtccagatctttgagaataagggtgcaatgatggggtgtagcaatccacaccctcactgccaggtctgggcgtcaagctttctgccagatatcgcacaacgcgaggagcgcagccagcaggcctataaaagccagcacggtgagccgttgctcatggagtatagccgccaagaattactgcgaaaggaaaggctggtcttgaccagcgaacactggcttgttctagtgcctttttgggcgacgtggccatatcaaaccttgctgcttccgcggcgccacgtgcgccgcctgcccgagctcaccccggcggaacgcgatgatcttgcatctatcatgaagaagctgctgacgaagtatgataacctgttcgagacctccttcccctactcgatgggatggcatggggcgccgaccggtagcgaagcaggagctaactggaatcactggcagctgcatgcacactactacccgccactgctgcggagcgcgaccgttagaaagttcatggttggttatgagatgctggcccaggctcagcgtgatctgacgccggagcaggccgcagagcgtctcagggcattgccagaagttcattaccatctgggccaaaaggacagggaaacggcaaccatcgct

SEQ ID NO: 3327 - DNA, 1137 bp, Artificial Sequence
  derived and/or modified sequence
atgagcagatcagggacagatccgcagcagcgacagcaggcctccgaggccgatgctgctgcggctacattcagggctaacgaccaccagcatatccgttataaccctctgcaggatgagtgggtcttggtttccgctcacagaatgaaaagaccctggcagggccaagtcgaaccacagttgctgaagacggtacccagacacgaccctttgaaccctctgtgccccggagctattcgcgcaaatggggaagtgaacccccaatacgattccactttcctattcgacaatgatttcccagcactccagcccgatgccccaagcccaggcccgtccgatcaccctctcttccaggccaagagcgcacgaggcgtatgtaaagtgatgtgtttccacccgtggtcagatgtcacactcccattaatgtccgtcccagagattcgtgcggtggtagacgcctgggcctccgtcacagaagaactgggggcccagtacccctgggtgcagattttcgagaacaaaggggctatgatgggatgttctaatccgcacccgcattgtcaggtctgggcatccagttttttacctgacatcgctcagagggaggagcgcagccaacaggcgtataaaagccagcatggcgagcccctgctcatggaatactcccggcaggagctgctgcgtaaggagcggctggtacttactagcgagcattggctggtcctggtccctttttgggccacatggccctaccaaaccctgttactgccgcgccgtcacgttcgaaggctgccggaattgacaccggcggagagggacgacctggcctcaatcatgaagaagctgcttacaaagtatgataatctctttgagacatcttttccttacagtatgggttggcacggggcccccaccggttccgaagctggcgccaactggaaccactggcagctgcacgctcattattacccaccactactcaggtcggcaaccgtacggaagtttatggttggatatgagatgctcgcccaagcccagcgggatcttaccccggagcaagcagcggaaagacttcgggccctccccgaggtgcattaccatctggggcagaaagacagagagactgctaccatcgcc

SEQ ID NO: 3328 - DNA, 1137 bp, Artificial Sequence
  derived and/or modified sequence
atgtcccgcagcggcacggacccccagcagaggcagcaggccagcgaagcagatgccgcagccgcaacttttcgcgctaatgaccatcagcacataagatataaccccctgcaggatgagtgggtattggtgtcggcccaccgaatgaagcgtccgtggcagggacaggtggagccccagctgctcaagactgtgccgaggcatgatccgctgaacccgctctgtccaggagcaatccgcgccaatggcgaggtcaacccgcagtatgactcgacgtttctgtttgataacgacttcccggcactacagccagacgctccctcccccggcccctccgatcaccccctgttccaggctaagagcgctcgaggcgtctgcaaggtgatgtgttttcatccttggtccgacgtgacactgcccctgatgagcgtcccggaaattcgcgccgtggtagatgcttgggcatctgtgactgaagagttgggggcccaatacccatgggtccaaatattcgaaaacaagggggcgatgatggggtgctcgaatccccacccgcattgtcaggtgtgggcctcgagctttctgccggatatcgcacaacgcgaggagcgatcccagcaggcctacaagtcacaacatggagagccactgctgatggaatacagtcgccaggagcttttgcgcaaggagaggcttgtgctgactagcgagcattggctggtgctggttcctttttgggccacttggccctaccagacgctgttgctaccccgcaggcatgtgcgacgcctgcccgaactcacgcccgccgagcgcgatgatttagcctcgatcatgaagaagctgttgacaaaatatgataacctttttgaaacatcttttccttactcgatgggctggcacggcgcccccaccggctccgaggcaggagcgaactggaaccactggcagttacacgcgcactactatccccccctgctgcgcagcgctacagtacgcaagttcatggtgggatacgagatgctggcccaggcacagcgcgacctcactccggagcaggcggccgaacgcctgcgagccctgccggaagttcattaccatctcggtcagaaggacagagaaacggcgacgattgct

SEQ ID NO: 3329 - DNA, 1137 bp, Artificial Sequence
  derived and/or modified sequence
atgtctagatccggaactgacccccaacagcggcagcaagcttcagaggcagatgcggccgcggcgactttcagagctaacgaccatcagcacattagatacaacccattgcaagatgagtgggttctcgtgagcgcccacaggatgaaacggccctggcagggccaggtggagcctcagctcctgaagactgtgcccagacatgacccactcaaccccctgtgtcctggcgccatccgcgctaatggtgaggtgaatccccaatacgattcaacgttcctgtttgataatgactttccggcgctccaacccgacgccccgagcccaggtcctagcgatcacccactgttccaggctaagtccgctaggggcgtttgcaaggtgatgtgtttccacccatggtcagacgtcactttgcctttgatgtctgtcccggagatacgagcagtggtggacgcctgggccagtgttactgaggagctcggtgcccagtacccatgggtgcagatttttgagaacaaaggcgcaatgatgggttgtagcaacccccatccacactgtcaggtttgggcttcttcattcctgccagatatcgctcagagagaagagagatctcagcaggcctacaagagtcaacatggagaacctctcctcatggagtacagccggcaggaactcttgcgcaaggaacggctggtccttacctctgaacactggctggtactggtgccgttctgggcgacatggccgtaccagactctgctcctgccaagacggcatgtgaggcgcctgcctgagctgactcctgccgagagggacgatttggcctctatcatgaagaagctgctcacaaagtatgacaacctctttgagaccagttttccttattccatgggctggcacggtgcgccaaccggtagcgaggctggtgctaattggaaccactggcagctccatgctcactactatcctccccttcttagaagcgcgacggtcaggaagttcatggtcggttatgaaatgttggctcaagcccagcgcgaccttacccccgagcaggccgcagagaggctgcgagccctgccggaggtgcattatcacctggggcagaaggatcgggaaaccgcaacaattgct

SEQ ID NO: 3330 - DNA, 1137 bp, Artificial Sequence
  derived and/or modified sequence
atgagcagaagtggcacagatcctcagcagcgccaacaggcttcagaggccgacgccgctgccgcaactttcagagctaatgatcatcagcatatccgctacaacccgctgcaagatgagtgggtgctcgtctctgctcacaggatgaagcgtccttggcagggacaggttgaaccacaactgttgaagaccgtacctcgacacgatccactgaaccctctatgtcccggcgcgatccgagcgaacggcgaggtgaacccacagtacgattcaacatttctcttcgacaatgatttcccagcgctgcaaccagatgcccctagccccggaccctcggaccacccactgtttcaagctaaaagtgcacgcggagtttgcaaggttatgtgtttccatccatggtccgacgtaaccctgcctctgatgtcagttcccgaaatcagagctgtggtggatgcctgggcctccgtgaccgaggagttgggtgcccaatacccatgggttcagatcttcgagaataaaggcgccatgatggggtgtagtaacccccaccctcactgtcaggtgtgggcttcctctttcctgcccgatatagcccagagagaggaacgatcccagcaggcttacaaaagtcagcacggtgaaccacttcttatggagtacagccgccaggaactgctgcgtaaagaacggctagtcttaacatctgaacattggttggtgctcgtgcccttttgggccacgtggccctatcagaccctgctacttcctagaagacacgtccgacgcttgccggagctgactcctgccgagagggatgatctggcctccataatgaaaaagctcctgactaagtatgacaatctttttgaaacatccttcccctatagtatgggttggcatggggctccaacaggatcagaagccggcgctaactggaatcactggcagctgcatgcacattactaccctccgctgctccggagcgccacggtgagaaaattcatggtggggtatgagatgctcgcccaggcccaaagggacttaactcccgagcaagctgcagaaagactccgggctcttcccgaggtgcattatcatctgggccagaaggaccgcgagactgccactattgct

SEQ ID NO: 3331 - DNA, 1137 bp, Artificial Sequence
  derived and/or modified sequence
atgagtcgatccggaacagaccctcagcagagacaacaggcaagcgaggccgacgccgcagcagctaccttccgcgccaatgatcaccagcacattcggtataatccactgcaggacgagtgggtgctcgtgtctgcccaccggatgaagagaccttggcaggggcaggttgaaccacagctgcttaaaacagtcccacggcacgatcccttaaaccccctgtgcccaggtgcgataagggcgaacggcgaagtaaaccctcagtatgacagcacatttctgtttgataatgacttccccgcacttcagccggacgcacccagccctgggccttctgatcatccgttgttccaggccaagtctgctagaggcgtgtgtaaggtgatgtgttttcacccttggtccgacgtcactcttcccctaatgtccgtgcccgaaataagagccgtggtcgatgcgtgggcttctgtgacggaggagctgggtgcacaatacccttgggtccagatctttgagaacaagggggcaatgatgggctgctcaaaccctcaccctcactgtcaggtgtgggcttcaagctttttgcctgacattgctcagcgtgaagagcgtagtcagcaggcttataaatcccaacatggcgagccactgctgatggaatatagcaggcaagaactgctccggaaagagaggttggtgcttactagtgagcattggctcgtcttggtgcccttctgggccacctggccataccagaccttgcttcttccgaggcgtcacgttcgacggctccccgaactgacaccagctgagagagatgacctggcgagcattatgaaaaagctgctgacgaaatatgacaatctgtttgaaacaagcttcccctacagcatgggatggcatggagccccgacgggatcagaggccggtgccaactggaatcactggcagttgcacgcgcactactacccgccactgcttaggagtgccacagtgcgtaagttcatggtgggctacgaaatgctagcacaggcccagagagatctgacaccagaacaagcagccgagcggttgagggccctgcccgaagtgcactatcaccttggacagaaagatagagaaactgcaactattgct

SEQ ID NO: 3332 - DNA, 1137 bp, Artificial Sequence
  derived and/or modified sequence
atgtcacgatccggaaccgacccacagcagaggcagcaggcatccgaggcagacgcagccgctgcaaccttccgggcaaatgaccaccagcacattcggtataaccccctccaggacgaatgggtgttggtttccgcgcataggatgaaaagaccctggcagggtcaggtggagccacagctgctgaagactgtgcctagacacgaccccttgaacccactgtgtcctggagctattagggcgaatggtgaagtgaatccccagtatgacagcacttttctgttcgataatgacttcccagccctccagcccgatgcacctagtcccggaccgagtgaccacccactgtttcaagccaagagtgcaagaggcgtctgcaaggttatgtgctttcacccatggtccgatgtgaccctgcccctgatgtccgtgcccgagattcgggctgtagtagatgcctgggcatcagtaaccgaggagctcggtgcgcagtacccgtgggtgcagatctttgagaataaaggggccatgatgggctgctcaaatcctcacccacattgtcaagtgtgggcatccagcttcctgcccgacatcgctcagagggaagagcggtcccagcaagcctataagtcacaacacggcgaacctttgctgatggagtattctcggcaggaacttctccgaaaagagcggctggtgctcacatcagaacactggttggttctcgtccccttttgggctacgtggccataccaaacgctgctgctgcctcggcggcacgttcgaagactgccggagctcactccagccgaacgcgacgatctcgcctctattatgaagaagctgctcacaaagtacgataacctgtttgagactagctttccctactccatggggtggcacggcgcccctacaggaagtgaggctggtgccaactggaaccactggcagctccacgcacattactatccacccctcctgcggtctgcgacggttagaaagttcatggttgggtacgagatgctggcgcaagcccaaagagacctgacacccgagcaggccgcagagagactgagagctctgccagaagtgcactaccatttgggacagaaagacagagaaactgctacaattgcc

SEQ ID NO: 3333 - DNA, 1137 bp, Artificial Sequence
  derived and/or modified sequence
atgtctagatcagggaccgaccctcagcagagacaacaggcttctgaagccgacgccgccgccgcaacctttcgcgctaatgatcaccaacatatacggtataaccccctacaggacgagtgggtgttagtgtcagcccatcgaatgaaaaggccttggcagggccaggtggagcctcagctgctgaaaacagtcccaagacacgaccctctgaatcccctctgccctggtgcaattagggcaaatggagaggtgaaccctcagtacgatagcaccttcctgtttgacaacgattttcccgcactgcagcccgacgccccttctccaggaccctcagaccaccctctgtttcaagcaaaatctgctagaggcgtttgcaaagttatgtgctttcacccatggagtgatgttaccctgcccctgatgtctgtgcccgaaatccgagccgtggttgacgcctgggcctccgttactgaagagctgggggcccagtatccatgggtgcaaatctttgaaaacaaaggcgctatgatgggctgcagcaatccccaccctcactgccaggtgtgggctagcagttttctacccgatatcgctcagcgagaggaaaggagccagcaggcatacaagtcccagcatggggaaccattactcatggagtatagtagacaggaactgcttaggaaggaacggctggtgctgacctccgaacattggctcgttctggtgcctttctgggccacatggccttatcagacactattgctgcctcgcagacatgtgcggcgcctccctgaactaactcccgccgaaagagacgatctggcctctatcatgaaaaagctgctgactaaatatgataacctgttcgagactagcttcccttattccatgggctggcatggcgcacctacaggcagcgaggctggtgcaaactggaaccactggcaacttcatgcacactactaccctcccttactgcgctctgcaacagtcagaaagttcatggtgggctatgaaatgctcgcccaggctcagcgggatttaacccctgaacaggctgcagagcgactcagagcactacccgaagtgcactaccacctgggtcagaaggatagggagaccgcaaccatcgct

SEQ ID NO: 3334 - DNA, 1137 bp, Artificial Sequence
  derived and/or modified sequence
atgtccagaagtggcaccgatcctcaacagagacagcaggcctcagaggcagatgcggctgcagctactttcagagctaacgaccatcagcacatacgttacaatccactgcaggacgaatgggtcctcgtttcagctcatagaatgaagaggccgtggcagggccaagtggagccacagctacttaaaacagttcctcggcacgatccactgaatccgctttgccccggggccatccgcgctaacggcgaggttaatcctcagtacgattccacatttctcttcgataacgattttcccgcattacaacctgatgcccctagccccggacccagtgatcacccactcttccaggcaaaatctgcaagaggtgtgtgcaaggtgatgtgctttcacccctggagtgacgtcacactgccgctgatgtctgtgcccgaaatcagggcagtcgtggatgcatgggctagcgtgaccgaggaactgggcgctcaatacccctgggttcagatcttcgagaataagggcgcgatgatggggtgttctaaccctcatcctcactgccaagtttgggcttcaagtttcctgcctgatatcgctcaaagggaagaaaggagtcagcaggcctataagagccagcacggggaacccctcctcatggaatatagtagacaggaactgctaagaaaggaaaggctcgtcctaacaagtgaacactggctggtgttagtccccttctgggccacatggccttaccagaccttattgctccctaggcgtcatgtgagacggctgcccgaacttaccccagctgagcgagacgatctagcaagcatcatgaaaaagctattgaccaaatacgataacctgtttgagacgtctttcccatactccatgggttggcacggcgccccaacaggctccgaagctggagcaaattggaaccactggcagctccatgcccattattatccccccctcttgcgatccgccacagtgcgcaagtttatggtgggatatgagatgctagcccaggcacagcgcgatttaacacccgaacaggctgccgagaggctcagggctctcccagaggtgcattaccatctggggcagaaggacagggaaacagccacgatcgca

SEQ ID NO: 3335 - DNA, 1137 bp, Artificial Sequence
  derived and/or modified sequence
atgtcacggtcaggaacagatcctcagcaacgccagcaggcctcagaagccgatgccgctgctgcgacattcagagcaaatgatcatcagcacatcaggtacaaccctcttcaggatgaatgggttttagtctcagcacaccgaatgaaaagaccttggcaggggcaggtggaaccacagcttctcaaaacagtcccccgacacgatcctcttaaccccctctgcccaggagctatcagagcaaatggggaagtaaacccacagtatgattcgacttttctctttgataatgattttccggcgttacagcccgatgctccttcccccggacccagtgatcatcccctcttccaggctaaatctgctcgaggggtgtgtaaggtgatgtgtttccatccctggtcggatgtgacattaccccttatgagtgtcccagaaatacgggccgtggtggatgcatgggcaagtgtgacagaagaattaggagcccagtatccttgggttcaaatatttgaaaacaaaggagctatgatggggtgctccaatccccatccccattgccaagtgtgggcctcttcttttcttcccgacatcgcccagcgggaagaacgctcacagcaggcctacaaaagtcagcacggagaaccactccttatggagtatagtcggcaggaactcttaaggaaagaacggcttgtcctgacatctgaacactggctagtgctcgttcctttctgggctacttggccttatcagactctccttctccccaggcgccatgtaaggcgcctacctgaactgactcccgcagaaagagatgatctagcctcaatcatgaaaaaactccttacaaaatatgataacctctttgaaacatcattcccatattctatgggatggcacggagcccctactgggtctgaagccggagcaaactggaaccactggcagttgcacgcacattactatcctccactcttgaggtctgcaactgtaaggaaatttatggtgggatacgaaatgttagcccaggcccagagagatctcacaccagagcaggccgcagaacggctaagagccctaccagaagtgcactaccatttggggcaaaaagatcgggagacagctacaattgcc

SEQ ID NO: 3336 - DNA, 1137 bp, Artificial Sequence
  derived and/or modified sequence
atgagccgtagtggcactgatcctcagcagcgtcagcaggccagtgaggctgatgccgcggcggcaacctttcgggcaaacgatcaccagcacattaggtacaaccccctccaggatgaatgggtgctcgtgtccgcccatagaatgaagcgcccttggcagggacaggtggaaccacaactgttgaaaacagtgccacggcacgatcctctgaatcccctctgtcccggcgccattcgagctaatggcgaagtgaaccctcagtatgactccactttcctattcgacaatgattttcctgccctgcagcccgatgccccatctcccggaccgtctgaccaccccctgttccaggccaagtcggcccggggggtgtgcaaggtgatgtgcttccatccttggagtgatgttacactaccactcatgagcgtacctgagattagagcggttgtcgacgcttgggccagcgtgactgaagaattgggcgctcagtatccatgggtgcagatctttgagaacaaaggcgcaatgatgggctgtagcaacccccacccacattgtcaagtatgggcttcttcctttttgccagacatcgctcagagagaagagcggtcgcagcaggcctataaatctcagcacggggagcctttgctgatggagtattcccggcaagagctcctacgcaaggaaaggctggtgttaacatcagaacactggctggtcttggtgcctttttgggcaacttggccctaccaaactctcctgctccccaggcgacacgtgcggagactgcccgagctgacaccagctgaaagggatgatctggcctcaattatgaagaagctgctcaccaaatatgacaacctgtttgaaactagcttcccatatagcatgggttggcatggcgcaccaacaggaagtgaagcgggcgctaactggaatcattggcagctgcacgcacattactatccccctctactacgctcggcgaccgttagaaagttcatggtcggttacgagatgcttgcccaggcacagcgagacctgacgcctgagcaggcagctgaaagactcagagctctgccggaggtgcactaccacttgggccagaaggatagggaaacggccacaatcgct

SEQ ID NO: 3337 - DNA, 1137 bp, Artificial Sequence
  derived and/or modified sequence
atgagcaggtccggcactgacccgcagcagcgccagcaggcctcagaagccgacgccgctgccgccaccttccgggctaatgaccatcagcacataaggtataacccattgcaggacgaatgggtgctggtgtccgcccatcggatgaaaaggccgtggcaagggcaggtcgaaccccagctgcttaagactgtgcctaggcatgaccctttaaacccactctgccccggagccatacgtgccaacggcgaagtgaacccccagtacgattctactttcttgttcgataacgattttcccgcgcttcagccagatgctcctagccctggtccctcagaccatcctctctttcaggccaaatcagcccgcggtgtgtgtaaggttatgtgttttcatccatggtctgacgtgaccctccctttgatgtctgtacccgaaatcagagccgtggttgacgcgtgggcctccgtgaccgaagagctgggagcacagtatccctgggtgcagatctttgaaaataaaggtgctatgatgggatgctccaacccacacccgcactgccaggtgtgggcttcatcctttctgcccgacatagcacaacgcgaggaacgctcgcagcaagcttataagtcccagcacggggagccgttgctgatggaatattctcgccaggaactgctcagaaaagagaggctcgtcctgactagcgagcactggctggtgttagtgccattctgggccacttggccataccagaccctcctgcttcctcgcagacacgtccgtcgactgcctgaactcacacccgcggagcgggacgacctggcatcaatcatgaagaagctgcttacaaagtatgacaacctgttcgaaacctcctttccatactcaatggggtggcacggcgcccccaccggctcagaggcgggggccaactggaaccactggcaactgcacgctcattactatccacctctcctcaggagtgccaccgttcgaaaattcatggtgggatacgaaatgttggctcaggcccaaagagatctgactcccgaacaggctgccgaacggctgagagccttgccagaagtgcactatcatttgggtcagaaggatagagaaactgcaactattgct

SEQ ID NO: 3338 - DNA, 1137 bp, Artificial Sequence
  derived and/or modified sequence
atgtccaggtcaggcacagaccctcaacagcgacaacaagcatccgaggcggatgctgccgctgcaacgtttcgagccaacgaccaccaacatattagatacaacccactgcaggatgagtgggtcctagtgtctgcacaccggatgaaacgtccctggcaggggcaggttgagccccagcttctaaaaaccgtgcccaggcacgaccccttgaatcccctgtgcccaggggccattagggccaacggcgaagtgaatccgcaatatgatagcacttttctgttcgataatgacttccctgctctgcaaccagatgccccatcccctggacctagcgatcatcccttattccaggctaaatcagcccgcggggtctgtaaggtgatgtgctttcatccctggtcagacgtgacactaccgttgatgtcagtgcccgaaattagggctgtagttgacgcttgggcatccgtgacagaagagctgggggcgcagtacccgtgggtgcagatctttgagaacaagggagcaatgatgggctgctctaatccccaccctcactgtcaggtttgggcctcatccttcctcccagatatagcccagcgggaggaaagaagtcagcaagcctataaaagtcaacatggtgagcctctgttaatggagtacagcaggcaggagctgctgcggaaggagagattagtcctgactagtgaacactggctcgttctcgttccattctgggccacctggccctatcaaactctactgttacctcggcggcacgtgcggagactcccggagttgacaccagcagagcgagatgatttggcctctataatgaaaaaattgttgaccaagtatgacaatcttttcgaaacatccttcccatatagcatgggctggcatggcgcaccaactggctcggaggccggagccaattggaatcactggcagctgcacgcacactattatcccccactattgagatctgcaacagtcaggaagttcatggtggggtatgaaatgctggctcaagcccagcgtgacctgaccccagagcaggccgcagagcggcttcgcgccctgccagaagttcattatcatttaggccagaaggacagggaaaccgccactatcgcc

SEQ ID NO: 3339 - DNA, 1137 bp, Artificial Sequence
  derived and/or modified sequence
atgtctcgaagcggcactgacccccagcagaggcaacaggccagcgaggcggatgcggcggctgcaacattccgcgcaaacgaccatcagcatatcaggtataaccccctgcaggatgaatgggtgcttgttagtgcgcatcggatgaagaggccttggcagggccaagtcgagccccagctgctgaaaaccgtgccacgacacgacccactgaaccccttgtgtccaggagcaatcagagctaatggagaggttaacccacagtacgactccaccttcctcttcgataacgatttcccagccctacagcccgacgcacccagtcccggcccatcagaccaccctctgttccaggcgaaatcggcgagaggggtgtgtaaagtaatgtgttttcatccctggagtgatgtaactcttccactgatgagtgtccctgagatccgcgccgttgtggacgcgtgggcatccgtaaccgaagagctgggggcccagtatccttgggttcagatttttgagaacaagggcgccatgatgggctgctccaatcctcatccacattgtcaagtttgggcgagttcattccttcctgacattgctcaaagggaggaacggtcccagcaggcgtataaatcacagcacggagagccacttttgatggagtacagtagacaggagctccttcggaaggagcggctagtgttaaccagtgaacactggttggtgcttgtgccgttctgggcaacttggccctaccagacccttctgctccctcgacggcacgttcgtagactgccggaactaactcctgctgaacgcgatgaccttgcgagtatcatgaaaaagctcttgacgaaatacgacaacctgttcgagactagttttccctattcgatgggctggcacggagccccaacaggctccgaagccggagcgaattggaaccactggcagctgcatgcgcactactatccacccctcctacggtccgccacagtacgaaagttcatggtcggctacgaaatgctggcacaggcacaacgggacctaacccccgaacaggccgctgaacgcctccgcgcgctacctgaggtccactatcacctcggccagaaggaccgagaaacagctacgatagct

SEQ ID NO: 3340 - DNA, 1137 bp, Artificial Sequence
  derived and/or modified sequence
atgtcaagatccggaaccgatccacaacagcgccagcaggcatcagaagccgacgccgccgctgctactttcagagccaatgaccaccagcatatccgctacaaccccctccaggatgaatgggtgcttgtctcagcccatcggatgaaaagaccttggcaggggcaggtcgaaccccaacttctgaaaactgttcccagacatgaccctctgaacccattgtgcccaggtgccattcgggcaaacggggaggtgaacccacagtacgattccactttcctttttgacaatgactttcccgctttgcagccagatgctccctctccgggtccttccgaccacccactttttcaggccaagtccgcacggggggtgtgtaaagtgatgtgctttcacccatggagtgatgtgaccttgcctttgatgtccgtgcctgagatccgggcggtggtggacgcctgggccagtgttaccgaagaactcggggcccagtatccctgggtccagatatttgagaacaaaggggctatgatgggctgcagcaatcctcacccccattgccaggtttgggccagctccttccttcctgacatcgcccagagggaggaaaggtctcagcaggcatataaatcccagcatggggagcctctgttgatggagtattctaggcaggaactgcttcggaaggaaaggctcgtgctgacttcagaacactggctcgtcctcgtgcccttttgggccacttggccatatcagacgctgctgctccctcggaggcacgttcggagacttcccgagttgactcctgccgaaagagatgatctggcaagtataatgaagaagctcttgactaagtatgataacctgtttgagacgtcctttccatatagtatggggtggcacggggctcccacgggctctgaagcgggcgctaactggaatcattggcagttgcatgcccattattaccccccattgctgcggagtgctactgtgagaaaatttatggttggatatgagatgctggcccaggcacagcgggatcttacaccagagcaggctgcagaacgactcagagctcttcccgaagtacattatcacctgggacaaaaagaccgggagacagctaccattgct

SEQ ID NO: 3341 - DNA, 1137 bp, Artificial Sequence
  derived and/or modified sequence
atgagtcggagcgggactgatccacagcagcgacagcaggcatcagaggctgacgcagcggcggcaactttcagagcaaatgaccaccagcatatcagatacaacccattgcaagacgagtgggtcctggtgagtgcacaccgaatgaagcgaccatggcaaggacaggtcgagcctcaactgctgaagacagttcccagacacgaccctctaaacccattatgtccgggcgcaatcagggccaatggtgaggtgaacccacagtacgacagcacgttcctgtttgacaatgacttccccgccctccaacctgatgccccttcccctggtccaagtgatcaccccctctttcaagcaaaatcggctcggggcgtgtgtaaagtgatgtgtttccatccgtggtctgacgtgacactcccactcatgtccgtcccagagattagagccgtggtggacgcttgggcgagtgtaaccgaagaactgggggcccagtatccctgggtgcagatcttcgagaataaaggggcgatgatgggatgctcaaacccccatccccactgccaggtgtgggcatccagttttttgcctgatattgcccagagagaggaacgctcccagcaggcatacaagagccagcacggcgagcccctgctcatggagtatagccgacaagagctactgagaaaggagaggctggtgctcacctctgagcattggctggttttagtgccattctgggccacttggccgtaccagacgctcttacttcccaggcggcacgtccggagactgccggagcttacccctgccgaacgcgacgatcttgcctctatcatgaaaaagcttttgacaaagtatgacaatttgttcgaaacatctttcccctatagcatgggctggcatggggcacccacaggctccgaagcgggcgcgaattggaaccattggcaattgcatgctcattattatcctcccctgcttaggagcgctaccgtaagaaagtttatggttggatacgaaatgctggcgcaggcgcaacgtgatctgacccctgagcaggccgcggaaagactacgcgcactgcctgaggtgcactaccatctgggtcagaaggatcgggagactgcaaccatcgcc

SEQ ID NO: 3342 - DNA, 1137 bp, Artificial Sequence
  derived and/or modified sequence
atgtcccgctccggtaccgaccctcagcaacgtcagcaagcttctgaagcggacgcagctgctgctaccttcagagcaaacgaccaccagcatattagatacaaccctctgcaggacgagtgggtgttggtgtccgcccaccgcatgaagagaccttggcagggccaggtggagcctcagctactcaagacagttcccagacatgatcctctcaaccccctttgcccgggagcaatacgagcaaatggggaggtgaacccgcaatatgattccacttttctcttcgacaacgacttccctgcattgcagcctgatgctccatcgcctgggccatcagatcatcccctgttccaagcgaagagcgccaggggtgtctgtaaggtgatgtgcttccacccctggtctgacgtcacccttccacttatgagcgtccctgagatacgtgccgtcgtcgacgcatgggcatccgttactgaggaactgggcgcccaatatccatgggttcagatttttgagaacaagggggcgatgatgggatgctctaatcctcacccgcattgccaagtgtgggcttctagctttttacccgatatcgctcagcgcgaggaaagatcgcagcaggcctacaagtcacaacacggcgagccactcctgatggaatactccaggcaggaactcctccgaaaggagagactggtcctgactagcgaacattggctggtgctggtgccgttctgggccacttggccgtaccagacattactccttccgcggcgtcacgtgcgccgcctacctgagctgacacctgctgagcgggacgacctcgcaagtattatgaagaaactgctgactaaatacgacaatctctttgaaaccagttttccctattctatgggctggcacggggcccccaccggctccgaagccggggctaattggaaccactggcagcttcacgcccactactaccctccactgctgaggtctgcaaccgtaaggaaattcatggtgggctacgaaatgcttgctcaagcacagcgagacctcacccctgaacaggctgcagaaaggctgcgtgctctccccgaagttcactaccaccttggccagaaagatcgcgagacagccacgatagct

SEQ ID NO: 3343 - DNA, 1137 bp, Artificial Sequence
  derived and/or modified sequence
atgagtcgatccggcacggacccccagcaaagacagcaggcctccgaagccgacgcagccgccgctacgttccgcgctaatgaccatcagcacatcaggtacaaccctctacaggatgaatgggtcttggtgagcgctcaccgcatgaaacgtccatggcaggggcaagtggagcctcagcttctgaaaaccgtgcccagacacgacccgctgaatcctctgtgcccaggtgccatacgcgcaaacggcgaagtcaatccccagtacgactccactttcttgtttgacaatgatttccccgccttgcagcccgacgcacccagtcccgggccttctgaccacccgctctttcaggctaagagcgcacggggcgtctgtaaggtaatgtgcttccacccctggtcagatgtaacactaccactcatgagtgtgcctgagattcgggcggtggtcgatgcttgggcaagcgtgacagaggagctcggcgctcaatacccttgggtgcagatcttcgaaaataaaggcgccatgatgggctgttctaatccacatcctcattgccaagtgtgggcaagttccttcctgcctgatattgcgcagcgcgaggagagaagtcaacaggcatataaatcacagcacggagaacccctgcttatggagtactcccgtcaggaactcttgcggaaggaacgcctcgtactgacctccgagcattggttggtccttgttccgttctgggcaacctggccttaccagacactgctgctacctcggcgtcatgtccggcgactccctgagctcacacccgcggaacgcgatgacctcgctagtattatgaagaaactgctcaccaaatacgacaatctctttgagacatcattcccctatagcatgggttggcacggcgcccctaccggtagcgaagcaggggccaactggaaccattggcaactgcatgctcactattatccgcctctgctgcggtccgccaccgtccgaaaatttatggtcgggtatgagatgctggctcaagctcaacgcgatttgactcccgaacaagcggcagaacgacttcgggcccttccagaagttcattaccatcttggacagaaagatcgcgaaacagccacgatcgca

SEQ ID NO: 3344 - DNA, 1137 bp, Artificial Sequence
  derived and/or modified sequence
atgtccaggtcaggaaccgacccacagcagcgccagcaagcctcagaggctgatgccgccgccgctacattccgggctaatgaccaccagcatattagatataaccctctgcaagatgaatgggtgttggtgagtgctcacagaatgaagcgcccatggcaaggtcaggtggagccccagctgctgaagacagtcccgcgacatgaccccctgaaccctctgtgtcccggcgctataagggccaacggagaagtgaacccgcagtatgactcaacttttctgttcgacaatgacttccccgcacttcagcccgacgctccatcgcctgggccctccgatcacccactttttcaggcaaagagcgcccgaggagtctgcaaggttatgtgctttcacccttggtctgatgttaccctccctctgatgtctgtccctgagatacgggctgtcgtagatgcctgggcctcggtaaccgaagaattgggtgcccagtatccctgggtccagatattcgaaaacaagggagctatgatgggatgctcgaacccacaccctcactgccaggtgtgggcgtcaagcttcctcccggatatagcccagagagaggagaggagtcagcaggcatacaaaagtcagcacggcgagcctctgctgatggagtatagtagacaggaactgctccggaaggaacggctggtgctaacctcagagcactggctggtgcttgtgcccttctgggcaacctggccctatcagactctgctactcccaaggcggcatgtgagacgcctgcccgagctaacgcccgccgaacgggatgacctggcaagtatcatgaagaagctcttaactaaatacgataatttattcgaaacctctttcccgtactccatggggtggcacggagcccccaccggttccgaagccggagctaactggaaccactggcagttacacgcccattactatccccctctgctgagatccgcgaccgtgaggaaattcatggtcggttatgagatgctcgctcaggcacagagagaccttacacctgagcaggcagccgaaaggctgagggccctacccgaagtgcactaccacctgggtcagaaagaccgcgagactgcaaccatcgcg

SEQ ID NO: 3345 - DNA, 1137 bp, Artificial Sequence
  derived and/or modified sequence
atgtccagatctgggacagatccgcagcaacgccagcaggcaagcgaggctgacgcggctgctgctacattcagagccaatgaccaccagcatatccggtataacccgctccaggatgagtgggtgttggtctctgctcatcggatgaaacgcccttggcagggccaggttgaaccccagttactcaagaccgtgcctaggcacgaccctcttaaccctctgtgtcccggagcgattcgcgcgaatggggaggttaacccacagtacgatagcacattcctgttcgacaatgatttcccagccctccagcccgacgccccatcacccgggccatcagaccatcctctgtttcaggccaaaagtgctagaggcgtttgcaaagtgatgtgcttccatccttggtccgatgttaccttaccactcatgtcagtgcctgaaatcagggctgtggtggatgcatgggcttccgttaccgaggaactgggcgctcagtatccttgggtccaaatatttgaaaataagggcgccatgatgggttgctcaaatccacacccgcattgtcaggtctgggcgtccagctttttgccagacatcgcccagcgcgaagagaggagtcagcaggcctataagagtcagcatggcgagccattactgatggagtactctcgccaggagttgttaaggaaagagcggctggtgctcacctcagagcattggctcgtgctggtgccgttttgggcgacttggccctaccagactctccttctcccgcgtagacatgtgaggcgtctacccgagctgacccctgcggaacgtgatgatttggcgagtattatgaaaaaactgctcacaaagtatgataatctcttcgaaacaagtttcccctactctatgggctggcacggcgctcccactggatcagaggctggagcaaattggaaccattggcagttgcacgcgcactactaccctcccttgctgcgttcggctacagttaggaagttcatggttggctatgagatgctcgcacaagcgcaacgggatctcacgcccgagcaggcggcagaacgactgagagccttgccagaggttcattaccatctcggtcaaaaagaccgggagactgccaccatagct

SEQ ID NO: 3346 - DNA, 1137 bp, Artificial Sequence
  derived and/or modified sequence
atgagtaggagcggcaccgaccctcagcagagacaacaagcctctgaagccgatgccgcagctgccacctttagagctaacgatcaccaacatatccgctataacccgctgcaggatgagtgggtgctcgtgtcagcccataggatgaagcgaccctggcaaggccaagtggagccgcaactgcttaagaccgtcccgagacatgatcctttgaatcccctgtgccccggagctatcagagctaacggcgaggtgaacccacagtacgatagcaccttcctgttcgataatgatttcccagccctgcagcccgacgcccccagccccggcccgagcgatcatccccttttccaggcaaaaagcgctcggggagtgtgcaaagtaatgtgcttccacccttggagcgatgttaccctccctcttatgtcagtgccagaaatccgcgcagtggtggacgcatgggcatcagttacggaggagctcggagcacaatatccctgggtacaaatctttgagaacaagggagctatgatgggctgcagtaacccccatccccactgtcaagtctgggcgagtagtttcttaccagacatcgcacagcgcgaagaaaggagccagcaagcatataagtcacagcatggggagccgttgttaatggaatatagcaggcaggagctgcttcgtaaggaaaggttggttcttacctctgagcactggctggtccttgtgccattctgggctacgtggccataccagacacttttgctgccgcggcggcacgtaaggaggttgcccgaacttaccccagctgaacgcgatgatctcgcgtcgatcatgaaaaagctcttaactaagtacgataacctgtttgaaacgagtttcccttacagtatgggctggcacggtgccccaaccggctcagaggccggagcaaattggaatcactggcagctgcatgctcattactaccccccactgctgcgtagtgccacagtcagaaaattcatggtggggtacgagatgctagcacaggcccagcgtgacttgacgcctgaacaggctgcagaacgcctcagggcgcttcctgaagtgcactatcacctcggacagaaggaccgtgagaccgcaaccatcgca

SEQ ID NO: 3347 - DNA, 1137 bp, Artificial Sequence
  derived and/or modified sequence
atgtcaaggtcagggacagacccgcagcagcggcagcaggccagtgaggcagacgccgccgctgcaacgtttcgagctaacgaccatcagcacataaggtacaaccctcttcaggacgagtgggttcttgtgtctgcccacagaatgaagcgaccttggcagggtcaggttgaaccacaactgctgaagacagtcccccgccacgaccctctgaatccactgtgcccaggtgctattcgtgccaacggggaggtaaatcctcagtatgactccacgtttctcttcgataacgactttcccgcgctgcagccagatgccccgagcccgggcccgtctgatcaccccctcttccaggcgaagtccgccagaggtgtctgcaaggtgatgtgcttccacccgtggtcggacgtgacactgccacttatgtccgtcccagaaatacgggccgtcgttgacgcctgggcgagcgtcacagaggaattgggtgcccaatatccgtgggtgcagatctttgaaaacaaaggtgccatgatgggatgctccaatcctcacccacattgccaggtgtgggccagtagtttcctacctgatatcgctcagcgagaagagaggagccagcaagcctacaaatctcagcacggggagcctctattaatggagtactcacggcaggaactgcttcgaaaggaacgcctcgtgctgacttcagagcattggctggttttagtgcccttttgggcgacctggccctaccagacactcctgttgcctcgccgccacgtgcgccgactacccgagctaactccggccgagcgggacgatcttgcgtcaattatgaaaaagctgctgactaagtacgataacctgtttgagacatcattcccttactcgatggggtggcatggggctccaactggaagcgaagcaggtgcaaattggaatcattggcagctccatgctcattattacccccctcttctgagatccgctaccgtgcgtaagtttatggtgggatacgaaatgttggctcaggcacagcgggatttgacccccgaacaggctgccgagcgattgcgagccctccccgaagtacattatcacctggggcagaaagatagggagacggccaccatcgcc

SEQ ID NO: 3348 - DNA, 1137 bp, Artificial Sequence
  derived and/or modified sequence
atgagcagaagcgggaccgatccacaacagcggcagcaggcatctgaagcagatgctgccgctgcaacattccgcgcaaatgatcatcagcatatccgctacaatcctttgcaggacgagtgggtcctggtatccgctcaccggatgaagagaccttggcaaggccaggtggagccacagctcctgaagactgtgccacgacatgatcctctcaacccgctgtgtcccggggctatccgggcgaatggtgaggtgaatccacagtacgacagcacattcctgttcgacaatgacttccctgctttacagccggacgcaccatccccgggtcccagcgatcatccgttattccaggccaaatctgcccgtggagtgtgcaaggtcatgtgcttccacccctggagcgatgtgaccctgcccctgatgagcgtacccgagatccgcgcagttgtcgacgcttgggcatccgtcactgaggagttgggcgcgcagtatccttgggtgcagatttttgagaataagggtgccatgatgggctgtagcaacccccatcctcattgccaggtgtgggcttcttcattcctgccagacatagctcagagagaggaaagaagccagcaagcttacaaatcccagcatggggaacccctgctgatggaatacagtagacaggagctcctgcggaaggagagactggtgctgacatccgagcactggcttgtgctggtccccttctgggctacatggccataccagactctgctgctgcctagacgtcatgtaagaagattgccggagctgacacctgccgagcgagacgatttggcctctattatgaaaaagctgctgacaaagtatgataacttgtttgagacatctttcccttacagcatggggtggcacggagctccaactggcagcgaggctggggcaaattggaatcactggcagctccacgcgcactactatcctccattactgaggtctgctacggtgaggaagtttatggtgggatatgagatgctggcccaagctcagcgggatctgactcctgaacaggctgctgaaaggctgagggcgctgcccgaagttcactaccacctgggacagaaagatagggaaacagccacgattgct

SEQ ID NO: 3349 - DNA, 1137 bp, Artificial Sequence
  derived and/or modified sequence
atgagcaggagcggcacagatccacagcagcgccagcaagccagcgaggccgacgctgccgcagctacatttcgggctaacgaccatcagcacatcagatacaatccgttgcaggacgaatgggtcctggtttcggcgcaccggatgaaaagaccctggcaaggccaggtggagccacagctccttaaaaccgttccgaggcacgaccccttgaacccgctgtgtcccggcgctattcgggccaacggtgaagtgaatccgcagtatgattcaactttcttgttcgataatgacttcccagcactacaaccagatgccccatctcccggtccaagcgatcaccctctgtttcaggccaaaagcgcgcggggagtctgcaaggtaatgtgcttccatccatggtcggacgtcacgttgccgctaatgagcgtgcccgagattagagccgtggtggacgcatgggcgagtgttactgaagagctgggcgcacagtacccgtgggtgcagatattcgagaataagggagccatgatgggctgttcgaatcctcacccacactgtcaagtgtgggcatctagctttctgcctgacattgctcagcgagaggaacgctcccagcaagcctataagagccagcatggagaacccctcctcatggaatactctagacaagaactgctccggaaggagcgcctcgttttaacttccgagcactggctcgtattggtccctttctgggccacgtggccctatcaaacgctgctgctaccgaggagacacgtacgcagactgcctgagctgacaccagctgagcgcgatgacctggccagcattatgaaaaagctgctcacgaaatatgacaaccttttcgaaacctccttcccttatagcatgggatggcatggtgcccccaccggaagcgaggcaggcgccaactggaatcactggcaattacacgcccattactaccccccacttctgcgatcggcaacagtgaggaagtttatggtgggctacgagatgctcgcacaggcacaaagggatctgacaccagaacaggccgcagagcgtctgagggcactgccagaggttcactaccatcttgggcaaaaagaccgcgagacagctacaatcgcg

SEQ ID NO: 3350 - DNA, 1137 bp, Artificial Sequence
  derived and/or modified sequence
atgtcaagatctggaactgatccacagcagcgtcagcaggctagtgaagccgacgctgccgccgccactttccgcgctaatgaccatcaacacatacggtataatccattacaagacgaatgggtgctcgtgtccgctcaccgaatgaagagaccgtggcagggccaggtggaacctcagctcctcaaaacagtcccacgccatgatcctctgaatcccctgtgtcctggcgccatcagagcaaacggcgaggtgaaccctcaatatgattcgacttttttgttcgacaacgactttccagcccttcagcctgatgccccaagccctggcccttccgatcatcccctatttcaggcaaaatctgcccggggagtttgcaaagttatgtgtttccacccttggtcagacgtcactctccctcttatgtcagtgcccgagataagagccgtggtcgacgcgtgggccagcgttacagaagaactgggcgctcaatacccttgggtgcagattttcgaaaacaaaggagccatgatggggtgttcaaatccccatccgcactgtcaggtgtgggcctccagttttttacctgacatcgcccagagagaagagagatcgcagcaagcatacaagagccagcacggagagcccctcttgatggagtactcccgacaagaactgctaagaaaggaacgcctcgtattgaccagtgagcactggctggtgctcgtaccattctgggccacctggccatatcagaccctgctgctgccaaggcggcacgtccgcagactgcccgaactgacgccggcagagagggatgacctggcctcaatcatgaaaaagctgctgactaagtacgacaatctgttcgagacatcattcccttactcaatgggatggcatggcgcccccacaggtagtgaggctggagctaattggaatcattggcagctccacgcacactattatcccccactgctgaggtccgcaacggtgcgcaagtttatggtgggttacgagatgctggctcaagcacagcgagatctgactcctgagcaagcggccgaaaggttaagggctctccccgaggtccactatcatcttggacagaaggacagagagacggctacaattgcc

SEQ ID NO: 3351 - DNA, 1137 bp, Artificial Sequence
  derived and/or modified sequence
atgtcacgctccggtacagatcctcagcaaagacaacaggctagtgaagctgacgctgccgccgccacctttagggccaatgaccaccaacatatcagatataaccccttgcaggatgagtgggtgcttgttagcgctcacaggatgaaacgcccttggcagggccaggtggagccgcaactgctgaagacagtaccgcgccacgacccgctgaacccactctgccccggagccatacgcgccaacggtgaggtcaatcctcagtacgacagtacatttctctttgacaacgattttcccgcgttgcagcctgacgccccatccccaggtccttctgaccacccattgttccaagccaagtcagcccgcggtgtgtgtaaggtgatgtgctttcatccttggtctgatgtcacgttgcctctcatgagtgtccccgagattagagctgtggtggatgcgtgggcctccgtgaccgaagaactgggtgctcaatatccatgggtgcaaatcttcgagaacaagggagccatgatgggttgctcaaacccacatccccattgccaggtttgggcttcctcatttcttccagacattgcccagagggaggaaagatcccaacaggcgtacaaatcacagcatggcgagcccctcctcatggaatactctaggcaagagttgcttagaaaggagcgcctcgtgctgacatctgagcactggctggtcttggtccccttttgggctacatggccgtaccaaactctgctgctgccacgcagacacgtaagacgcctccctgagctcaccccagccgaaagggatgaccttgcttctatcatgaagaagttgctgactaagtatgacaatctctttgagacttccttcccatacagcatgggctggcacggtgcgccaacgggatcagaggctggcgctaattggaatcattggcagttgcatgcccattattaccctcccctccttagaagcgctaccgtaaggaaattcatggttggatatgaaatgctggcacaggcccagagggacctgactcccgagcaagcggctgagaggctcagggcattgcctgaagtacactatcacctgggtcaaaaggacagagaaacagctactatagct

SEQ ID NO: 3352 - DNA, 1137 bp, Artificial Sequence
  derived and/or modified sequence
atgtcacggtctggcaccgatccccaacagcgccagcaagcttccgaggcagacgccgctgcagctacattccgtgcaaacgaccaccagcatatcagatacaacccactgcaggatgagtgggtgctggtgagtgcacaccggatgaagagaccctggcagggacaggtcgagccacagttacttaagactgttccaagacacgaccctctcaacccactatgtcccggggcaatcagggccaatggcgaggtgaatccccagtatgattcaacctttctttttgacaacgacttccccgccctgcagcctgatgcaccctcccctggccccagcgatcatcctctcttccaggctaaatccgccaggggagtgtgtaaagtgatgtgcttccatccgtggtcagatgttactctgccactcatgtctgtccctgagatcagagcagtggttgatgcatgggcctcggtgactgaagaactgggcgcacagtatccctgggtccagatttttgagaataaaggggccatgatggggtgttctaatccccatccacactgtcaagtgtgggcgtctagttttctcccggatatcgctcagagagaagaacgctctcaacaagcttacaaatcgcagcacggggagccactcctgatggaatactcccgccaagagttgctgaggaaagagaggttggtgcttacctccgagcactggctcgtgctggttcctttctgggcgacgtggccatatcagacacttctcctcccccgcaggcatgtgcgacgtctgcccgaactcactcctgcggagagagacgacctagccagcatcatgaagaaattactaaccaaatatgacaacttgtttgagacttcctttccctattctatgggctggcacggagcacctactggctccgaggcgggagctaattggaatcactggcagttgcacgcccattattatccacccctgctgaggagtgctacggtgcgcaaatttatggtgggatacgagatgctggcgcaggctcaacgcgacctgacacccgagcaagccgccgagcgacttagggcgttgcctgaagttcactaccatctaggccagaaggatcgagaaactgccaccattgca

SEQ ID NO: 3353 - DNA, 1137 bp, Artificial Sequence
  derived and/or modified sequence
atgtcccgctcagggacagacccacagcagcgccagcaggcctctgaggcggacgcagctgcggctacctttcgtgctaacgaccaccagcacattcggtataatcccctgcaggacgagtgggtcctggtgtctgcgcatagaatgaagaggccttggcagggccaagtggagccgcagctcctgaagacagtacctcgccatgatcccttgaatcccttgtgccctggtgcaatcagagccaacggcgaggtcaatcctcagtacgatagcaccttcttgtttgataatgacttccccgcactgcagcccgacgccccctcacccggacccagcgaccatcctctgttccaggccaagagcgcccgaggggtgtgcaaggtcatgtgctttcatccctggagcgacgtcactctcccgctcatgtccgtccctgaaatccgggctgtcgtagatgcctgggcgtcagtcacagaagaactcggagctcaatatccatgggtccagatattcgaaaataagggggccatgatggggtgtagcaaccctcacccacattgccaggtgtgggctagttcattcctgcccgacatagcacaacgggaggagaggagccaacaggcctataagtctcagcatggcgagccgctcttgatggaatatagccggcaggagctccttaggaaggaacgcctcgtattaacgtctgagcattggctcgtgctggtccctttttgggccacttggccttatcagacactgctgctccccagacgtcacgtgaggcgcctgcccgagcttacccctgcggaaagagatgatctggcgtctatcatgaagaagctactgacaaagtatgacaacctgttcgagacctcttttccgtatagtatgggctggcacggggcccctactggaagtgaagccggagcaaattggaaccactggcagctgcacgctcactactatccccctctgctgcggagcgcaaccgtgcgcaaatttatggtaggatatgaaatgctcgcacaggcccagcgggacctgacacctgagcaggcagcggaaagactcagggcactgccggaagttcactaccacctaggacagaaagatcgtgagactgccaccatcgcc

SEQ ID NO: 3354 - DNA, 1137 bp, Artificial Sequence
  derived and/or modified sequence
atgtcccgttctgggaccgacccccagcaaaggcaacaggcatcagaagcagacgctgccgcggccacattccgagcaaatgatcaccagcatattcggtataacccacttcaggatgaatgggtactggtgtcggctcaccgcatgaagcgtccgtggcaaggtcaggtggaacctcagctgctcaagacggttccccggcacgacccacttaacccattgtgccccggagcaatccgagccaatggcgaggtgaatcctcagtacgactctacattcctgttcgataacgatttcccagcactgcaacccgacgccccttcccccggtccctccgatcaccccttatttcaggctaagtctgccaggggagtgtgtaaggtgatgtgctttcatccgtggtctgatgttaccctgcccctgatgtccgtgcccgagatccgtgctgtcgttgacgcatgggcttctgtgaccgaagaattgggcgcccagtatccttgggtccagatcttcgaaaacaagggcgcaatgatgggatgctccaacccccatccccattgtcaggtatgggctagttcctttctgcctgatatcgcacagcgagaggagcgcagtcagcaagcttataaaagccagcacggagagccactgcttatggaatatagtaggcaagagctccttcggaaggaacggttggtcctgacctcagaacactggctcgttctcgttccgttctgggccacttggccctatcagacgctgctgctaccaagaagacatgtgcgacgattgcccgagttgacacctgccgagcgagatgacctcgcctccattatgaaaaaactccttaccaaatatgataatctgtttgaaaccagcttcccgtattcaatgggatggcatggggccccgacagggtccgaagccggggctaactggaaccactggcagcttcatgcccactattatcctccactgctcagatctgcaaccgtgcgtaagttcatggtggggtatgagatgctggctcaagcacagcgagatttgactcccgagcaggcagcagaacgacttcgggctcttccagaggtgcattatcacctggggcagaaagaccgcgagaccgctactatcgct

SEQ ID NO: 3355 - DNA, 1137 bp, Artificial Sequence
  derived and/or modified sequence
atgtctcgcagtggaacagatccccaacagagacaacaggcaagtgaagcagatgccgcagctgcgacgttcagagcgaatgatcaccagcacatccgttacaacccactccaggacgagtgggtcttggtatctgctcaccgtatgaagagaccgtggcaaggccaagtggagccacagttgttaaagactgtgccacgccatgatcctcttaacccattgtgcccaggcgccataagagctaacggcgaagtgaatccacagtacgactcaacattcttattcgacaacgacttcccagccctgcagccggacgcaccatccccgggccccagcgaccacccgctgttccaagccaaatctgcccgtggggtgtgcaaagttatgtgcttccatccctggtctgatgtaacactccctttaatgtctgtgccagagattcgggcagtagtcgacgcctgggccagcgtcacagaggagctcggcgcgcagtacccgtgggtccagatttttgaaaataaaggggcaatgatgggctgttccaatccgcaccctcactgtcaggtgtgggcttcctccttcttaccagatattgctcagagagaggaacgttcacagcaagcatataagtcccagcatggagaaccactgcttatggaatactcaaggcaggagttacttcggaaggaaaggctcgttctaaccagcgaacactggctggttttggttccattctgggccacgtggccttaccagactcttctgttaccacggaggcacgtccgccggttgcctgaattgactccggccgagagggatgatctcgcttctatcatgaagaagttgcttacgaagtacgacaacctattcgaaacaagctttccttatagcatggggtggcacggagctcccacggggtctgaggccggcgcaaattggaaccactggcaactgcacgcacattattaccctcctttgctccggtctgctaccgtgaggaagtttatggtagggtacgagatgttggcacaggcacagagggacctgacaccggaacaggcagccgagcgcctgagggccctgccggaagtccactatcaccttggacagaaggatcgggaaaccgccacaatcgcc

SEQ ID NO: 3356 - DNA, 1137 bp, Artificial Sequence
  derived and/or modified sequence
atgtccagatccggaacggacccacagcagagacagcaagcctcggaggcggacgccgccgccgcgacttttcgcgccaacgatcatcagcatatacgttataaccccctacaggacgagtgggtgctcgtgtccgcccatcgcatgaagaggccctggcagggacaagtagaaccccagttactgaaaaccgtaccccgccatgacccactcaacccactgtgccccggtgccataagagccaatggcgaagtgaatccccagtatgattccactttcctcttcgacaatgatttccctgcgctacagcccgacgccccttctcccgggccttccgatcatcctctgttccaggctaagtctgccagaggagtgtgtaaagtcatgtgctttcatccgtggtctgacgtcaccttgcctcttatgagcgtgccagaaatacgcgctgtggtggacgcctgggcaagtgtcaccgaagaattgggggcccaatatccatgggtgcagatcttcgagaataaaggcgcaatgatggggtgcagcaacccacacccacattgccaggtatgggcttcctcctttttgcccgatatcgctcaaagggaagagcggtcgcaacaagcttacaagtctcagcacggcgaaccgttactgatggaatactcgcgtcaggagttactgcgcaaagagcgcttggtgctcacctccgaacactggctagtgttggtgcctttctgggcgacttggccctaccagaccctccttctgcctcgccgacatgtcaggagactccccgagctgactcccgcagagcgggacgatctggcctctattatgaaaaagttactgacaaagtacgataacctctttgagaccagcttcccttattctatgggctggcacggagcccccaccggaagcgaggcaggagctaactggaaccattggcagcttcatgcccactactacccacccttgctacggagtgctaccgtgagaaagtttatggtgggctatgagatgcttgcacaggcacagcgagacttaacacccgagcaggcggcagagcgcttgcgcgccctgcctgaggtgcactatcatctcggccagaaagatagggaaacagctacaatagct

SEQ ID NO: 3357 - DNA, 1140 bp, Artificial Sequence
  derived and/or modified sequence
atgagcagaagcggcaccgacccccagcagagacagcaggccagcgaggccgacgccgccgccgccaccttcagagccaacgaccaccagcacatcagatacaaccccctgcaggacgagtgggtgctggtgagcgcccacagaatgaagagaccctggcagggccaggtggagccccagctgctgaagaccgtgcccagacacgaccccctgaaccccctgtgccccggcgccatcagagccaacggcgaggtgaacccccagtacgacagcaccttcctgttcgacaacgacttccccgccctgcagcccgacgcccccagccccggccccagcgaccaccccctgttccaggccaagagcgccagaggcgtgtgcaaggtgatgtgcttccacccctggagcgacgtgaccctgcccctgatgagcgtgcccgagatcagagccgtggtggacgcctgggccagcgtgaccgaggagctgggcgcccagtacccctgggtgcagatcttcgagaacaagggcgccatgatgggctgcagcaacccccacccccactgccaggtgtgggccagcagcttcctgcccgacatcgcccagagagaggagagaagccagcaggcctacaagagccagcacggcgagcccctgctgatggagtacagcagacaggagctgctgagaaaggagagactggtgctgaccagcgagcactggctggtgctggtgcccttctgggccacctggccctaccagaccctgctgctgcccagaagacacgtgagaagactgcccgagctgacccccgccgagagagacgacctggccagcatcatgaagaagctgctgaccaagtacgacaacctgttcgagaccagcttcccctacagcatgggctggcacggcgcccccaccggcagcgaggccggcgccaactggaaccactggcagctgcacgcccactactacccccccctgctgagaagcgccaccgtgagaaagttcatggtgggctacgagatgctggcccaggcccagagagacctgacccccgagcaggccgccgagagactgagagccctgcccgaggtgcactaccacctgggccagaaggacagagagaccgccaccatcgcctag

SEQ ID NO: 3358 - DNA, 255 bp, Artificial Sequence
  derived and/or modified sequence
atgagcagaagcggcaccgacccccagcagagacagcaggccagcgaggccgacgccgccgccgccaccttcagagccaacgaccaccagcacatcagatacaaccccctgcaggacgagtgggtgctggtgagcgcccacagaatgaagagaccctggcagggccaggtggagccccagctgctgaagaccgtgcccagacacgaccccctgaaccccctgtgccccggcgccatcagagccaacggcgagtag

SEQ ID NO: 3359 - DNA, 1283 bp, Artificial Sequence
  derived and/or modified sequence
gggaaataagagagaaaagaagagtaagaagaaatataagagccaccatgtcgcggtcgggtaccgatccccagcagaggcagcaggcctccgaagcagatgcggctgccgcgacgttcagggccaacgaccaccaacacattcggtacaacccattgcaagacgagtgggtcttggtgtcggcccaccgcatgaaacggccctggcagggtcaggtggagccgcaactgcttaagacggtgccccgacatgatccgttgaacccactctgtccaggggcgatcagagctaatggagaagtgaatccgcagtatgacagcacatttttgtttgacaatgattttcccgcgttgcagcccgatgcacctagccccggaccttcggatcatccgctgtttcaggcaaagagcgctcggggcgtgtgcaaggtcatgtgcttccacccgtggtcggacgtcacattgcctcttatgtcggtccctgagattagggccgtggtggatgcatgggcctccgtcacggaggagctcggagcgcaatatccctgggtgcagattttcgagaacaaaggggccatgatggggtgttcaaatccacaccctcattgccaggtctgggcgtcctcattcctgcccgacatcgcacagagagaggagaggagccagcaggcgtacaaatcacagcacggggagcctctgcttatggaatactcacggcaggaactccttcgcaaggagagactcgtactgacatcagaacattggcttgtactggtacccttctgggcaacgtggccctaccagactctcttgcttccccgacgccacgtccgaaggttgccggagttgactccggcggagcgcgacgacttggcctcgatcatgaaaaagctccttacgaaatatgataatctctttgagacttccttcccgtactccatgggttggcatggagcgcccaccggatcggaagcaggggcgaactggaaccattggcagctccacgcgcactattatccgccgcttctccggtcggctacagtcagaaagttcatggtgggctacgaaatgctggcccaggcgcaaagggacctcacacccgaacaagcagctgaacgactgagagcgctgcctgaggtacactaccatctcggacaaaaggatcgcgaaaccgccacgatcgcatgataagctgccttctgcggggcttgccttctggccatgcccttcttctctcccttgcacctgtacctcttggtctttgaataaagcctgagtaggaag

SEQ ID NO: 3360 - DNA, 1140 bp, Artificial Sequence
  derived and/or modified sequence
atgagtaggagtggaaccgacccccagcagaggcagcaggcaagtgaagccgacgctgccgccgccacgtttcgggcaaacgaccatcagcacattagatataatcccctacaagatgaatgggtgcttgtctcagcccatcggatgaagcgaccctggcagggccaagtggagccacagctcctgaaaacggttccacggcacgacccccttaatccactgtgtcccggtgcgatccgggccaacggagaagttaaccctcagtacgacagtacatttctgttcgataatgactttcctgcactgcagcctgatgcaccaagccccggccccagtgatcacccactgtttcaggcaaagtcagcgcggggggtctgcaaggttatgtgcttccacccatggtctgatgtcaccctgcccctgatgtctgtccctgaaatcagagctgttgtcgacgcctgggctagtgtgactgaagaactaggcgcccagtatccttgggtgcagatattcgagaataagggtgcaatgatgggctgctctaacccacatccacactgccaggtgtgggcttcttcatttctgccagatattgcacagagggaggagcgatctcaacaggcgtacaagtctcagcacggagagcctctcctgatggaatattctcgccaggagctgttgagaaaagaacggctcgtgctgacttctgagcactggctcgtgttggtgccgttctgggctacctggccctatcagaccctgctgttaccccggcggcacgtcagacggctgccagaactaactcctgctgagcgggacgacctcgcctcgattatgaagaagctgctcaccaaatatgataatctgttcgaaacctctttcccttacagtatgggctggcatggggcccctaccggctctgaggccggggccaactggaatcattggcagttacacgcacactattacccacctttgcttaggagtgccaccgtccggaaattcatggtcgggtacgaaatgctggcacaggcgcagcgcgatctcacccctgaacaggctgccgagcgcctgcgtgctctgccagaagttcactatcatctcggacagaaggatagggaaactgccaccattgcctag

SEQ ID NO: 3361 - DNA, 255 bp, Artificial Sequence
  derived and/or modified sequence
atgagccgatcaggtacagatcctcagcaacggcagcaggcttccgaggctgatgccgcggcagccacctttagggctaacgatcatcaacacattaggtataatcccctgcaggacgaatgggtgctggtgtctgctcataggatgaagaggccatggcagggccaagtagagcctcagctgctcaagacagtcccacgccatgatcccctcaatccattgtgccctggtgccatcagggcgaatggcgagtag

SEQ ID NO: 3362 - DNA, 1140 bp, Artificial Sequence
  derived and/or modified sequence
atgagccgcagcggcacagacccccagcagaggcagcaggccagcgaggctgatgctgctgctgccaccttccgggccaatgaccaccagcacatccgctacaaccccctgcaggatgagtgggtgctggtgtctgcccacaggatgaagaggccctggcagggccaggtggagccccagctgctgaagacagtgcccaggcatgaccccctgaaccccctgtgccctggggccatccgggccaacggggaggtgaacccccagtatgacagcaccttcctgtttgacaatgacttccctgccctgcagccagatgcccccagccctggccccagcgaccaccccctcttccaggccaagagcgcccggggcgtgtgcaaggtgatgtgcttccacccctggagcgatgtgaccctgcccctgatgtctgtgcctgagatccgggctgtggtggatgcctgggcctctgtgacagaggagctgggcgcccagtacccctgggtgcagatctttgagaacaagggggccatgatgggctgcagcaacccccacccccactgccaggtgtgggccagcagcttcctgcctgacatcgcccagcgggaggagaggagccagcaggcctacaagagccagcacggggagcccctgctgatggagtacagccggcaggagctgctgaggaaggagcggctggtgctgaccagcgagcactggctggtgctggtgcccttctgggccacctggccctaccagaccctgctgctgccccggcggcacgtgcggcggctgcctgagctgaccccagctgagagagatgacctggccagcatcatgaagaagctgctgaccaagtatgacaacctgtttgagaccagcttcccctacagcatgggctggcatggagcccccactggaagtgaagctggggccaactggaaccactggcagctgcacgcccactactacccacccctgctgcggagcgccaccgtgaggaagttcatggtgggctatgagatgctggcccaggcccagagggacctgaccccagagcaggccgctgagcggctgcgggccctgcctgaggtgcactaccacctgggccagaaggaccgggagacagccaccatcgcctag

SEQ ID NO: 3363 - DNA, 255 bp, Artificial Sequence
  derived and/or modified sequence
atgagccgcagcggcacagacccccagcagaggcagcaggccagcgaggctgatgctgctgctgccaccttccgggccaatgaccaccagcacatccgctacaaccccctgcaggatgagtgggtgctggtgtctgcccacaggatgaagaggccctggcagggccaggtggagccccagctgctgaagacagtgcccaggcatgaccccctgaaccccctgtgccctggggccatccgggccaacggggagtag

SEQ ID NO: 3364 - DNA, 1140 bp, Artificial Sequence
  derived and/or modified sequence
atgagccggagcggcaccgacccccagcagcggcagcaggccagcgaagccgatgcagccgccgctacattcagagccaatgaccaccagcacattcgctacaaccctttgcaagacgagtgggtcctcgtgagcgctcacaggatgaaaaggccttggcaaggccaagtagagccccaactgctgaagacggtgcccaggcacgatccactgaaccccttgtgcccgggcgcaatcagggcgaatggcgaggtcaatccacagtacgactctacattcctattcgataacgattttcccgcgctgcagcccgacgccccgtccccagggccctcagatcatccactgtttcaggccaaatccgcccggggcgtctgcaaggttatgtgtttccatccttggtccgatgttactctccccctcatgagcgtcccagagattagagcggtggtggacgcttgggcgagtgtgaccgaagagttaggcgcccagtacccttgggtccaaattttcgagaacaaaggagccatgatggggtgcagcaatccccacccacattgccaggtttgggcttcctcatttctccctgatatcgctcagagggaggaaagatcccagcaggcttacaaatctcagcacggcgagcccctgctgatggaatacagcaggcaggaactgctgcggaaggagcgcctggttctcacttctgagcactggctggtactcgttcctttctgggcaacttggccctaccagactcttcttctgcctcgcaggcacgtacgacggttgcccgaattaacccccgccgagagagacgatttggcttccataatgaaaaaactactcacgaagtacgacaacctctttgagacaagcttcccctatagtatgggttggcacggggcccctacaggctctgaagctggagcgaactggaaccactggcaactccacgctcattattatccgcccctgctgcgaagtgctacggtgcggaaattcatggttggctacgaaatgctggctcaggcccagcgtgatctcactcccgaacaggcagccgagagattacgtgccctgccagaggttcattaccacctcgggcagaaggaccgggagacagcaactatcgcttag

SEQ ID NO: 3365 - DNA, 255 bp, Artificial Sequence
  derived and/or modified sequence
atgagccggagcggcaccgacccccagcagcggcagcaggccagcgaggctgatgccgccgccgccaccttccgcgccaacgatcatcagcacataaggtataatcctctgcaggatgaatgggttctggtaagcgcccacaggatgaagcgtccctggcaggggcaggtggagccgcagctacttaaaactgttcccaggcacgatcctctgaaccccctgtgtcctggggctattagagctaatggcgagtag

SEQ ID NO: 3366 - DNA, 1768 bp, Artificial Sequence
  derived and/or modified sequence
gcacggccctgcagattttccagcggatcccccggtggcctcatgtcgcgcagtggaaccgatcctcagcaacgccagcaggcgtcagaggcggacgccgcagcagcaaccttccgggcaaacgaccatcagcatatccgctacaacccgctgcaggatgagtgggtgctggtgtcagctcaccgcatgaagcggccctggcagggtcaagtggagccccagcttctgaagacagtgccccgccatgaccctctcaaccctctgtgtcctggggccatccgagccaacggagaggtgaatccccagtacgatagcaccttcctgtttgacaacgacttcccagctctgcagcctgatgcccccagtccaggacccagtgatcatccccttttccaagcaaagtctgctcgaggagtctgtaaggtcatgtgcttccacccctggtcggatgtaacgctgccactcatgtcggtccctgagatccgggctgttgttgatgcatgggcctcagtcacagaggagctgggtgcccagtacccttgggtgcagatctttgaaaacaaaggtgccatgatgggctgttctaacccccacccccactgccaggtatgggccagcagtttcctgccagatattgcccagcgtgaggagcgatctcagcaggcctataagagtcagcatggagagcccctgctaatggagtacagccgccaggagctactcaggaaggaacgtctggtcctaaccagtgagcactggttagtactggtccccttctgggcaacatggccctaccagacactgctgctgccccgtcggcatgtgcggcggctacctgagctgacccctgctgagcgtgatgatctagcctccatcatgaagaagctcttgaccaagtatgacaacctctttgagacgtcctttccctactccatgggctggcatggggctcccacaggatcagaggctggggccaactggaaccattggcagctgcacgctcattactaccctccgctcctgcgctctgccactgtccggaaattcatggttggctacgaaatgcttgctcaggctcagagggacctcacccctgagcaggctgcagagagactaagggcacttcctgaggttcattaccacctggggcagaaggacagggagacagcaaccatcgcctgaccacgccgaccacagggccttgaatccttttttgttttcaacagtcttgctgaattaagcagaaagggccttgaatcctggcctggaatttgggcagatatagcattaataaaactgtgcatctcaaacttttatcacatactctaatatcagaggagtgtgaaccttcagagatctagggttaaaagctaaaggcatagctccagctacaacttttctttgtctacagatgtgtaaaatcttgatgcaaaaatctaccccaaatttctgaacaaaattaatattcagtattatatctagcctatagattctcttactcttggtgtaatgacagcattcccagtttaggaaactgttttaaaatcttgtgtcttggttgtggctgaggctttgggaaggccagagccccctttgccaccacccctagggtgtcagctccaagcctgggcctgagggtttgatggggagcgggtgagctggatcctgatcccagtggtcagtggccagatcctgggctgctggccagaaccctggctttgtgagtggctgcagcttggctctgctccagcccacaggggctaaaggg

SEQ ID NO: 3367 - DNA, 1140 bp, Artificial Sequence
  derived and/or modified sequence
atgagcaggtccggcaccgacccccagcagaggcaacaagcttctgaggctgatgccgcagccgctacattccgagccaacgatcaccagcatatccgttataatccccttcaagatgaatgggttctggtatcagctcaccggatgaagcggccttggcagggccaagtcgagcctcagctcctcaaaacagtgcctcgtcacgacccccttaatcccctttgccccggagcgatacgggctaatggggaagtaaatcctcagtatgactccacatttcttttcgataatgattttcccgcacttcagcctgacgccccttcaccaggaccatccgaccatcctctgtttcaagccaagagtgctcggggtgtgtgtaaggttatgtgcttccatccttggtctgacgtgaccctccccttgatgtctgtgccagaaataagagcagtagtcgacgcctgggctagtgtgacggaagaacttggtgcacagtatccttgggttcagatttttgaaaataaaggcgcaatgatggggtgtagcaatccacacccccactgtcaggtttgggcctctagtttcctgcctgacatcgcccagagagaggagcgaagtcagcaggcctacaagtcgcaacacggtgaaccactccttatggaatatagtcgccaggagctgctcaggaaggagcgcctggtccttactagtgaacactggctggtcctcgtgccattttgggcaacatggccgtaccaaacgctgctgctgccaagacgccatgtgaggcgcctacctgaactcacacctgcagagcgggatgatctcgccagcatcatgaagaaattgctgaccaaatacgataacctttttgagacaagcttcccatattcaatgggttggcacggtgcccctactggaagcgaggcaggagccaattggaaccactggcagctgcatgctcactactatcctccactgttgaggtcagctactgtcagaaagttcatggtggggtacgaaatgctcgctcaggcccaaagggacctgacccctgagcaggcagccgagaggttgagggcattaccggaggttcactaccatttaggccagaaggaccgtgaaactgccactatcgcttag

SEQ ID NO: 3368 - DNA, 255 bp, Artificial Sequence
  derived and/or modified sequence
atgagcaggagcggaaccgatccccagcagagacagcaggcttcagaagcagacgctgctgcggcaacattcagggccaatgaccaccaacacattcgctataaccccttgcaggacgagtgggtgcttgtgtcagcgcacaggatgaagcggccatggcagggacaggtggagccccagcttctcaagacagtcccaaggcacgatccgctcaaccccctctgtcccggtgctatcagggccaacggagagtag

SEQ ID NO: 3369 - RNA, 1283 nt, Artificial Sequence
  derived and/or modified sequence
gggaaauaagagagaaaagaagaguaagaagaaauauaagagccaccaugucgcggucggguaccgauccccagcagaggcagcaggccuccgaagcagaugcggcugccgcgacguucagggccaacgaccaccaacacauucgguacaacccauugcaagacgagugggucuuggugucggcccaccgcaugaaacggcccuggcagggucagguggagccgcaacugcuuaagacggugccccgacaugauccguugaacccacucuguccaggggcgaucagagcuaauggagaagugaauccgcaguaugacagcacauuuuuguuugacaaugauuuucccgcguugcagcccgaugcaccuagccccggaccuucggaucauccgcuguuucaggcaaagagcgcucggggcgugugcaaggucaugugcuuccacccguggucggacgucacauugccucuuaugucggucccugagauuagggccgugguggaugcaugggccuccgucacggaggagcucggagcgcaauaucccugggugcagauuuucgagaacaaaggggccaugaugggguguucaaauccacacccucauugccaggucugggcguccucauuccugcccgacaucgcacagagagaggagaggagccagcaggcguacaaaucacagcacggggagccucugcuuauggaauacucacggcaggaacuccuucgcaaggagagacucguacugacaucagaacauuggcuuguacugguacccuucugggcaacguggcccuaccagacucucuugcuuccccgacgccacguccgaagguugccggaguugacuccggcggagcgcgacgacuuggccucgaucaugaaaaagcuccuuacgaaauaugauaaucucuuugagacuuccuucccguacuccauggguuggcauggagcgcccaccggaucggaagcaggggcgaacuggaaccauuggcagcuccacgcgcacuauuauccgccgcuucuccggucggcuacagucagaaaguucauggugggcuacgaaaugcuggcccaggcgcaaagggaccucacacccgaacaagcagcugaacgacugagagcgcugccugagguacacuaccaucucggacaaaaggaucgcgaaaccgccacgaucgcaugauaagcugccuucugcggggcuugccuucuggccaugcccuucuucucucccuugcaccuguaccucuuggucuuugaauaaagccugaguaggaag

SEQ ID NO: 3370 - protein, 236 aa, Artificial Sequence
  derived and/or modified sequence
MSAPSATPIFAPGENCSPAWGAAPAAYDAADTHLRILGKPVMERWETPYMHALAAAASSKGGRVLEVGFGMAIAASKVQEAPIDEHWIIECNDGVFQRLRDWAPRQTHKVIPLKGLWEDVAPTLPDGHFDGILYDTYPLSEETWHTHQFNFIKNHAFRLLKPGGVLTYCNLTSWGELMKSKYSDITIMFEETQVPALLEAGFRRENIRTEVMALVPPADCRYYAFPQMITPLVTKG

SEQ ID NO: 3371 - DNA, 711 bp, Artificial Sequence
  derived and/or modified sequence
atgtccgcaccttcagccactccaatcttcgctcccggagaaaattgctcaccagcctggggtgctgctccggctgcttacgatgcggccgacacccacctgaggatcctggggaagcccgtgatggaacgatgggagacaccatacatgcacgcacttgcagctgctgccagtagcaaaggaggacgggtgctggaagtcggattcggaatggcgattgccgctagcaaagtgcaggaagcgccgatcgacgagcattggattatagaatgcaacgatggagtcttccagcggcttcgagactgggctcctagacagacacacaaggttatcccgctcaaaggtctgtgggaggacgttgcacccaccttgcctgacggccacttcgatggtattctttacgatacctaccccctgagcgaagaaacatggcacacacatcagttcaacttcatcaagaaccatgcgttcaggttgttgaagcccggaggtgtgctcacctattgcaatttgacctcctggggagaactaatgaaaagcaagtattctgacattactataatgtttgaggagacccaggtgccagctttgctggaagctggttttcgtcgggaaaacatcagaaccgaggttatggctctcgtgcccccagctgactgcaggtactacgctttcccacagatgattacccctcttgttaccaaggggtag

SEQ ID NO: 3372 - DNA, 1057 bp, Artificial Sequence
  derived and/or modified sequence
ccccggcccacaagcccctgcagggagcgggcccgggcggcgcgcgatcgaggtcgggtcgccgtccagcctgcagcatgagcgcccccagcgcgacccccatcttcgcgcccggcgagaactgcagccccgcgtggggggcggcgcccgcggcctacgacgcagcggacacgcacctgcgcatcctgggcaagccggtgatggagcgctgggagaccccctatatgcacgcgctggccgccgccgcctcctccaaagggggccgggtcctggaggtgggctttggcatggccatcgcagcgtcaaaggtgcaggaggcgcccattgatgagcattggatcatcgagtgcaatgacggcgtcttccagcggctccgggactgggccccacggcagacacacaaggtcatccccttgaaaggcctgtgggaggatgtggcacccaccctgcctgacggtcactttgatgggatcctgtacgacacgtacccactctcggaggagacctggcacacacaccagttcaacttcatcaagaaccacgcctttcgcctgctgaagccggggggcgtcctcacctactgcaacctcacctcctggggggagctgatgaagtccaagtactcagacatcaccatcatgtttgaggagacgcaggtgcccgcgctgctggaggccggcttccggagggagaacatccgtacggaggtgatggcgctggtcccaccggccgactgccgctactacgccttcccacagatgatcacgcccctggtgaccaaaggctgagcccccaccccggcccggccacacccatgccctcctccgtgccttcctggccgggagtccagggtgtcgcaccagccctgggctgatcccagctgtgtgtcaccagaagctttcccggcttctctgtgaggggtcccaccagcccagggctgatcccagctgtgtgtcaccagcagctttcccagcttctctgtgagggtcactgctgcccactgcagggtccctgaggtgaagtaaacgccggcgctgggcttggccagtcggcagtg

SEQ ID NO: 3373 - DNA, 711 bp, Artificial Sequence
  derived and/or modified sequence
atgtctgcccccagcgccacccccatctttgcccctggagagaactgcagccctgcctggggcgccgccccagctgcctatgatgctgctgacacccacctgcgcatcctgggcaagcctgtgatggagcgctgggagaccccctacatgcacgccctggccgccgccgccagcagcaagggcggccgggtgctggaggtgggcttcggcatggccatcgccgccagcaaggtgcaggaggcccccattgatgagcactggatcatcgagtgcaatgatggagtcttccagaggctgcgggactgggccccccggcagacccacaaggtgatccccctgaagggcctgtgggaggatgtggcccccaccctgcctgatggccactttgatggcatcctgtatgacacctaccccctgtctgaggagacctggcacacccaccagttcaacttcatcaagaaccacgccttccggctgctgaagccaggcggcgtgctgacctactgcaacctgacctcctggggcgagctgatgaagagcaagtacagcgacatcaccatcatgtttgaggagacccaggtgcctgccctgctggaggccggcttcagaagagagaacatcagaacagaggtgatggccctggtgcccccagctgactgccgctactatgccttcccccagatgatcacccccctggtgaccaagggctag

SEQ ID NO: 3374 - DNA, 711 bp, Artificial Sequence
  derived and/or modified sequence
atgagcgcccccagcgccacccccatcttcgcccccggcgagaactgttcccccgcctggggcgcggccccggcagcctacgatgctgccgacacgcacttgcgcattctgggcaagcccgttatggagaggtgggagactccatatatgcatgccttagccgctgctgcgagtagtaagggaggaagagtgttggaggttgggtttggcatggcgatcgctgcgagcaaggtgcaagaggcccccatagacgaacattggattatcgaatgtaacgacggcgtattccagagactgcgggattgggcacccaggcaaacgcacaaagtaatacctcttaaaggactctgggaggacgtggcgccaaccctgcccgatggccattttgacggtatactctacgatacatatcctttgtccgaagaaacctggcacacgcaccagttcaatttcataaaaaatcacgcctttaggctgttgaagccagggggggtgctaacttactgtaatctgacttcttggggggagctgatgaaatccaagtactctgacatcacaatcatgttcgaagagacccaggtcccagcactcttggaagccggtttccgtagggaaaatattcgcacagaagtgatggccttggtgccgccagcagattgccggtattacgcatttcctcagatgataacgcctctggtgacaaaaggttag

SEQ ID NO: 3375 - DNA, 711 bp, Artificial Sequence
  derived and/or modified sequence
atgtctgcaccctctgccaccccaatattcgctccaggggagaattgcagccccgcttggggggcagctccagcagcctatgacgccgctgatacccacctgagaattcttggtaaacccgtcatggaacggtgggagacaccttacatgcatgctctcgccgctgctgcgagttccaaggggggaagggtgctcgaagttgggttcggcatggcaatcgccgcatctaaggttcaggaagcacccatcgatgaacattggattatcgaatgcaatgacggcgtgtttcagcgcctcagagattgggctccccgacagacacataaggtcattcccttaaagggtctgtgggaagatgtggcgcctaccctgcccgatggccatttcgatgggatcctgtacgatacttaccccctgtcagaagagacctggcacacccaccagtttaactttattaagaaccacgcctttagactccttaagcctggcggagtcctgacatattgcaacctcacatcctggggggagctcatgaagtcgaagtatagcgatatcaccattatgttcgaggagactcaggtgcctgcgcttctggaagccggttttcgtcgagaaaacattagaacggaggttatggccctggttccacctgccgattgccgttattacgccttccctcaaatgataactccactggtgacaaaaggctag

SEQ ID NO: 3376 - DNA, 711 bp, Artificial Sequence
  derived and/or modified sequence
atgagcgcccccagcgccacccccatcttcgcccccggcgagaactgcagccccgcctggggcgccgcccccgccgcctacgacgccgccgacacccacctgagaatcctgggcaagcccgtgatggagagatgggagaccccctacatgcacgccctggccgccgccgccagcagcaagggcggcagagtgctggaggtgggcttcggcatggccatcgccgccagcaaggtgcaggaggcccccatcgacgagcactggatcatcgagtgcaacgacggcgtgttccagagactgagagactgggcccccagacagacccacaaggtgatccccctgaagggcctgtgggaggacgtggcccccaccctgcccgacggccacttcgacggcatcctgtacgacacctaccccctgagcgaggagacctggcacacccaccagttcaacttcatcaagaaccacgccttcagactgctgaagcccggcggcgtgctgacctactgcaacctgaccagctggggcgagctgatgaagagcaagtacagcgacatcaccatcatgttcgaggagacccaggtgcccgccctgctggaggccggcttcagaagagagaacatcagaaccgaggtgatggccctggtgccccccgccgactgcagatactacgccttcccccagatgatcacccccctggtgaccaagggctag

SEQ ID NO: 3377 - protein, 753 aa, Artificial Sequence
  derived and/or modified sequence
RAPDRRGSPRLASTRLGALRLRPSRRVPARAPAPAQAPLPLGPRLLGLRRNMAAPMTPAARPEDYEAALNAALADVPELARLLEIDPYLKPYAVDFQRRYKQFSQILKNIGENEGGIDKFSRGYESFGVHRCADGGLYCKEWAPGAEGVFLTGDFNGWNPFSYPYKKLDYGKWELYIPPKQNKSVLVPHGSKLKVVITSKSGEILYRISPWAKYVVREGDNVNYDWIHWDPEHSYEFKHSRPKKPRSLRIYESHVGISSHEGKVASYKHFTCNVLPRIKGLGYNCIQLMAIMEHAYYASFGYQITSFFAASSRYGTPEELQELVDTAHSMGIIVLLDVVHSHASKNSADGLNMFDGTDSCYFHSGPRGTHDLWDSRLFAYSSWEILRFLLSNIRWWLEEYRFDGFRFDGVTSMLYHHHGVGQGFSGDYSEYFGLQVDEDALTYLMLANHLVHTLCPDSITIAEDVSGMPALCSPISQGGGGFDYRLAMAIPDKWIQLLKEFKDEDWNMGDIVYTLTNRRYLEKCIAYAESHDQALVGDKSLAFWLMDAEMYTNMSVLTPFTPVIDRGIQLHKMIRLITHGLGGEGYLNFMGNEFGHPEWLDFPRKGNNESYHYARRQFHLTDDDLLRYKFLNNFDRDMNRLEERYGWLAAPQAYVSEKHEGNKIIAFERAGLLFIFNFHPSKSYTDYRVGTALPGKFKIVLDSDAAEYGGHQRLDHSTDFFSEAFEHNGRPYSLLVYIPSRVALILQNVDLPN

SEQ ID NO: 3378 - protein, 702 aa, Artificial Sequence
  derived and/or modified sequence
MAAPMTPAARPEDYEAALNAALADVPELARLLEIDPYLKPYAVDFQRRYKQFSQILKNIGENEGGIDKFSRGYESFGVHRCADGGLYCKEWAPGAEGVFLTGDFNGWNPFSYPYKKLDYGKWELYIPPKQNKSVLVPHGSKLKVVITSKSGEILYRISPWAKYVVREGDNVNYDWIHWDPEHSYEFKHSRPKKPRSLRIYESHVGISSHEGKVASYKHFTCNVLPRIKGLGYNCIQLMAIMEHAYYASFGYQITSFFAASSRYGTPEELQELVDTAHSMGIIVLLDVVHSHASKNSADGLNMFDGTDSCYFHSGPRGTHDLWDSRLFAYSSWEILRFLLSNIRWWLEEYRFDGFRFDGVTSMLYHHHGVGQGFSGDYSEYFGLQVDEDALTYLMLANHLVHTLCPDSITIAEDVSGMPALCSPISQGGGGFDYRLAMAIPDKWIQLLKEFKDEDWNMGDIVYTLTNRRYLEKCIAYAESHDQALVGDKSLAFWLMDAEMYTNMSVLTPFTPVIDRGIQLHKMIRLITHGLGGEGYLNFMGNEFGHPEWLDFPRKGNNESYHYARRQFHLTDDDLLRYKFLNNFDRDMNRLEERYGWLAAPQAYVSEKHEGNKIIAFERAGLLFIFNFHPSKSYTDYRVGTALPGKFKIVLDSDAAEYGGHQRLDHSTDFFSEAFEHNGRPYSLLVYIPSRVALILQNVDLPN

SEQ ID NO: 3379 - protein, 465 aa, Artificial Sequence
  derived and/or modified sequence
MAIMEHAYYASFGYQITSFFAASSRYGTPEELQELVDTAHSMGIIVLLDVVHSHASKNSADGLNMFDGTDSCYFHSGPRGTHDLWDSRLFAYSSWEILRFLLSNIRWWLEEYRFDGFRFDGVTSMLYHHHGVGQGFSGDYSEYFGLQVDEDALTYLMLANHLVHTLCPDSITIAEDVSGMPALCSPISQGGGGFDYRLAMAIPDKWIQLLKEFKDEDWNMGDIVYTLTNRRYLEKCIAYAESHDQALVGDKSLAFWLMDAEMYTNMSVLTPFTPVIDRGIQLHKMIRLITHGLGGEGYLNFMGNEFGHPEWLDFPRKGNNESYHYARRQFHLTDDDLLRYKFLNNFDRDMNRLEERYGWLAAPQAYVSEKHEGNKIIAFERAGLLFIFNFHPSKSYTDYRVGTALPGKFKIVLDSDAAEYGGHQRLDHSTDFFSEAFEHNGRPYSLLVYIPSRVALILQNVDLPN

SEQ ID NO: 3380 - protein, 17 aa, Artificial Sequence
  derived and/or modified sequence
LLEIDPYLKPYAVDFQR

SEQ ID NO: 3381 - protein, 14 aa, Artificial Sequence
  derived and/or modified sequence
YGWLAAPQAYVSEK

SEQ ID NO: 3382 - DNA, 2106 bp, Artificial Sequence
  derived and/or modified sequence
atggccgccccaatgactcccgcagctagaccggaagattacgaagctgcacttaacgccgcgctggcagatgtgccggaactcgcgagactccttgaaatcgacccatacctcaagccttacgcggtagatttccagagacgctacaagcagttctcgcaaatcctgaagaatatcggtgagaacgaaggaggaatcgacaagttcagtcgcggctacgaatcgtttggggtgcatcggtgcgccgatggaggactctactgcaaggaatgggcacctggagccgagggagtctttttgaccggggatttcaacggatggaacccgttctcttacccgtacaaaaagttggactacggcaagtgggaactgtacatccccccgaagcagaacaaatcagtgcttgtgccacacggatcgaaactcaaggttgtgattacgtcgaagtcgggcgaaatcttgtaccgaatctccccatgggctaagtacgtggtcagagaaggcgacaatgtgaattacgactggatccactgggacccagagcactcctatgagtttaagcatagccgcccgaagaagccgcggtcattgcgcatatacgagagccacgtcggcatttcctcccatgagggtaaagtggcatcgtataagcactttacctgcaatgttctcccacggatcaaaggactggggtataactgcattcagctcatggccatcatggagcacgcctattacgcctccttcggatatcagatcacttccttcttcgcggcctcctccagatacggaactccggaagaactgcaggaactggtcgacactgcgcacagcatggggatcatcgtccttctggacgtggtccactcgcacgcgtccaagaatagcgccgatgggctgaacatgtttgacgggactgactcgtgttacttccattccggtccgagagggacccatgatctgtgggattcacggctcttcgcttacagctcttgggaaatcctgcgtttcctgctgtccaacattaggtggtggctggaagaataccggtttgacggattcagattcgatggcgtgacttcgatgctgtaccaccatcatggagtgggacaaggcttctcgggagattacagcgagtattttggactgcaagtggacgaggatgcgctgacgtacctcatgctggctaaccaccttgtgcacacgttgtgcccggactccatcaccatcgcggaggacgtttcaggtatgcctgccctctgctcgcccatcagtcagggaggtggagggttcgattatagactggcgatggcaatacctgataagtggattcagctgctcaaagagtttaaggacgaagattggaacatgggcgatatcgtatacacgctgactaacagacggtacctggagaagtgtattgcatatgccgagtcacacgaccaggcgctcgtcggagataagtcgcttgccttctggctgatggacgccgaaatgtacactaatatgtcagtgctgaccccgttcactccggtgatagatcgcggaatccagctgcacaaaatgattcgcttgattacccacggcctgggtggcgaggggtaccttaactttatgggaaacgaattcggccacccagagtggctggacttcccaagaaaaggaaataacgaatcctatcattacgcacgccggcaatttcacctgaccgacgacgacctgctccgctacaaatttctgaataacttcgatcgcgatatgaaccgcctggaagagaggtacgggtggttggccgctccccaggcatacgtgtccgaaaagcatgaaggaaacaagatcattgcgttcgaacgagctgggctcctgtttatcttcaatttccatccttcaaagtcctacactgattaccgggtgggaactgccctgccgggaaagttcaagatcgtcctcgattcagacgccgccgagtacggagggcatcaaaggcttgaccacagcacggacttcttcagcgaggcgttcgagcataacggacggccctactccctgctcgtgtatatcccttcccgcgtggccctcatcctccaaaacgtggacctgccaaat

SEQ ID NO: 3383 - DNA, 2106 bp, Artificial Sequence
  derived and/or modified sequence
atggccgcccctatgactcctgccgctagaccagaagattacgaggcagcgctcaacgccgcccttgcagatgtgccggaactggcaagactgctggagatcgatccatacctgaaaccgtacgcggtggacttccagcgcaggtacaagcagttttcgcagatcctgaagaacatcggtgaaaacgagggcggcatcgacaagtttagccggggttacgagtcgttcggcgtgcacaggtgcgcggacggtggcctgtactgtaaggaatgggcgcctggagcagagggagtctttctcaccggggacttcaacggatggaaccctttttcgtacccgtacaagaaactggattacggaaagtgggaactgtacattccacctaagcagaataagtctgtgctcgtccctcacggatccaagctgaaagtggtgatcacctcaaagtcgggagaaattctttaccgcatcagcccctgggccaaatacgtcgtgcgggaaggggataacgtgaactacgactggatccattgggacccggagcactcttacgaattcaaacactcgcgtcctaagaagccccggtcgcttcgcatttacgaatcgcacgtgggcatcagctcccatgagggcaaagtggcatcgtacaaacactttacgtgcaacgtccttccgcgcatcaagggactcggttacaactgtatccagctgatggcgatcatggaacacgcgtactacgcttcatttggataccagatcacctcattcttcgcggcctctagtcggtacgggactccggaggagctccaggaactggtcgataccgcccacagcatgggaattatcgtcctgctggacgtggtccactcccacgcatccaaaaactcggccgacggcctgaacatgttcgatggaactgactcgtgctacttccattccggcccccgcggaacccacgacctgtgggactccaggctttttgcctactcaagctgggagatcctgaggttcctcctgtctaacattcgctggtggctggaggagtacagatttgatggcttccggtttgatggagtgacgtccatgctctaccatcatcacggagtgggacaaggattctcgggagactactcggaatactttggactgcaggtcgacgaagatgccctgacctacttgatgcttgcaaaccatcttgtgcacactctctgcccggattcaatcaccatcgcagaagatgtctccggtatgccggcactctgcagcccgatctcccaaggtggcggtggattcgactaccggttggcgatggcgatcccagacaagtggattcaacttctcaaagaattcaaggacgaagattggaatatgggagacatcgtgtacactctcaccaacagacggtacctggagaagtgcatcgcctacgccgaaagccacgatcaggcacttgtcggcgataagtcgctcgctttctggctgatggacgccgaaatgtacactaatatgtcggtcctgactccgttcacccccgtgatcgatcgcggcattcaactgcacaagatgatccggctgatcactcacggactgggaggagagggttatttgaacttcatgggtaacgaattcggacatccggagtggctcgattttccaagaaagggcaacaatgagtcctatcactacgcgcgcagacagtttcatcttactgatgacgatctcctgcgctacaagtttctgaacaacttcgatcgggacatgaatcgcctggaagagcgctatggatggctcgctgccccgcaggcctacgtgtccgagaaacatgaagggaacaaaatcatcgccttcgaacgcgccggcctcctgtttatcttcaactttcacccatctaagtcctacactgattaccgggtgggtactgcgctgcccggcaaattcaaaatcgtgctggatagcgatgccgccgagtacggggggcaccaacgcctcgaccattccaccgacttcttttccgaagcgttcgaacacaacggaaggccgtacagcctcctggtgtacatcccatccagagtcgctctgatcctgcagaatgtggacctccccaac

SEQ ID NO: 3384 - DNA, 2106 bp, Artificial Sequence
  derived and/or modified sequence
atggcggcacccatgaccccagcagcacggccagaagactatgaagctgctctcaatgccgccctggctgacgtccccgagcttgcacggctgctggagatcgacccttacctgaaaccttacgctgtggactttcaacggcgctacaagcagttctcgcagatcctgaagaacattggcgaaaatgaagggggcattgataaattttctcgcggatatgagtcttttggtgttcaccggtgcgccgacggcggactctactgcaaggagtgggccccaggggcagaaggcgtattcctgaccggcgatttcaatgggtggaacccattttcttacccatataagaagctagactatggcaaatgggaattgtatattccccctaagcaaaataagagcgttttggtgcctcatggctcaaaattgaaggttgtaattacaagcaagtctggtgagatactgtaccggataagcccttgggccaagtatgtggttcgggaaggtgacaatgttaactatgattggattcattgggatcctgagcactcctatgaatttaaacactctcgacccaaaaaaccacggagtcttcgcatttacgaatcgcacgtggggattagctcccacgagggtaaagtggccagctacaagcatttcacttgtaacgtactgccacggatcaagggcttggggtacaattgcatccagctcatggcaattatggaacatgcatattacgcgagttttggttaccagatcacctcttttttcgccgccagctctcgctatggcacacccgaggagttgcaggaacttgtggatacagctcattctatgggtatcatcgtattacttgatgtggtgcatagccatgccagtaagaactccgccgatgggctcaacatgtttgacgggacagattcctgctatttccattctggccctcggggaacccacgatctgtgggacagcagactgtttgcctacagctcatgggagatcctgaggtttctgctctctaacattaggtggtggctagaagagtaccgcttcgatggctttcgattcgacggggtgacctctatgctgtatcatcatcacggggtcggacagggctttagtggcgactacagcgaatatttcggcctgcaggtggatgaagacgcactcacctacctgatgctcgccaatcaccttgtgcacaccttgtgtcccgacagcataaccatcgccgaagatgtaagcggtatgcctgctttatgctctcccatctcccaaggcggaggcggtttcgattatcggctcgcgatggcgatacctgacaaatggatccagctcctgaaggaatttaaggatgaagattggaacatgggagacattgtgtataccctgactaaccggcgctatctggagaagtgtattgcatatgcagagtcgcatgaccaggccctggttggcgataaaagcttggccttctggttaatggacgctgagatgtataccaacatgtctgtcctgacacccttcacccctgtgatcgaccgaggaattcaacttcacaagatgattaggctgattacccatgggctgggcggcgaaggctatctgaattttatgggaaatgagtttggtcatcctgaatggctcgattttccgaggaagggcaacaacgagtcctaccactatgctcgcagacagttccatctgactgacgacgatctacttcgctataaattcctgaataattttgatcgcgatatgaatcggctcgaggagaggtatggttggctggctgcccctcaggcatatgtctccgagaaacatgagggcaacaagattattgcttttgagcgcgccggacttctgtttatctttaatttccatccctccaaaagctacactgattacagggtcggaactgccttgcccgggaagtttaagatcgtcctcgatagtgatgccgcggaatatggtggccatcagcggcttgaccattccacggactttttttccgaggcctttgaacacaatggccggccctacagcttgcttgtatacataccttcaagagtggctcttatactccagaatgtggatctgcctaac

SEQ ID NO: 3385 - DNA, 2106 bp, Artificial Sequence
  derived and/or modified sequence
atggcagcacctatgacgcctgcggccagacctgaagattacgaggcagcactcaatgccgcccttgccgatgtccccgaactggctcggcttttggaaattgatccatacctcaagccatacgccgtcgatttccagcgcagatacaagcagttcagccagatccttaagaacattggtgagaacgaaggcgggattgataagttctcgaggggctacgaatcctttggggtgcatcggtgtgcagacggcggtttgtactgtaaggaatgggcaccgggtgcagaaggggtgttccttaccggagatttcaatggatggaacccattttcctatccatacaagaagctcgattacggcaagtgggaattgtacatcccgccaaagcaaaacaagtcggtccttgtgcctcatggatcgaagctgaaggtcgtcatcactagcaaatccggtgaaatactctaccgcatctctccgtgggcaaaatacgttgtgcgggaaggtgacaacgtgaactacgactggatacattgggatccagaacattcctatgagttcaagcactcacggccaaaaaagcctcggtcactcagaatttacgagagccacgtgggcatatcgtcgcatgaaggtaaggtggcaagctacaagcattttacgtgtaacgtgctgcccagaattaagggacttggttataactgcattcagctcatggcaatcatggagcatgcatactacgccagctttggataccaaatcacctcgttttttgcagcttcgtcacgatacggtacccctgaagaactccaagaactggtggacaccgcccattcaatgggtattatcgtgctgctggatgtggtgcattcgcatgcatcaaagaacagcgccgacgggctgaacatgtttgatggcaccgatagctgttactttcatagcggccctaggggtactcacgacctctgggactcaaggctgtttgcctactcctcctgggagatactgcggtttctgcttagcaacattcggtggtggcttgaggaataccggtttgatggattccgtttcgatggagtgacgtcgatgctttaccaccaccatggagtcggtcagggattttcgggggactactccgagtattttggactccaggtggacgaagatgcactcacttacctcatgctcgcaaatcatctcgtgcatactctttgtcccgactctattactattgccgaagatgtttcagggatgccggcgctgtgttcgccgatctcgcaaggaggtgggggttttgactacagactggcaatggcaatccctgataagtggattcagctgttgaaggagtttaaggatgaagattggaacatgggagacatcgtgtacacgcttactaataggcgttaccttgagaagtgcattgcctacgcagaatcccatgatcaggcgctggtaggcgacaagtccttggcattttggttgatggatgcagaaatgtacaccaacatgtcggtccttactcccttcactcccgtcattgatcggggcattcaactgcataagatgattcgacttatcacccacgggctcggaggtgagggatacctgaacttcatgggcaacgagtttggccatccagagtggctggattttccaagaaaaggcaataacgagagctaccactacgcacgtaggcaattccatttgacggacgatgatttgcttcgttacaaatttctgaacaactttgacagagacatgaataggctcgaagaacgctacggttggctggccgcaccacaggcttacgtgtcggaaaagcatgaaggaaacaagatcattgcatttgaaagagcaggtctgctcttcatattcaattttcatcctagcaagtcgtacaccgactaccgtgtgggtactgcgcttcctggcaagttcaaaatagtgcttgatagcgacgccgctgagtacggtggtcaccaaagactcgaccattccaccgactttttctcggaggcatttgaacacaacggacggccctactcactgcttgtgtacataccttcgagggtggcactgattctgcaaaatgtggatcttccaaac

SEQ ID NO: 3386 - DNA, 2106 bp, Artificial Sequence
  derived and/or modified sequence
atggccgcccccatgacacccgccgctcgcccggaggactatgaggccgctcttaatgcagcactcgcggatgtgccagaacttgctaggctgttggaaatcgatccttacctgaagccttacgcagttgattttcagcgccgatataagcagttcagccagattttgaagaacatcggtgagaacgagggggggatcgacaagttttctcggggttatgaaagcttcggcgtgcataggtgtgcagatggtggcctgtactgtaaggagtgggcccctggcgcggaaggggtttttctgactggggatttcaacggctggaacccgttctcctacccttataaaaagctggattatgggaagtgggagctgtatatccccccgaagcagaacaagagcgtgctggtccctcatgggtcaaagctgaaagtggttatcacatctaagagtggcgagatcctgtaccgcatatctccatgggcaaaatatgtggtccgcgaaggagataacgtgaactatgactggatccattgggaccccgagcactcttacgagttcaagcactcacggcctaaaaagcctcgttctttgcgcatctatgaaagccacgtcggcatctcctcccacgagggaaaggtggcatcttacaagcatttcacatgtaacgtgcttccacgcatcaaaggcctcggctacaattgcatccagctgatggccattatggagcacgcatactacgcgagttttggttatcaaatcacctctttttttgcagcaagcagtcgttacgggacccctgaagagctccaggagctagtggatacagcacacagcatgggcatcattgtcttgttggatgtagtgcactcccatgcgagcaagaatagtgcagacgggctgaacatgttcgatggcacagatagctgctacttccacagcggcccaagaggtacacacgatctctgggattcaaggctttttgcatactccagttgggagattttacgttttttgctttcaaacatacgctggtggctggaagagtaccgtttcgatgggttccgcttcgacggcgtgacatctatgttgtaccatcaccacggcgtaggccaggggttctctggggattatagcgaatatttcggtctgcaggttgacgaggatgctctcacttatctgatgctggcaaaccacctggtccacacattatgtcccgatagcataacaatcgcagaggatgtgagtgggatgcctgccctgtgcagccccatcagccaagggggtggcggttttgactatcggttggctatggcgatccccgacaagtggattcagctcctgaaagagtttaaagatgaggactggaacatgggggacatcgtgtataccctgactaacagacgctacctggaaaagtgcatcgcgtacgcagaaagccatgatcaagcacttgtgggggataaaagcctcgccttttggcttatggatgctgaaatgtatacaaacatgtcggtgctgactccttttacacccgtgattgacaggggtatccaactgcacaagatgatccggttgattacacatgggctggggggtgaggggtatctgaatttcatgggaaatgaattcggtcatcccgaatggcttgattttccacggaaaggaaataacgagtcttaccactatgcacgaagacagttccacctcaccgacgatgacctgctgaggtataaattcctcaacaactttgacagggatatgaaccggcttgaagaacgttatggttggcttgccgctccacaggcttacgtgtcagagaagcacgaaggaaacaagatcattgcattcgagcgagctggattactcttcattttcaatttccatccctcaaagtcatacacagattatagagtcgggaccgccctccctggtaagttcaaaatagttctggatagtgacgctgctgaatacggcggacaccaacgccttgatcattctactgatttcttcagcgaggcctttgaacacaatggacggccttacagtctcttagtctacattccgagtagggtggctttgatacttcagaacgtggacctgcccaac

SEQ ID NO: 3387 - DNA, 2106 bp, Artificial Sequence
  derived and/or modified sequence
atggcagctccaatgacaccagccgctaggccagaggattacgaagccgctttgaacgctgctctcgccgacgtgcctgaattggcaaggttgctcgaaatcgatccttacctgaagccctatgctgttgattttcagaggaggtacaagcagtttagccagattctgaagaatattggcgagaatgagggcggcatcgacaagttcagcaggggttacgagtcattcggtgtccacaggtgcgccgatggcggcttgtattgcaaggaatgggccccaggtgccgagggagtgttcttgactggcgacttcaacggttggaaccctttctcttacccctataagaaacttgactacggaaagtgggaactttacattcccccaaagcagaacaagtcagtactcgtcccgcatggatccaagctgaaagtggtgattacttctaaatctggagagatcctgtatcgcatctccccttgggcaaaatatgttgtgcgcgaaggagacaacgtgaactacgactggatccattgggacccggagcacagttatgagtttaagcatagcagacccaagaagccccgcagcctgaggatttatgaatctcatgtgggaatctcctcccacgaaggtaaagtagcaagctacaaacactttacatgtaacgttctgccccgcattaagggactgggctacaattgcattcagctgatggcgattatggagcatgcttattacgcatcctttggatatcaaatcacgagcttctttgccgcttcctccagatatggcacgcccgaggagttgcaggaactcgtcgacacggcacactccatgggcatcattgtgctgttggacgtggtgcacagccacgcgtctaagaattccgctgacggtctcaacatgtttgacggaactgactcctgttattttcatagcggcccaaggggtacacatgatctgtgggatagccgcctttttgcgtactcctcttgggaaatccttaggttcctgttgtctaatatccgctggtggttggaggagtatcgcttcgacggcttcagattcgacggagtgacatctatgctttatcaccaccacggtgttggacagggtttcagcggcgactacagcgagtacttcggcttgcaagtagatgaagatgccttgacttatctgatgctcgccaaccacctggtgcacactctgtgtcctgactctattacaatagcagaagacgtttcaggcatgccggccttgtgtagcccaatctcccaaggaggaggaggttttgactaccgccttgccatggctattcccgataaatggattcaacttctcaaagagttcaaggacgaggattggaacatgggagacattgtttatacactgactaatcgccgctatctggagaagtgcattgcctacgctgagtctcacgatcaggctttggtcggcgacaagtcacttgctttctggcttatggacgccgagatgtacacaaacatgtccgtgctgacccctttcaccccagtaattgacaggggcattcagctgcataaaatgatcagactcatcacccatggtctgggaggcgagggatatctcaatttcatgggaaacgagttcggacatcccgaatggttggatttcccgagaaaaggtaacaacgaatcataccactacgctaggagacaattccacctcacagacgatgatctgcttagatataagttcctgaacaacttcgacagagatatgaaccgcttggaggaaagatacggatggcttgcggctccccaggcttacgtttccgaaaaacacgaaggaaataagataatcgctttcgagagagcaggtctgctctttatattcaactttcaccctagcaaaagctacacggactatagggtgggtactgcgctgcctggcaagttcaagattgtgctggacagcgacgcggccgagtacggcggtcaccagaggttggaccatagcactgattttttctccgaagccttcgagcacaatggcaggccctatagtttgttggtatacatcccgtctcgcgtggcccttatcctgcagaacgttgacctcccgaat

SEQ ID NO: 3388 - DNA, 2106 bp, Artificial Sequence
  derived and/or modified sequence
atggccgcaccaatgaccccagcagcacgccctgaagattacgaagccgcacttaacgccgctttggcggatgtgccagaactggcgagactgcttgaaattgatccatacctcaagccatacgcagtcgattttcaacgaagatacaaacagtttagtcagattctgaagaacatcggggaaaatgagggaggtattgataagttttcgcgcggttacgaatccttcggtgtgcatcggtgtgcagacggcggcctgtactgcaaggagtgggcccccggagcggaaggagtgtttctcaccggcgatttcaacggatggaatccattctcgtatccttacaagaaactggattacggcaaatgggaactgtatattccacccaagcagaacaaatccgtcctggttccgcatggatctaaacttaaagtggtcatcacttcgaagtccggggagatcctctatcgcatttcgccatgggccaaatacgtggtgcgggagggagataacgtgaattacgactggatccattgggatcctgaacactcctacgaattcaagcactccaggcctaagaagccaagatcactccgcatttatgaatcgcacgtgggaatttcctcgcacgaagggaaagtggccagctacaagcattttacctgcaatgtgctgcctaggattaagggacttggttacaattgtattcagcttatggcaatcatggaacatgcttactacgcttcatttggctaccaaattaccagcttttttgcagcatcgtcacggtatggaacgcctgaagagctgcaggaattggttgataccgcacactccatgggcataattgtgctgcttgatgtggtgcacagccacgcttccaagaactcagcggatggactgaatatgtttgacggcactgacagctgctactttcactcagggccgagagggactcatgatctttgggattcacgtttgttcgcctacagctcctgggaaattctccgcttcctgctgtccaatattcgttggtggctggaagaataccggtttgacgggtttcggtttgatggtgtcacttcgatgctttaccatcatcatggtgtggggcaagggttctcgggtgattactcggaatacttcggcctccaagtggatgaggatgcccttacctacctcatgctggcaaatcatctggtgcacactttgtgtcctgactcgatcacgatagcagaggacgtgtcgggtatgcctgcgctctgttccccaatttcgcaaggcggaggcggctttgactaccggctcgcaatggcaattccagataagtggatccagcttcttaaggaattcaaggacgaggactggaacatgggagacatcgtttacacgcttaccaacagacggtaccttgagaagtgcattgcttacgcagagagccacgatcaggcacttgtcggagataagagcctggcattctggcttatggatgccgagatgtacaccaacatgtcggtccttactccctttactcccgtgattgatcgggggattcagcttcataagatgatccggcttattactcatggactcgggggtgaaggatacctgaatttcatgggcaatgagttcggccatcctgagtggcttgattttcccagaaagggcaataatgaatcctaccattacgcgcgaaggcaatttcatctcactgacgacgaccttctcaggtacaagtttttgaataactttgacagagatatgaatcgcctggaagaacgttatggttggctggcggctccacaggcatacgtcagcgagaaacacgaaggtaacaagatcatcgccttcgaacgagcagggctccttttcattttcaattttcatccatcaaaatcgtacactgattacagagtgggtaccgcgctgccaggaaagtttaagatcgtgctggattctgatgcagcagaatacggcggacatcagcgcctcgatcatagcactgatttcttctcggaagcgtttgaacataacggacggccctactcactgcttgtttacatcccttcgagggttgcgctcatcttgcagaacgtcgatctcccgaat

SEQ ID NO: 3389 - DNA, 2106 bp, Artificial Sequence
  derived and/or modified sequence
atggcggcaccaatgacccccgcggctcggccagaagattacgaggcagcacttaacgccgcacttgcagacgtgcccgaacttgcgcgccttcttgaaatcgacccttacctcaagccttacgccgtcgattttcaaagacggtataagcaattctcacagattctgaagaacatcggtgaaaacgagggagggattgataagttttcccggggttacgaatccttcggagtgcaccgttgtgcagacggcggcctttactgtaaggaatgggcaccaggagcagaaggtgtctttctcaccggtgacttcaatggatggaaccccttctcctacccctacaagaagctcgactacgggaagtgggagctctacattcctccaaagcaaaacaagagcgttctcgtccctcacggatcgaaattgaaagtcgtcattacttcgaagtcaggtgaaatcctttaccgtatttcgccttgggccaagtacgtcgtgcgtgaaggagataacgtcaactacgattggattcactgggatcccgagcattcctatgagtttaagcattcgcgccctaagaaaccacggtccctccgtatctacgaatctcatgttggtatttcctcccatgaaggaaaagtggcaagctacaagcactttacttgtaacgtgctgccacggattaaaggactgggatacaactgcattcagcttatggcaatcatggaacatgcatactacgcatcattcggttaccaaattacgtcattctttgcagccagctcacggtacggaacccctgaagaactccaggagctggtggataccgcacattccatgggcattattgtgctgcttgatgtggtgcatagccacgcatcgaagaattcggcagatggactcaacatgtttgacggcacggactcctgctactttcattcaggcccgagaggaacccatgacctctgggactcgagactgttcgcatactcctcgtgggagattttgagatttctgctttccaacatccgatggtggctggaagagtacagatttgatggttttcgatttgatggagtgacttcgatgctttaccatcatcacggcgtcggtcaaggattttccggagattacagcgaatactttgggctccaagtggatgaagatgcccttacctaccttatgcttgccaatcacctggtccatactttgtgcccagactccattaccatagcagaggatgtgagcggtatgccagcactgtgttcgcctatctcccaaggtggtggtggttttgattacagattggccatggcaatcccggataagtggatccaattgctgaaggagtttaaggatgaggattggaacatgggcgatatcgtgtacactctgactaaccgacggtaccttgaaaaatgcattgcgtacgcggaatcacatgaccaggcactcgtcggggataagtcgcttgccttttggcttatggatgctgaaatgtacactaatatgtcagtgctgaccccttttacgccagtcattgaccgcggaattcagctgcacaagatgattcggctgatcacccatggattgggcggtgaaggttaccttaactttatgggaaacgaatttggacatcccgaatggctcgattttccacggaagggtaataacgaatcataccactacgcgcgacgccagtttcacttgacggatgatgatctgctccggtacaagttcctgaataacttcgatagagatatgaatcgactggaagagcgatacggttggcttgccgcaccgcaggcatacgtctccgaaaagcatgaaggaaacaagattatagctttcgaacgtgccggtctgttgttcattttcaacttccatccatcgaaatcctacaccgactatagagtgggaactgccctgcctggaaagtttaagatcgtcctggattccgatgcagcagaatatgggggacatcagcgtctggatcatagcaccgacttcttttcggaagcctttgaacacaatgggcggccatactcgcttttggtgtatataccgtcaagggtcgcccttatcctgcaaaacgtggatctcccgaat

SEQ ID NO: 3390 - DNA, 2106 bp, Artificial Sequence
  derived and/or modified sequence
atggccgctccgatgaccccggctgcccgccctgaagattacgaagccgcgcttaacgccgccttggccgacgtgccggaactggcccggctgcttgagatcgacccgtatctcaagccctacgccgtggacttccagcgcagatacaaacaattctcgcagatcctgaaaaacatcggcgaaaacgaaggaggaatcgataagttcagccgaggatacgaatcatttggtgtccacagatgtgcggacggcgggctgtactgcaaggaatgggctccgggcgcagaaggagtgtttctcacgggggatttcaatggatggaatcctttctcctacccttacaagaagctcgactacggaaagtgggaactctacatcccgcctaagcaaaacaagtccgtgctggtgcctcatggaagcaagttgaaggtcgtgattacgtcaaagtcgggcgagattctctatagaatctccccgtgggccaaatacgtggttagggaaggggacaacgtgaactacgactggatccactgggacccggagcatagctacgagttcaaacactcccggccgaagaaaccaagaagtctgcgcatctacgagtcgcatgtgggaatttcatcccacgagggtaaagtggccagctacaagcacttcacctgtaacgtcctcccgcgtatcaaggggctcggatacaattgcatccaactcatggcgatcatggaacatgcctactacgcgtccttcgggtaccagatcacgtccttctttgctgcctcgagcagatacggaactccggaagagctgcaggaactggtcgacactgcccattcgatgggaatcatcgtcctgctcgacgtggtgcattctcatgcatccaagaactcggccgacggactcaatatgtttgatggcaccgattcatgctactttcactcaggcccccggggtactcatgacttgtgggacagcagactgttcgcctactcctcatgggagattctgagattcctgctgtccaatatccgctggtggctggaagaatacaggttcgacgggttccggttcgatggcgtcacctcgatgctgtaccaccaccacggcgtgggccagggattttcgggagactactcagagtacttcggacttcaggtggacgaggatgctctcacttacctcatgctggctaaccacctcgtgcataccttgtgtccggattcaataaccatcgcagaggatgtttcaggtatgccggctctctgctcaccgatttcacaaggagggggaggcttcgattaccggctggcgatggccatcccggacaagtggatccaattgctgaaagaattcaaggacgaggactggaacatgggggacatcgtgtacaccttgactaaccggcggtacctcgagaaatgtatcgcatacgcagagtcccacgaccaagcgctggtgggagataaatcgctggcattctggctgatggatgcagaaatgtacactaacatgtcagtcctgaccccgtttaccccggttattgatcgcggaatccagctgcacaagatgatcagactcatcactcacgggttggggggcgagggatacctgaatttcatggggaacgaatttggccatcctgagtggttggattttccaagaaagggcaataatgaatcgtaccattacgcacggcggcagtttcacctgactgatgacgatttgctgaggtacaagttcctgaacaattttgacagggatatgaaccggctggaggagcgctacggctggttggcggccccacaggcgtacgtgtcagagaagcatgaaggtaacaagatcatcgcatttgagcgggccggtctgcttttcatcttcaatttccacccgagcaaaagctacaccgactaccgcgttggtacggccctgccgggtaagttcaaaattgtcctggactccgacgccgcggagtacggaggccaccagaggctggatcattcgactgacttctttagcgaggctttcgaacataatggcagaccttactccctgctggtgtacatccctagcagggtggccttgatcctccagaatgtcgaccttccgaat

SEQ ID NO: 3391 - DNA, 2106 bp, Artificial Sequence
  derived and/or modified sequence
atggccgctcctatgacaccagccgccaggcctgaagactacgaagcggcgttgaatgctgctctggctgacgttcctgaactggccagactgcttgagattgacccttacctgaaaccctacgccgtcgattttcagcgcaggtataaacagtttagccagatactgaagaacattggtgaaaatgagggtggcatagataagttctcccgcggttacgaatcatttggcgtacatcgctgtgcggacgggggactgtactgcaaggaatgggcacccggcgccgagggggtgttcctaaccggggactttaacggatggaatccttttagctatccttacaaaaagctcgattacgggaagtgggagttatatatcccccccaaacaaaataagtccgtcctggttcctcatggcagcaagcttaaagtggtcattacgtcaaaaagcggggaaattctttacaggatttccccatgggctaagtacgttgtgagggaaggtgacaacgttaactacgactggatacattgggacccagaacactcttacgaatttaagcactcgcgtccgaaaaaaccgaggtcactgagaatttacgagtcgcacgtgggtatttcttcgcatgaagggaaagttgcttcttataaacattttacatgcaacgtccttcctcggatcaagggcctgggatataactgcatccagttgatggctatcatggaacacgcttactatgcgtccttcggctaccagataacatcatttttcgcggcttcctcccgctatggcactcccgaggagctgcaggaattggtcgacacggcccactccatgggcatcattgtccttcttgatgtggttcacagccacgcttccaaaaattctgccgatgggctcaacatgttcgatggtactgactcgtgttactttcattcaggccctcgcggcacccacgacctctgggattctcgtctgttcgcttattcttcatgggaaattttgaggttcctgttgagtaacatacgctggtggctggaagagtaccggtttgatggtttccgcttcgacggagtaacaagtatgctgtaccaccaccacggcgtgggccagggattttctggcgactactctgagtattttggacttcaggtcgacgaggatgccctgacatatctcatgctggccaaccaccttgtgcacactctgtgccctgactctatcacaatcgccgaggacgttagcggaatgcctgccctgtgcagcccaatcagccaggggggaggtggttttgattatagactggcaatggcaatccccgacaaatggatccagctgctgaaagagtttaaggacgaggattggaacatgggcgacattgtttacacactgaccaaccggcgttatctagagaagtgcatagcctatgcggaatcgcatgaccaggcgttagtgggcgataagagtctggcattctggctcatggacgcggagatgtacacgaatatgtctgtgctaacaccgtttacccccgtgatcgatagaggcattcagctacataagatgatacgcttgattactcatggcctcgggggcgaagggtatctgaatttcatgggcaatgaattcgggcacccggagtggttggattttcccaggaaaggaaacaatgagagctaccactatgcccggaggcaattccatctgacagacgatgacctgcttcggtacaagttcctcaacaactttgaccgggacatgaatagattggaagaacgctacgggtggctggcggcgcctcaggcttacgtttccgagaagcacgaaggaaacaagattattgcgtttgagagggcagggctgctgttcatcttcaatttccacccatcaaaatcctatacggattaccgggtggggaccgcactgcccggcaagttcaaaatagtgctggactcagacgccgcagagtacggaggccaccagagattggaccatagcacggactttttctctgaagcctttgaacataacggtagaccttactctctgctagtctacatcccgtcccgcgtcgctctgatcttgcagaacgtcgacctccctaat

SEQ ID NO: 3392 - DNA, 2106 bp, Artificial Sequence
  derived and/or modified sequence
atggccgcgcccatgacaccggccgctagaccggaagactatgaagctgccctgaacgcagccctggcggatgttcctgagctggctaggctgttagaaatcgatccatatctcaaaccttacgcagttgacttccagagacggtataaacagttttctcaaattctaaaaaatatcggagaaaacgagggggggatcgacaagttctctcgtggctacgagagcttcggagtgcacagatgtgctgacgggggtctgtactgtaaagaatgggccccaggagcagaaggcgttttcctgactggcgattttaacggctggaatccattttcctacccttacaaaaagctggattatgggaagtgggagctgtatattccgcccaagcaaaataaatcagttctggttccccatggaagtaagctgaaggttgttataacctctaaatcaggtgaaattctgtatcggatcagcccctgggctaagtacgtagtcagagagggtgacaatgttaactatgactggatccactgggacccagaacattcatacgaatttaagcacagtcgacccaagaaaccccgaagtttgcgaatctacgagagccatgtgggaatctctagtcatgaggggaaagttgcctcctataaacattttacctgcaatgtcttgccacgcataaagggacttgggtataattgcatccagcttatggcgattatggagcatgcttactatgcttcctttggttatcagatcaccagcttctttgccgcctcaagtaggtacggaaccccagaagagctccaggaattagtggatacggcacattctatggggatcattgtgcttctggacgtggttcatagtcatgcttccaagaattccgcagacggtctgaatatgttcgatggcaccgattcttgttattttcattcaggccctaggggcactcacgacctgtgggattctcgactgttcgcctactcatcatgggagattttacgatttcttctgtcaaacattcgttggtggctagaggaatacagattcgacggatttaggtttgatggcgtgacctcaatgctgtatcaccatcacggtgttggtcaggggttttccggagactactcggaatattttggactgcaggttgatgaagatgccttgacctacctaatgttggcaaaccaccttgtgcatacgctgtgtcctgattccattacgatagccgaagatgttagcgggatgccagcgctgtgtagtcccatctcccagggaggcggtgggtttgactatcggctcgccatggctataccggataagtggattcagctgctcaaggagttcaaagacgaagactggaacatgggcgacatcgtctatacattaacgaatagaaggtacttagaaaaatgtatcgcatacgcggagtcccacgatcaagccctggtcggagacaagtcattggcattctggcttatggacgctgaaatgtatactaatatgtcggtcctgactccttttacccctgtcatcgatcgaggcatccagctacacaaaatgatccggctaattactcatggactaggaggagaagggtatctgaattttatgggtaatgagttcgggcacccagaatggcttgacttcccacgaaagggcaacaatgagagttaccattatgccagaaggcagtttcacctgacggatgacgacttgctgcgatataaatttctgaacaattttgaccgggatatgaataggctcgaggaaaggtacggatggctagcagcaccccaagcgtatgtcagcgaaaaacatgagggcaataagatcatagcgttcgagagagctggcttgctcttcatcttcaactttcacccgtccaaaagctacaccgactaccgagtgggcacagctctaccagggaaatttaagatagttctggacagcgacgcggccgaatacggtggccaccagcgactcgatcactctactgacttcttctctgaagcgttcgagcacaatggccgaccctatagtctactggtatatatccctagtcgagtggccctgatcctacaaaacgtggatttacctaac

SEQ ID NO: 3393 - DNA, 2106 bp, Artificial Sequence
  derived and/or modified sequence
atggccgctcccatgacccccgccgcaagacccgaagattatgaggccgccctgaatgccgctctggccgacgtgccggaactggctaggttgcttgagattgatccctatctcaagccttatgctgtggactttcagcggagatacaaacagtttagccagatccttaagaatatcggagaaaacgaaggcggaattgacaaattttctaggggatacgagagcttcggtgtgcataggtgcgccgacgggggcctgtattgcaaagaatgggcgcctggtgcggagggcgtttttctgaccggcgatttcaatggctggaaccctttttcttacccgtacaagaagttggactatggaaagtgggagctgtacatcccccccaagcaaaataagtcggtgcttgttccgcacggaagtaagctaaaggtagtgatcacatcaaagtcaggcgaaatattgtatcgcatctctccttgggctaaatatgtggtgagagaaggcgataatgtgaactacgactggattcactgggaccctgagcacagttatgaatttaaacattctagaccaaaaaagcctagatccctccgaatctacgagtcccacgtgggtatcagttctcatgaggggaaggtggcttcctacaaacatttcacttgtaacgtcctgccacgaatcaagggcctgggatacaattgtatccagttaatggctattatggaacacgcatactatgcctccttcggttaccagatcacgagctttttcgcagcctcaagcaggtatggcacacctgaggaacttcaggagcttgttgatactgcccactctatggggatcatcgttctcttggatgttgtgcactctcacgcaagtaagaactcagctgatggattaaacatgttcgatggtacagatagttgttatttccattccggcccacgagggactcacgatctgtgggacagcagactatttgcgtactcttcttgggagatactgaggttcttgctgtcaaacattaggtggtggctggaagaatatagattcgacggttttcgattcgatggagtgacgtccatgctgtaccaccatcacggcgttggccagggcttttcaggggattacagcgaatacttcggactccaggtagatgaagacgccctcacatacctgatgctggccaaccatctggtgcacaccctctgcccggattcaatcactatcgctgaggacgtcagtgggatgcctgcactctgctcccccatctcacaggggggaggagggttcgactaccgacttgccatggccatcccagataagtggatccagctcctcaaggaatttaaagacgaagactggaacatgggcgatattgtgtacactctgacaaatcggaggtacctggaaaaatgtatagcttatgcggaatcccatgatcaggcgctggtgggagataaaagcctggcgttctggttaatggacgcagaaatgtataccaacatgtcggtcctcacacctttcactccagtaatagataggggaatacagttgcacaagatgattagactaatcacacatggcctggggggagaagggtatctcaatttcatgggcaatgaatttggccaccccgaatggctagacttcccacgtaagggcaacaacgaatcataccactatgcacgtcgtcagttccatctgactgatgacgaccttctgcgatacaaatttctcaataatttcgatcgagacatgaaccgattagaagagaggtatggctggttggccgccccgcaagcctatgtttctgaaaaacacgagggaaacaaaataatagcgttcgagagggccggcctattgtttatattcaatttccacccctctaaatcctatacagattacagagtcggtaccgcattaccggggaagtttaaaattgtgcttgactcagacgcagccgaatatgggggccaccagcgactggatcacagcactgacttctttagtgaagcatttgaacataacgggcgaccgtatagcctgttggtgtatattccatctagagtcgctctcatactgcagaatgtggacctgcctaac

SEQ ID NO: 3394 - DNA, 2106 bp, Artificial Sequence
  derived and/or modified sequence
atggctgccccaatgacccccgcggcacggccggaggactatgaagctgcactcaacgcagctcttgctgacgtaccggaactcgccaggctgctggaaatcgacccatacctcaagccatacgcggtagatttccagcgtagatataaacagttttcccagattttgaagaacatcggggagaacgagggagggatagataaattcagtagggggtatgaatctttcggcgtgcatagatgcgctgatggaggcctctattgcaaagagtgggcacccggggccgagggagtgttcctgaccggcgacttcaacggttggaatcctttcagttatccctacaagaagctggactacggcaagtgggaactttatataccccccaaacagaataaaagtgtgttagtcccccacgggagtaagctgaaagtggtcattaccagtaagtctggcgaaattctgtacagaatttctccctgggctaagtacgtggttcgagaaggagacaacgttaattatgattggatccactgggatccggagcactcatacgagttcaagcatagcaggcctaaaaaacctcggtctttacgcatctatgaatctcatgtggggatatctagtcatgagggcaaggtggcaagttacaaacactttacatgcaacgtgttaccacgcatcaagggactgggatataactgtatccagcttatggccataatggagcacgcatattatgcttcctttggataccagattacatctttttttgctgctagttctaggtacgggacccccgaggaactgcaggagttggtcgacaccgcgcattcaatggggatcatcgtgctgctggacgtggtacactcgcatgcatcgaagaacagtgccgacggcctaaatatgttcgatggcacagactcatgttactttcattcaggacctagggggactcacgacctttgggattccaggctctttgcttactcgagctgggaaatcctgcggtttctgctttctaacattcgctggtggctggaggaataccgttttgacgggtttcggtttgatggagtgaccagcatgctataccaccaccatggcgttggccaaggttttagtggcgattacagcgagtacttcggtctccaggttgatgaagatgcactaacctatctcatgctggctaatcatctggtacatacactctgcccggattcaatcactattgccgaggatgtcagcggcatgcctgcactgtgttcccctatctcacagggggggggaggtttcgactacaggctcgctatggccatcccagataaatggatccaacttctgaaggaatttaaagatgaggattggaacatgggggacatcgtctacacactgacaaatcgccggtatctggaaaagtgtattgcctacgcagagtctcacgaccaagccctggtcggagataaaagccttgctttctggttgatggatgccgagatgtacaccaacatgagcgtgctcaccccgttcacgcctgtcatcgaccgcggaatccagctccacaaaatgattcggcttattacacatgggctaggtggcgaaggatacttgaactttatgggcaacgagttcggccacccggaatggctcgactttccccggaagggaaataacgaaagctatcattacgcccgccgccagttccacctcacagacgacgatctattgcgttataaattcttgaacaattttgatcgtgacatgaaccgactggaggaaaggtacggctggctcgccgcaccacaggcatatgtgtctgagaagcacgagggcaacaaaattatagccttcgaaagagccggcttgttattcatatttaactttcacccttcgaagtcctacaccgactaccgagtcggcactgccttgcccggcaaattcaagattgtgctggacagtgatgccgctgagtacggcggccatcaaaggctcgatcattcgacggacttttttagcgaagccttcgaacataatggtagaccctatagcttattggtgtatattccaagcagagttgccctgatccttcaaaacgtggatttgcccaat

SEQ ID NO: 3395 - DNA, 2106 bp, Artificial Sequence
  derived and/or modified sequence
atggctgcaccaatgacacccgctgcgaggccggaggactatgaggcagccctaaatgctgccctggctgatgtgcctgagttagcccggttactggagattgacccctacctgaagccatatgcggtcgacttccaacgcagatacaagcagttttcacaaattctgaaaaatatcggggagaatgaggggggaattgataagttttccagagggtatgagagtttcggcgtgcatcgatgtgcggatggtggtctgtattgtaaggagtgggcacctggcgctgaaggggtttttctgaccggcgacttcaatggctggaatccattcagttatccgtataaaaagttggattacggaaaatgggaactgtacataccccctaagcagaataagagcgtattggtaccccatgggtctaagctgaaggttgtgatcacttccaagagcggcgagattctatatcggatcagcccctgggctaaatatgtggtgcgtgagggagacaatgtaaattatgactggatccactgggatcctgagcactcgtacgagttcaagcacagccgccccaagaaaccacgctcactgcgcatatacgagtcacacgtcggaatatcgagtcatgaaggaaaagtggcaagttacaaacactttacttgcaacgttcttcctcgaattaagggacttggatacaattgtatccagctcatggcgatcatggagcacgcatactacgcctcatttggctaccagataacatctttctttgcggccagttcccgatacggcactcctgaggaattgcaggaacttgtcgataccgcacacagtatggggatcatagtgctgttggacgttgtgcatagccatgccagtaaaaacagcgcagacgggctcaatatgtttgatggcacagactcttgttatttccattccggccctcgaggaacacacgatctgtgggacagtaggctttttgcctattcttcatgggaaatcctgagattcctcctgtctaacattcgctggtggttagaggaatatagattcgatggcttcaggtttgacggcgtgactagcatgctatatcatcatcacggcgtcggtcaagggttttcaggcgattattccgaatacttcggcctgcaggttgacgaggatgctctgacttacctgatgctggccaaccacctggtacacacgctttgtcctgattccatcacaatagcggaagatgtcagcgggatgcccgcgctgtgctcccctatatctcagggaggaggtggatttgattacaggctcgctatggccattcctgacaagtggattcagctgctgaaagagtttaaggacgaagactggaacatgggcgatatcgtctacacactgaccaatcgccggtatctcgagaaatgcatagcctatgccgaatcccacgaccaggccctggtgggggataagtctttagccttctggctcatggatgccgaaatgtataccaacatgtccgtcctgactcccttcacacccgtcattgatcgtgggatccagctccacaagatgattagacttattacgcacgggcttgggggggaggggtacctgaattttatgggaaatgagtttggacatcctgagtggctcgacttcccccgtaaaggtaataacgagtcataccactacgcacggcgccagtttcacctgaccgatgacgacctgcttcgctacaaatttcttaataattttgatagggatatgaatcgattggaggaaaggtacggatggctggcggccccccaagcatacgtgtctgagaagcacgagggcaacaaaattatcgctttcgaacgagccggcctgctgtttattttcaactttcaccccagcaaatcgtacacggactacagggtcgggactgcactcccggggaaattcaaaatcgtcttggattccgatgccgccgaatacgggggacatcaaaggttggaccattccactgactttttctccgaagcttttgagcacaatgggcgcccatactctctcttggtgtatatccctagtagggtggcgctgatactccagaacgtggatctacccaac

SEQ ID NO: 3396 - DNA, 2106 bp, Artificial Sequence
  derived and/or modified sequence
atggcggccccaatgacgccggccgcaaggccagaagattacgaagctgcactgaacgccgctcttgcagatgtgcctgaactcgcaagacttctggagatcgacccttacttgaaaccttacgcagtggattttcaacgaagatacaagcagttttcgcaaatcttgaagaatattggagaaaatgaaggtggaattgataagttttccagaggctacgagtcgttcggggtgcataggtgtgcagacggcggactgtattgcaaggagtgggcgcctggtgccgaaggggtgtttttgactggtgacttcaacggttggaacccattctcctacccttacaagaagctcgattacggaaagtgggagctttacatacctcctaaacaaaacaagtccgtcctggtgccccacggttcgaaactcaaagtggtgatcacttcgaagtccggagagatactttataggatatcaccatgggcaaaatacgtggtcagagaaggggataacgtgaactacgactggattcactgggatcccgaacacagctatgaattcaaacacagccgccccaaaaagcccaggtcccttcggatctacgaatctcatgtcggtatatcctcgcatgaaggtaaggtggcctcatacaagcattttacttgcaacgtgctgccacgaattaaggggctgggctacaactgtattcagctcatggcgattatggagcatgcatactacgcatcattcggataccaaataacctcgttttttgcggcctcgtcgaggtacggtactcccgaggaactgcaagaactcgtcgacactgcccattccatgggaatcatcgtacttcttgacgtcgtccattcacatgcgtcgaaaaactcggcagatggactcaatatgtttgacggcacggattcctgttacttccattccggacctcgaggaactcatgacctgtgggactccagactgtttgcatactcctcgtgggaaattcttcgttttctcctttcgaacattagatggtggctggaggaatacagatttgatggattccggtttgatggcgtgacttcgatgctgtaccaccatcacggtgtcggacagggcttcagcggagattactccgagtactttggacttcaagtcgacgaagatgcactgacctaccttatgctcgccaaccaccttgtgcataccctgtgtccggattcaatcactatcgcagaagatgtgagcggaatgccggcactgtgttccccgatctcccagggagggggtggattcgactacagactggcaatggcgattccggataaatggatccaactgcttaaggaattcaaagatgaagattggaacatgggagatatcgtctacactttgactaacaggcgttaccttgaaaagtgtattgcttacgctgagtcgcatgatcaggcacttgtgggtgataagtcgcttgctttttggcttatggatgcagaaatgtacaccaacatgtcagtgctcaccccgttcactccggtcatagatagaggtattcagctgcataagatgatccggctgattacccatggacttgggggagagggatacctcaactttatgggtaatgaatttgggcatcctgaatggcttgacttcccgcgaaaaggtaacaatgaatcctaccattacgcacgtagacagttccacctgactgacgacgacttgcttagatacaagtttttgaataacttcgaccgggatatgaacagactggaagagagatacggatggctggcagcacctcaagcatatgtcagcgaaaagcatgaagggaataagatcattgcctttgaacgagcaggactgctctttatcttcaactttcacccaagtaagtcatacaccgattaccgtgtcggcacggcactgccagggaagtttaagatagttctcgattccgatgctgcagaatacggaggacatcaacgtctggatcattcgaccgacttctttagtgaagcattcgaacataacggtcgcccatactcgttgctggtctacattccttcacgcgtggcacttattctccaaaacgtggatctcccaaac

SEQ ID NO: 3397 - DNA, 2106 bp, Artificial Sequence
  derived and/or modified sequence
atggcggcaccgatgacgccggcggctagaccggaagactacgaggctgccttgaatgcagccctagcggacgtaccggagcttgctaggttacttgaaattgacccgtatctcaaaccgtatgccgttgacttccagcgacgctataaacagttttctcagatattgaaaaacatcggagagaatgagggaggaatagataaattttctcgtggctatgagtctttcggggtacatcggtgcgcagacggagggttatattgtaaagaatgggcaccgggcgccgaaggggtatttctcacgggcgattttaacgggtggaatccgttttcctacccttacaaaaaactggactacggaaagtgggagctttacatccctccgaaacagaataagtctgtgttagtaccacatggatctaaattgaaagtcgtcattacgagcaaatccggggagattttatatagaataagcccatgggcgaagtacgtcgtcagagagggtgataatgtaaattacgactggattcattgggacccagaacactcctatgagttcaagcacagtcgcccgaagaagccgagatcattgcgaatatatgaatcgcatgtagggatctcatcacatgaaggtaaagttgcatcatataagcattttacatgcaacgtgttacccagaattaaaggcctgggatataattgtatccaattaatggccataatggagcacgcttattacgcttcttttggatatcagataacgagtttttttgcagcatcaagtcggtacggcacaccagaagaattacaggaactggtagatacagcccactctatgggaataatcgtcctgttagacgtagttcattctcatgctagtaaaaatagcgccgacggcttaaatatgttcgatggaacagattcgtgttatttccatagtggaccgagaggaacacatgatctgtgggattcgcgcctgttcgcatatagctcgtgggaaatcctccgtttcttactgagcaatatccggtggtggttggaggaataccgttttgacggctttcgttttgatggagtgactagtatgctttatcatcatcacggtgtcggacaggggttttcgggagattatagtgaatattttgggcttcaggttgacgaagacgctcttacttatttaatgctggctaatcatttggttcatacgttgtgcccggattctataacaatagcagaagacgtatcaggaatgccggctttatgttccccgatttctcaagggggaggagggtttgattatagacttgccatggctatccctgataaatggattcaacttctaaaagagttcaaggacgaggattggaacatgggtgatattgtttatacattgacaaatcgccgctatcttgaaaagtgcatagcctacgcagaaagccatgatcaagctcttgtgggcgataaaagcttagcattctggctgatggatgctgaaatgtacacaaatatgtctgttctcacgccatttactccggtcattgatcgaggtatccaactgcacaaaatgattaggctgattacacacggactaggcggcgagggatatctgaatttcatgggaaatgaattcgggcatcctgagtggttagattttccgagaaagggaaacaacgagtcataccattacgcaagaagacaatttcatctgactgacgatgaccttttgagatataaatttctgaacaactttgatcgagatatgaatcgattagaagaacgttatggctggctggctgcacctcaagcatacgttagtgaaaagcatgagggcaataaaatcatagccttcgaacgggctggcctgttgtttattttcaattttcacccttcaaagagctacacagactatcgggtgggcacggcattaccgggaaaatttaaaatagttttggattccgatgcagctgagtacggaggccatcaaagattagatcattcaacagattttttttccgaagcttttgaacacaacggcagaccttattctcttcttgtttatatccctagcagagtcgcactcattttacaaaatgttgatctccctaat

SEQ ID NO: 3398 - DNA, 2106 bp, Artificial Sequence
  derived and/or modified sequence
atggcggcaccgatgacccctgcggccagaccggaagattatgaggctgcactgaatgcggctttggcagacgtgcctgagctcgctcggctgctggaaatcgacccgtacctgaagccatacgccgtggactttcagcgcagatacaagcagttctcccagatcctcaagaacatcggagaaaatgagggcggtatcgacaagttctcaaggggttacgaatcattcggtgtgcaccgctgcgcagatgggggcctgtactgcaaggagtgggccccaggagccgaaggcgtgttcctgactggggatttcaacggatggaatcccttttcctacccgtacaagaagctcgactacggtaagtgggaactttacatcccaccgaaacaaaacaagtcagtgctggtgccgcacggaagcaagctgaaggtcgtgatcacttcaaagtcgggcgaaattctgtaccgcatctccccgtgggccaaatacgtggtccgggaaggggacaacgtcaattacgactggatccactgggatccggagcattcttacgagttcaagcattcgcggccgaagaaaccacgctctctgaggatctacgagtcgcatgtgggcatctcctcgcacgagggaaaggtcgcttcatacaagcactttacctgtaacgtgctgccgcgcatcaagggactgggatacaactgcatccaactgatggcaattatggaacacgcctactacgcatcctttgggtaccagatcaccagcttcttcgccgcctcgtcgcgctacggtacgcctgaggaactgcaagagctcgtggataccgcgcactcaatgggcatcatcgtcctgctcgacgtggtgcattcccacgcgtcaaagaattccgccgacggactcaatatgtttgacggtactgatagttgttacttccattcaggaccgcgcggaacccacgatctctgggattcacggctcttcgcgtactcctcctgggaaattctgcgcttcctgctgtcgaacatccgctggtggctcgaagaatacagatttgatggattccgcttcgacggagtgacctccatgctgtatcaccaccatggcgttgggcagggcttctccggcgactactcggaatacttcggacttcaggttgatgaggatgctctgacttacctcatgttggccaaccatcttgtgcacactctgtgtccagactcgatcaccatcgctgaggatgtgagcggaatgccggcgctctgttcgccgattagccaaggaggagggggattcgactaccggcttgctatggccatacccgataagtggatccaactgctgaaggaattcaaggacgaggactggaatatgggggacattgtgtacactctgaccaaccgccggtacctcgagaaatgcatcgcctacgcggagtcccatgatcaagcactggtgggagataagtcgctcgcgttctggctgatggacgccgaaatgtacactaacatgagcgtcctgactccgttcacccccgttatcgatcggggaatccagctccataagatgatccggctcatcactcacggacttggaggggaaggatacctgaacttcatgggaaacgagttcggacaccccgagtggctggacttcccgcgcaagggaaacaatgagagttaccactacgcccgacggcaattccacctcaccgatgacgatctgcttcggtacaagtttctgaataactttgatcgcgacatgaacaggctggaagagcggtacgggtggctggcggcaccgcaggcttacgtgtctgagaaacatgagggaaacaaaatcatagccttcgagcgcgccggacttctctttatcttcaactttcacccgtcaaagtcgtacactgattaccgggtgggcacggccctgccaggaaagttcaagatcgtcctggactcggacgcagccgaatacggaggccaccagcggttggaccattccaccgatttcttctcggaagcgtttgagcataatggacgtccgtactcgctccttgtgtacatccccagcagggtggccctgatcctgcaaaacgtggacctgccgaac

SEQ ID NO: 3399 - DNA, 2106 bp, Artificial Sequence
  derived and/or modified sequence
atggcagctcctatgacccctgcagcccgtcccgaggattatgaggctgccctcaatgcagcgttggcagatgtgccagaattggcacggctgctggaaattgacccgtaccttaaaccatacgccgtggactttcaaagacgatacaagcaattttcccaaatcttgaagaatattggagagaacgaaggggggatagacaagttttcacggggttacgagtcctttggagtgcatcgctgcgcagacggaggcctgtactgtaaggaatgggcgcccggagcggaaggagtgttccttaccggtgatttcaacggctggaaccctttctcatacccgtacaaaaaactggattacgggaaatgggagttgtacattccacctaaacagaacaagtccgtgctggtgcctcatggatcgaaacttaaggtggttatcacctccaagtccggtgagatcctttacagaatctccccatgggcaaaatacgtggtcagagaaggagacaacgtcaactatgattggattcactgggatcctgaacatagctacgagtttaagcatagcagaccgaaaaaaccgcgaagcctgagaatttacgaaagccacgtggggatttcgagccatgaaggcaaagtggcatcgtacaaacatttcacctgtaatgtcttgccacggattaagggacttggttacaactgtattcagcttatggcaattatggagcacgcatactacgcgtcctttgggtatcagattacctcgttctttgcggcgtcgtcccgctacggaaccccagaagagctccaagagcttgtggataccgcgcattccatggggatcatcgttctgctcgatgtcgtccatagccatgcctccaaaaacagcgccgatggtctgaatatgtttgatggcacggacagctgctactttcatagcggaccccggggtacccacgatctttgggattcgagactctttgcctactcaagctgggaaatactccggtttctcctctccaacattaggtggtggctggaagagtaccgtttcgatggctttcgttttgatggagtgacttcgatgctttatcaccatcatggggtgggtcagggatttagcggcgactactcggagtacttcggacttcaggtcgatgaagatgccctgacgtaccttatgcttgcaaaccatctggtgcataccctctgcccggatagcattactattgccgaggatgtcagcggaatgcccgcactgtgctctcctatttcacaaggaggcggaggctttgattaccggcttgctatggcaattccggataagtggattcaactgcttaaggagtttaaggatgaagattggaacatgggggatattgtctacactcttactaatcggaggtacctggaaaaatgcatcgcttacgccgagtcgcatgatcaggcattggtgggtgacaagagccttgccttttggctgatggatgcagaaatgtacaccaacatgtcggtgttgaccccctttacccccgtgattgataggggcatacaactgcataagatgatcagactcatcacccacggactggggggcgagggttacctcaatttcatgggcaacgaattcggtcatcctgaatggctggattttccgagaaagggtaacaatgaatcctaccattacgccagacgccagtttcatctgactgacgatgatcttctgagatacaagtttttgaacaattttgacagagacatgaatcgcctcgaagaacgctacgggtggctggcagccccacaggcatacgtgtccgaaaagcacgagggcaacaagatcatcgccttcgaacgggctggactgcttttcatctttaactttcatcctagcaagagttacaccgactacagagtgggtaccgcactgcctggaaaattcaagattgtgctggactcggacgctgccgaatacggaggtcatcagagactggaccactcgacggactttttcagcgaagcattcgaacataatggaaggccttacagcctgctcgtgtacataccttcacgtgtggcactgattcttcaaaatgtggacctgcctaac

SEQ ID NO: 3400 - DNA, 2106 bp, Artificial Sequence
  derived and/or modified sequence
atggccgcccctatgacacctgcggctagacctgaggattacgaggccgcattaaatgccgcccttgcagatgtgcccgaacttgcccgcttgctcgaaattgatccatatttgaagccttacgcggttgattttcaaaggcgttataagcagtttagccagattctgaaaaacataggagaaaatgagggtggaatcgataagttttctcgtggctatgaaagtttcggggttcatcgttgtgccgatggtgggctttattgcaaggaatgggctcccggtgctgaaggggttttcctaaccggagacttcaacggatggaacccattcagctacccgtataaaaaactggattatgggaaatgggaactttacatccctccaaagcaaaacaagtcggtacttgttcctcatggatccaagctaaaggtagtaattacgtctaagtccggcgagatactataccgtatatcaccatgggcgaaatatgtagttagggagggagataatgtgaactatgattggattcattgggatcctgaacatagttacgagttcaaacatagcagaccaaagaagcctaggtcacttcgcatatacgaatctcacgttggtatctcctcccacgagggaaaagttgcttcctataagcacttcacctgtaatgttcttcctcgtataaaagggttaggatataattgtatccagctgatggcgatcatggagcacgcatactacgccagcttcggctatcagattacgtcattcttcgcagcttccagccgttatggaactcccgaggagctacaagaacttgttgacaccgcccactcaatgggtatcatcgtgctgttggacgttgttcattcacatgcatcaaagaactccgcagacgggctcaacatgtttgatggtacagattcctgttacttccatagcggtcctcgtgggacccatgatttatgggacagcagattatttgcttactcaagttgggaaatattgagatttctcctttcgaatatcagatggtggttggaagagtacagatttgatggcttcaggtttgatggggtgacctccatgctctatcaccatcatggcgtgggtcaggggttctcgggggattattcagagtatttcgggttacaagtggatgaggacgcccttacgtacttgatgctggccaaccatttagttcacactctatgcccagactctattacaatcgctgaggatgtgtcaggtatgccagcgctatgttccccgatttcacagggaggaggggggttcgactacaggctcgcgatggcaattccggataaatggattcaacttctgaaggaattcaaggacgaggactggaacatgggggatatagtttatactcttaccaatagacgatatcttgagaagtgtatcgcatacgctgagtcccatgaccaggcattggttggggacaagtcattggctttttggttgatggacgcagaaatgtacactaatatgagcgtgttgacaccttttacgcctgttatcgacagggggatccagctccataaaatgattaggcttataacacatggcttgggtggtgagggatacctgaatttcatgggtaacgagttcggtcaccctgaatggcttgatttcccgaggaagggtaacaacgaatcttaccattacgctaggagacagttccatctaaccgacgacgatctattgcgatacaagtttttgaacaactttgatcgtgatatgaacaggttagaggagaggtacggatggttagccgctccacaagcttacgtcagtgaaaagcacgaagggaacaaaattattgccttcgagcgtgccggccttttgtttattttcaacttccaccctagtaagtcgtatacggattacagagtcggaacagcactgccaggaaagttcaagatcgtattagactcagatgccgcagagtacggtggtcatcaaagactcgatcattccacggatttcttctccgaggcttttgagcataacggtagaccctactctttgctcgtttatatcccttccagggtggctttgattcttcagaatgttgacctgcctaat

SEQ ID NO: 3401 - DNA, 2106 bp, Artificial Sequence
  derived and/or modified sequence
atggcagcacctatgaccccagccgcacgtccagaagactacgaagctgcattgaatgctgccctggccgacgtgccggaactcgctagattgctggagatcgatccctatctaaagccttacgccgttgacttccagcggcgctacaagcagttttctcaaatactgaagaatatcggggaaaatgaggggggcatagacaaattcagtaggggttacgagtcctttggggtgcacaggtgtgcagacggtggcttgtactgtaaggaatgggccccgggcgcagagggagtgttccttacaggcgatttcaatggctggaacccgtttagttatccttacaagaaactggactacgggaagtgggagctctatatccctcccaagcagaataaaagcgtcctggttccccacggtagcaagctgaaggtcgtcattacttccaaaagtggggaaattctgtaccgtattagtccttgggccaaatacgtagtccgcgaaggggataacgttaattacgattggattcactgggatccagaacacagctatgagttcaagcacagtaggcctaagaagcctaggagtctgcggatctacgagtctcacgtcggcatatctagtcatgagggtaaagttgcatcatacaaacatttcacatgcaatgttttacccaggattaaaggtctcggctacaattgcatccagcttatggccataatggagcacgcctactatgcttccttcggctatcagattaccagctttttcgctgcttctagtcggtacggcactccagaggagttgcaagagttagtggacactgcacattctatgggcatcatcgtgctgttagacgtagtgcacagtcacgcatcgaagaattctgccgatggcctgaacatgttcgatggcacagatagctgttattttcactcgggaccccgcggcacccatgacctgtgggatagccgactttttgcgtacagtagctgggaaatactgagatttctcctatcaaacattcgatggtggctcgaggaataccgatttgacggtttcagatttgatggtgtcactagcatgctctatcaccaccatggagtcgggcagggcttctccggggattactccgaatactttgggctccaggtggatgaggacgcactaacttacctgatgctggctaaccatcttgtgcatacactgtgcccagactcaataactatcgccgaagacgttagtggcatgcccgctctgtgctcccccataagccagggaggtggagggtttgactacaggctggcgatggcaattcccgacaaatggattcagctgcttaaagagtttaaagacgaggattggaacatgggtgacatcgtgtatacactgaccaatcgaaggtacctggagaagtgtatcgcttacgcagaatctcatgaccaggccctagttggagataaatctctggctttctggctgatggacgccgaaatgtacacaaatatgagcgtgttaactccattcaccccagtgatagacagagggattcagcttcataaaatgatccgcttgattacacacggactgggcggcgagggctatctgaacttcatgggcaacgagtttgggcatcctgaatggctggacttccctcgtaaggggaataacgaatcctatcactacgctcgccggcagtttcacttgacagacgacgacttgctgcgttataagttccttaacaactttgatcgtgacatgaaccgtctggaagagcgctatggctggctggccgcgccacaagcttatgtgtcagaaaagcatgagggcaacaaaattatcgcgttcgaaagagccggcttactcttcattttcaactttcatccatcgaagagttatactgattatagagtgggaacagcattgccagggaaatttaagattgtactcgacagcgatgctgcagagtatggcggtcaccagcggctggaccattctacagatttcttttctgaagcttttgaacacaatggccgcccatactcactcctggtttatattccctcaagagttgccctcatactgcaaaatgtcgacctccctaat

SEQ ID NO: 3402 - DNA, 2106 bp, Artificial Sequence
  derived and/or modified sequence
atggcagccccgatgactccggccgcccgcccggaggactacgaggctgctcttaacgccgcactggcagatgtgcctgagctggcgaggctgctggagattgatccttacctgaaaccgtacgccgtcgacttccagagacgttacaagcagttttcccaaatcttgaagaatatcggagaaaatgagggtggaatcgacaagttctcgagaggatacgaatcatttggcgtgcaccgctgcgcagacggaggtctgtattgcaaagagtgggctccgggagcggagggggtgtttctcactggggacttcaacggttggaacccgttcagctacccgtataagaagctggactacggaaagtgggagctttacatccctccaaagcaaaacaagtcggtcctggtgccgcatgggtcaaagctcaaggtggtgatcacttcgaagtccggagaaatcctgtacagaatctccccctgggccaagtacgtggtccgggagggagataatgtgaactacgactggattcactgggatccggaacattcatatgagtttaaacactcacgcccgaagaaaccgcggtccctcaggatctacgaatcccacgtcgggatttctagccatgaagggaaggtcgcgtcgtacaagcattttacttgcaatgtgctgccgcgcatcaagggcctcggctataactgtatccagctgatggctatcatggagcacgcttactacgcctcgtttggataccagatcacttcgtttttcgcggcatccagcaggtacggaaccccggaggaacttcaggagcttgtggacactgctcattccatgggtatcatcgtcctcttggatgtggtccactcacacgcttcgaagaactcggcggacggcctgaacatgttcgacgggaccgactcatgttacttccattcgggcccgaggggcacccatgacttgtgggatagccgcctgttcgcctactcatcctgggaaattctgcgcttcctgttgtcgaacatcaggtggtggctcgaggagtacagatttgatggatttcggtttgacggcgtgacctctatgctgtaccaccaccatggcgtggggcagggtttcagcggtgattactccgagtacttcgggctccaagtggatgaggacgccctgacttacctcatgctggccaaccacctggtgcacactctgtgcccggactcaatcaccatcgccgaagatgtgtcgggcatgcctgccctgtgctcgccaatctcgcagggaggcggcggatttgattacagactcgcgatggcgatcccagacaagtggatccagctgctgaaggaattcaaggacgaggactggaatatgggagacattgtatacaccctgaccaacagaaggtacctggagaaatgcatcgcgtacgccgagtctcatgatcaggccctggtcggagacaaatcactcgccttttggctcatggatgccgagatgtataccaacatgtccgtgctcactcctttcacgccggttatcgacaggggaatccaactgcataagatgatcaggctgattacccatggactggggggcgagggttacctgaacttcatggggaacgaatttggacatccagaatggcttgatttcccccggaagggaaataacgagtcataccactacgcacggagacagttccacctcaccgacgacgatctcctgcgctacaaatttcttaacaatttcgacagggacatgaaccgcctcgaagagagatacggatggctcgcagcgccgcaagcgtacgtctccgaaaagcacgaagggaacaaaatcattgcttttgagcgggccggattgctgttcatcttcaacttccacccgtcaaaatcctacactgattaccgggtgggaactgcactgccgggcaaattcaagatcgttctggattcagatgcggctgagtacggaggacaccagcgcctcgaccactcaaccgatttcttctcagaagcgttcgagcataatggacgaccttattcattgcttgtgtacatccctagccgggtggcgctcatcctgcaaaacgtggacctgccgaat

SEQ ID NO: 3403 - DNA, 2106 bp, Artificial Sequence
  derived and/or modified sequence
atggccgcaccaatgacgcccgccgcacggcccgaagactacgaggctgccttgaacgcggcactggccgatgtgccagaacttgcccggcttttggagattgacccttacctcaagccgtatgccgtcgatttccagaggcggtacaaacagttttcacagattttgaagaatatcggagagaatgagggaggaattgacaagtttagccgcgggtacgaatcctttggcgtgcaccgctgcgccgacggcgggctatactgcaaggagtgggcgcctggagccgaaggagtgtttttaaccggcgactttaatggctggaatcccttctcatatccatataagaaactcgattatggtaagtgggaactgtacatcccccccaagcaaaataaaagtgtgctagtgccacacggctctaaactcaaggtggtgattacaagcaagtcaggcgaaatcctttacagaatcagcccatgggctaaatatgtggtaagggagggggacaacgtgaactatgactggatacattgggaccctgaacacagttatgaatttaagcattcgcggcctaaaaaaccccggtctttacggatttacgagtcgcacgtggggatcagctcccatgagggcaaagtggcctcgtataagcacttcacttgtaatgtcctgcctaggataaagggcctgggatacaattgtatccaactgatggctatcatggaacacgcctattatgcttccttcggctatcagatcacctcttttttcgctgccagctctcggtatggcacacctgaggaacttcaagaattggttgacactgcccatagcatggggattatcgtcctactcgacgtggtgcattcccatgcgtctaaaaactccgccgacgggctgaacatgttcgatggaaccgattcgtgttacttccatagcgggcctaggggaactcacgacctctgggactctaggctgttcgcgtattcttcttgggagatcctccgcttcttgctctcgaatatccggtggtggttagaggagtaccggttcgatggttttcggttcgacggggtcacttccatgctataccaccaccacggcgtcggccaagggttcagtggcgattactccgaatacttcgggcttcaagtcgatgaggatgccctgacgtatcttatgctggccaatcatcttgtgcatactctgtgccccgattccattactattgcagaagacgtctctggaatgcctgcactgtgttctcccatttcccagggcggaggtggtttcgactatcgactcgcaatggctatcccggacaagtggatacagctgctgaaagagtttaaggatgaggattggaacatgggagatatagtttacacactgactaatagaagatatctcgagaagtgtattgcgtacgccgaaagtcacgaccaggctctggtaggcgacaaatctctcgctttctggctcatggatgctgagatgtacacaaatatgtccgtactgactcctttcacaccagtgatcgacaggggcatccagttgcataagatgataagacttatcacgcatggtctaggcggcgaaggctatctgaacttcatggggaatgagtttggccaccccgagtggcttgacttcccaagaaaaggcaataacgaatcctaccattacgctcggcgacagttccacttaacggatgacgatctacttcgctacaaattcctgaataatttcgaccgcgacatgaataggctcgaggagcgatacggctggttagctgctcctcaagcttatgtgtctgagaaacacgagggaaacaaaatcatcgcgtttgagcgagccgggctcttgtttatctttaactttcatcccagtaagtcctacaccgattatcgcgttggaaccgccctgcctggcaaattcaaaattgtgctcgacagtgacgccgcggaatatggcgggcaccagaggctggaccactctaccgactttttctccgaggctttcgagcataacgggcggccatatagcctgctggtgtacataccaagcagagtagctctgatcctgcaaaatgtggacctccccaat

SEQ ID NO: 3404 - DNA, 2106 bp, Artificial Sequence
  derived and/or modified sequence
atggctgccccaatgacccccgcggctagacctgaggactatgaagccgctctcaacgccgctcttgccgacgtgccggagctggcgcgcctacttgagattgacccttacttgaagccttacgcggtggactttcagaggcgctacaagcagtttagccaaatcctcaaaaacattggcgaaaacgaaggcggcattgataagttctcccggggatatgagtccttcggagttcatcggtgtgccgatgggggcttatattgcaaagagtgggcaccaggagccgagggggttttcctcacgggagacttcaatggttggaacccttttagttatccatacaagaaattagattatggtaagtgggaactgtacataccacccaaacagaataagtcagtccttgtgccgcacgggagcaagctgaaagtcgtgattacttctaagagtggcgagattctgtatagaatttccccatgggcgaagtatgttgtgagggagggggataacgtgaattatgactggatacattgggaccctgagcattcctacgagttcaaacacagcagaccaaagaagccccgctcgctgaggatctacgaaagccatgtagggatcagtagccacgaggggaaagtggcctcctacaagcacttcacctgtaatgtgctgccccggataaagggactcggatacaactgtatccaactgatggcaataatggaacatgcctactacgccagcttcggttatcagattactagtttttttgctgcctcttcacgctacggaacgcctgaagaactgcaggagctcgtagacactgcacactctatgggcatcatcgtgctgctggacgtagtacatagtcacgcttccaagaacagcgccgatggactgaacatgtttgatggcacggattcctgctacttccactccggtcctcggggcacacacgacctgtgggattcaagactgttcgcatacagttcgtgggagatactgagatttctgctgagcaatatccgttggtggcttgaggagtaccgtttcgatgggtttaggttcgacggggtcaccagtatgctttatcatcatcacggggtgggtcagggcttttccggcgattactctgagtacttcggactgcaggttgacgaggatgctctgacttatctcatgctggctaatcatcttgtgcacaccctgtgccccgattccatcacgatagcagaggatgtgtctggaatgccagcactttgtagcccaatctcgcaaggaggtggcgggttcgattaccggctggctatggctataccggataagtggattcaacttctcaaagagtttaaagatgaggactggaacatgggagacattgtgtataccctgactaatcggagatatttagagaagtgtatcgcatatgccgagtcgcatgaccaggctcttgtgggggacaaatcgctggccttttggctaatggatgctgagatgtacactaacatgtccgtgctcaccccgtttaccccagtgatagatcgaggtatacagctgcacaagatgatcagactaatcacccatggcttagggggagaaggatacctcaacttcatgggaaacgagttcgggcatcccgaatggctcgacttccccaggaaaggaaataatgaaagctaccactatgctagacgacagttccacctcaccgatgatgaccttcttcgctacaaattcctgaacaactttgaccgtgacatgaaccgcctcgaagagcgctatgggtggctcgcggctcctcaggcatatgtttctgagaagcatgagggcaacaaaattattgctttcgagcgtgcaggacttctgtttatttttaatttccatccttcaaagtcttacaccgactatcgggttggaaccgctctcccaggaaagtttaagatagtccttgactctgacgctgctgaatacggaggtcatcagaggctggaccactctactgactttttttccgaagccttcgagcacaacggtcgaccgtactcactcttagtgtacatccctagtagagttgccctgatattgcaaaacgttgatctgccgaac

SEQ ID NO: 3405 - DNA, 2106 bp, Artificial Sequence
  derived and/or modified sequence
atggcagcgcctatgacgccagcagcaaggcctgaagattacgaagcagcactgaacgcggcgctggctgacgtgcccgagctggcacggcttttggaaatcgatccttacctgaaaccctacgctgtggattttcagagaagatacaagcagttctcccaaatcctgaagaacataggagaaaatgaaggcggcattgataagttctcaagaggatacgaatcgtttggagtgcatcgctgtgcagacggtgggctttactgtaaggaatgggcaccaggcgcagaaggtgtgttcctcaccggagatttcaatgggtggaaccccttctcctacccctacaagaaacttgactacggcaaatgggaactctacatcccaccaaagcagaataagtcagtgcttgtgccacacgggagcaagttgaaggtggtcattactagcaagtctggcgaaatcttgtaccgcatctccccttgggcaaagtacgtggtgagagaaggtgataacgtgaactacgattggattcattgggaccccgaacattcctacgaattcaaacatagcaggcctaagaagccacgatcactgcggatatacgaaagccacgtgggcatttcctcccacgaaggaaaggtcgcatcatacaagcatttcacctgtaatgtccttcctagaattaagggactcggatacaactgtattcagctgatggccattatggaacacgcatattacgctagctttggataccaaattacctccttcttcgccgcttcctcccgctacgggacccccgaagaactgcaagagctggtggacaccgcccactcgatgggtattatcgttcttttggacgtggtgcacagccatgcatccaagaactctgcagatggactgaacatgtttgatggaaccgactcctgttacttccattcgggtccaagggggacccacgatctgtgggactcgcgtctttttgcgtactcgtcgtgggaaatcctgcgattcctcctgtccaacatcaggtggtggctcgaggagtacaggtttgatggcttcaggttcgatggtgtcacctcgatgctctaccatcaccacggagtgggacagggattcagcggagattactcggagtactttggattgcaagtggatgaggacgcccttacctacctgatgcttgctaaccatcttgtgcataccctttgcccagattccatcaccattgcagaggacgtctcaggaatgcctgcactttgttcgccaatcagccaaggtggagggggttttgactaccggctcgcaatggctatacccgataaatggattcaactgctcaaagagtttaaggatgaggattggaacatgggagatattgtgtacaccctgaccaacaggcggtatcttgagaagtgtattgcatacgcagaatcccacgatcaagcgctcgtgggtgataagtcgcttgcattttggcttatggatgcagaaatgtacactaacatgtcggtgcttactccttttaccccggtcattgacaggggcatacagctgcacaagatgattcgccttattactcatgggctcgggggtgagggctaccttaactttatgggaaacgaatttggccatccagagtggctcgacttccctagaaagggcaataatgaatcctaccactatgcaaggcgacagttccatcttactgatgatgatttgcttcggtacaagttcctcaataactttgatcgtgatatgaataggttggaagaacgatatggttggctggcagcaccgcaagcatacgtgagcgagaaacatgaggggaacaagattattgccttcgaaagggcaggtctgctgtttatcttcaattttcacccttcgaaatcttacaccgactacagagtcggaactgcactgcccggaaagttcaagattgtcctcgattccgatgccgcagaatacgggggacatcagcggctggaccattccactgacttcttttcagaggcatttgaacataacggacgtccttactccctgcttgtctacatccctagcagagtggcccttatactgcagaatgtggacctgcctaac

SEQ ID NO: 3406 - DNA, 2106 bp, Artificial Sequence
  derived and/or modified sequence
atggcggctcctatgacacccgcagctcggccagaggattacgaggccgcactgaatgccgcccttgccgatgtgccagaactggctcggctgctggagatagacccctacctgaagccttacgccgtggattttcagaggaggtacaagcagttcagccagattctaaaaaacatcggcgagaatgagggcggcattgataaatttagcagaggctacgaaagctttggtgtgcatcgctgcgccgatgggggtctgtactgtaaagagtgggcaccgggggctgagggcgtttttctgaccggcgattttaatggatggaacccctttagttacccttacaaaaagttggattatggaaagtgggagctgtacatcccacccaagcagaataagtccgtactagtcccccacggatccaagctgaaggttgtgatcacaagtaaaagtggagagatcctttacaggattagtccgtgggctaaatatgtggtacgtgaaggggacaatgtgaactacgattggatccactgggacccagagcactcatatgagtttaagcattcccgtcccaagaagccccgaagcttgagaatctacgagagccacgttgggatttcttcgcatgaaggcaaggttgcaagttacaagcactttacctgcaacgtgttaccccggattaaaggtctgggatacaactgcatacagctcatggctatcatggagcacgcgtactacgcgtcatttggctaccaaataacttctttctttgcagcatcctcgcggtatggcacacccgaggagctgcaggaactagtggacactgcccatagcatgggcatcatagtccttctggatgtggttcactcacacgcatcgaagaatagcgcagatgggctgaatatgttcgatgggacagactcatgttacttccattccggcccccgcggaactcacgatctgtgggattccaggctgttcgcctactcttcttgggagatcttacgattcctgctgtctaatatccgctggtggctggaagagtaccggttcgatggcttcaggtttgacggcgtcaccagcatgctgtaccatcatcacggggtaggccaggggttctccggggattattcagaatattttggacttcaggtcgacgaagatgccctgacttatctgatgcttgcaaatcaccttgtgcacacattgtgccccgatagcatcaccatcgctgaggatgtgtccggaatgcccgcgttgtgcagccccatctcacaggggggaggcggctttgattatagactggcaatggcgatccctgacaagtggatccagttgctgaaggagtttaaagacgaggattggaacatgggggatatcgtatataccctgaccaaccggagatacctggagaagtgcattgcatatgctgaaagccatgaccaagcactcgtgggggacaagtcacttgctttctggctgatggacgctgagatgtacactaacatgtctgttctgacccctttcactcctgtgatcgacagaggcatacagctgcataagatgatccggttaattactcacggcctcggaggcgagggctatttgaactttatgggcaatgagttcggacacccggagtggctcgactttccaaggaaaggaaataacgaatcataccactatgctcgtaggcaatttcatctgacggacgatgatctcctgagatacaaatttctcaacaatttcgatcgggacatgaacagactcgaagagcggtacggctggctggccgcaccacaggcgtatgtcagcgagaaacatgaaggcaacaaaattatcgcatttgagcgagctggtctcctgtttatatttaatttccatccgtctaaatcttacactgactaccgtgtgggtactgccctgcccggcaagtttaagatcgtgttggatagcgatgccgccgaatatggcggtcatcaaaggttagatcatagcactgatttcttctctgaggcatttgagcacaacggccgcccctatagcctcttggtatacatcccgtctcgcgttgcattgatcctgcagaacgtcgatctgcctaat

SEQ ID NO: 3407 - DNA, 2106 bp, Artificial Sequence
  derived and/or modified sequence
atggcggcacccatgaccccggccgcccggcctgaggattatgaggctgcgttgaacgctgctctggccgatgtgccagaattggccagactcctggagattgatccatatctaaagccctatgccgtcgactttcaacgcagatacaagcagttttcgcagattctcaaaaatatcggggagaatgaaggcggtattgacaaattctcaagaggctacgagagctttggcgtgcatcgttgtgccgacggcggcttgtactgcaaagagtgggcgcccggcgctgagggcgtatttctgactggggatttcaatggttggaacccatttagttacccctataaaaaactcgattacggcaaatgggagctatacattcctcctaagcaaaacaaaagtgtcctggtgccccacggatctaagttgaaagtggtgattacgtctaagtctggagaaatcctatacagaattagcccttgggctaaatacgttgtgcgggaaggagacaacgtcaattacgactggatccactgggatccagaacatagttacgagttcaaacactcccgcccaaagaagccgcgttctctaagaatctatgagtcccacgtcgggatttcctctcatgaagggaaggtcgctagttacaaacattttacctgtaacgtgctcccccggatcaagggacttggatacaattgcattcagctgatggccattatggagcacgcctattacgcatcattcggttaccagatcactagtttcttcgccgcttccagcaggtacggcacgccagaggagctccaagaactcgttgacacggcccattctatgggcatcattgtactgctcgacgtggtgcatagtcacgctagtaagaattccgcagacggcctgaatatgtttgacgggaccgattcctgttactttcattcgggaccccgcggaacccatgatctgtgggactctcgcctctttgcatatagctcatgggagatattgagatttctcttatctaatatccggtggtggctagaagaatatagattcgacggtttcaggttcgacggggttacctctatgctttaccaccatcatggcgtgggacaaggcttctccggtgattactctgagtacttcgggttgcaggtggacgaagatgccctgacctacctgatgctcgcgaatcacctagtgcacacactatgccctgactcaatcacaatcgctgaggacgtctctggaatgcctgccctgtgctcacctatcagccaagggggagggggctttgattatcgcttggctatggctattcctgacaaatggattcagctgctgaaagagtttaaagacgaagattggaatatgggggacatcgtgtatacgctaacaaatagacgatatctggagaagtgtattgcgtacgcagagtcacatgatcaggcactcgtaggggataagtcactagcattctggctgatggacgcagagatgtatacaaatatgagcgtactgaccccttttactcccgtaatagatcggggcattcagctacacaagatgatacggctgataactcacggtttgggcggcgagggctatctcaatttcatgggaaatgaattcgggcaccccgaatggcttgatttcccaaggaagggaaacaacgaatcatatcactacgcacgccggcaattccacctcaccgatgatgatttgctgcgctacaagttcttgaacaatttcgacagggatatgaatcggcttgaggagagatatggctggctcgcagcacctcaagcctacgtctctgagaaacatgaggggaacaagattatcgcgttcgagagggccgggctcttgttcatttttaacttccacccttctaaatcttatacagattacagggtggggacagctctgcccggcaagttcaagattgtgttggacagtgatgctgctgagtatggaggtcatcagcgcctggaccattccacagacttcttttccgaggcctttgagcataacggccgcccttactcattacttgtgtatattccatccagggttgccttgatactgcagaatgtggaccttcccaac

SEQ ID NO: 3408 - DNA, 2106 bp, Artificial Sequence
  derived and/or modified sequence
atggcagctccaatgactcctgctgcacgaccagaagattacgaggctgccctgaacgctgcactggccgatgtcccagaacttgcccggctcctggagatcgacccataccttaagccctacgcggttgactttcagaggcgctacaagcaattttctcagatcctgaaaaatattggtgaaaacgaaggaggaatcgacaaattctcccgggggtacgagagcttcggtgtgcatcgatgtgccgatggaggtctgtattgtaaggaatgggcgcctggggctgagggtgtcttcctgacgggggattttaacggttggaacccgttctcctatccatataagaaactggactatggaaaatgggagctctacataccaccgaagcagaacaaatctgtgcttgtccctcatggtagcaagcttaaggtggtaattactagtaagtccggggaaatactgtaccgcatctccccttgggccaaatatgtcgtcagagagggagacaacgtgaattacgattggattcactgggacccagaacactcatacgagtttaagcatagtcggccgaaaaagcccagatcactgaggatctacgaatcccacgtggggatcagttcacacgagggcaaggtggcatcatacaagcatttcacctgcaatgtactgccccggatcaagggtctggggtacaactgcattcagctgatggcaattatggagcacgcgtattacgcttctttcggataccagatcacctctttttttgccgcctcctctaggtacgggactcccgaggaactgcaagagctcgtggacactgcacactcaatgggaatcatagtattgctggacgtagtgcatagtcatgcttcaaaaaactcagcggatggactcaacatgttcgacggaaccgattcatgttactttcacagcggcccccgcggcacacacgatttgtgggattcccggctcttcgcctacagcagctgggagatcctgcgctttctgctgtccaatattaggtggtggctggaggagtataggtttgatgggttccggttcgacggtgtaacttccatgctgtaccaccatcatggggtcggacaagggttctcaggggattactctgaatattttggactccaagttgatgaagatgccctgacctatctgatgctggctaatcatctggtgcacacactgtgtccagacagcatcacgatagctgaggacgtctctgggatgcctgcgctctgctccccaatctcacagggcggagggggcttcgattaccggctggccatggcaatacccgacaaatggattcagctcctgaaagagttcaaagacgaggactggaacatgggcgatatcgtatacacactgaccaaccgccggtatcttgagaagtgtattgcgtacgctgagagtcacgatcaggccctggtgggggacaagagcctggcattttggctcatggacgctgagatgtacaccaatatgtccgtactgaccccttttacacccgttatagatcgcggtattcagctgcacaaaatgataaggctgatcacgcacggcctggggggggagggctacttgaacttcatgggcaacgagttcggccaccctgaatggctggatttccctcggaagggaaacaatgagagctaccactacgcaagacgccagttccatctcaccgatgacgacctgctgaggtataaattcctcaacaatttcgatcgcgatatgaacaggctcgaggagaggtacgggtggctcgctgctccccaagcttatgttagtgagaaacacgagggaaataagattattgcatttgaacgggctggcttgctgttcattttcaattttcaccctagtaagtcttacaccgactaccgcgtgggaactgcccttccgggcaagttcaaaattgttctcgattcagacgctgccgaatacggcggacatcagcggctggatcattctaccgattttttcagcgaggcttttgaacacaacggacgcccctatagcctgctcgtctacatcccgtcccgagtggctttgattttgcaaaacgtggatctgcctaac

SEQ ID NO: 3409 - DNA, 2106 bp, Artificial Sequence
  derived and/or modified sequence
atggccgcacccatgaccccagcagctcgtccagaggattacgaggcagccttgaacgcagcattggctgatgtgcctgaactggccaggcttctggaaatcgacccctatctcaagccatatgccgttgattttcaacgcagatataagcaattttctcagatcctgaagaacatcggcgagaatgaaggaggtatcgataagttttcacgcggatacgagagcttcggcgtccataggtgtgctgacggcggcctgtactgtaaagaatgggcccctggagcagagggtgtgttcttgaccggtgacttcaacggttggaatcctttttcatacccatacaagaagctcgattacggtaaatgggagctgtacatcccccctaagcagaataagagtgtgctggtgcctcacggatctaagcttaaggtcgtgatcaccagtaaatccggcgagattctctatcgcatttccccctgggccaagtacgtcgttagagagggagataacgtaaattacgattggattcactgggatcccgaacattcttatgaattcaagcactcaagaccaaagaagccccgctctctccgtatttacgaaagtcatgtaggtataagtagtcacgagggaaaggtggcctcctacaagcatttcacctgtaatgtccttcctaggatcaagggtctgggatacaactgtattcagttgatggctatcatggaacacgcatattacgcctctttcggctaccagatcacaagcttttttgccgcctcctccaggtacggcacccctgaagagttgcaggagcttgtcgacactgcacacagtatgggcattattgtcttgctcgacgttgtgcatagccacgcatctaaaaactcagccgacggacttaacatgtttgacggtaccgactcttgctatttccacagtggtccccgtggtacccacgacctgtgggactcacgtctctttgcttattccagttgggagatcctcaggttcctgttgtcaaatataagatggtggctcgaagaatatagatttgatggtttcaggttcgacggcgttactagtatgttgtatcatcaccatggagtcggacagggattctccggtgactatagcgaatattttggtttgcaggtcgacgaagatgctctgacttacttgatgctcgctaatcaccttgttcacaccctctgtcccgactcaatcacaattgcagaagatgtttccggtatgcctgcactctgtagtcccatctctcagggcggaggcggattcgactacaggttggccatggcaatccccgataagtggattcagctcctcaaggaattcaaggacgaggactggaatatgggcgacatagtatacactctgacaaaccgcaggtatctggagaagtgtatagcatatgcagagtcacatgaccaggcactggtgggcgacaaatccctggccttttggctgatggacgctgagatgtacacaaatatgtccgtgctgaccccatttacaccagtcattgacaggggtattcagctgcataaaatgattcgtttgattactcacggcttgggaggtgagggttaccttaacttcatgggtaacgaattcggacatccagaatggctggacttcccccgtaaaggcaataacgagagctaccattatgccaggcgtcaatttcacctgaccgatgacgatttgctgcgttataagttcctgaacaactttgatcgcgatatgaacaggttggaagaaaggtatggttggttggcagctccacaggcttacgtctctgaaaagcacgaaggcaataaaatcatcgcattcgagagggcaggactcttgttcatcttcaatttccacccaagtaagtcatataccgactatcgtgttggaactgcattgcctggcaaattcaaaatcgtgctggatagcgatgctgccgaatacggaggccatcaacgtttggatcacagtacagatttcttctctgaagcctttgaacataacggcaggccatacagtttgcttgtgtacatccccagtagggtggctctgatcctgcagaacgtggacctgccaaat

SEQ ID NO: 3410 - DNA, 2106 bp, Artificial Sequence
  derived and/or modified sequence
atggcagcccccatgacgccagccgcccgcccggaggattacgaggccgctttaaacgcggctcttgctgatgtcccagagctggccagactgctcgaaatagatccatatcttaagccatacgcagttgacttccagaggagatacaagcagttcagtcagatcttgaaaaatattggggagaacgagggcggcatcgataagttttcccgaggatatgagagctttggcgtccaccgttgtgctgacggcgggctgtactgcaaggaatgggcaccgggagccgaaggggtgtttctgaccggagatttcaacggctggaacccgttctcatacccctacaaaaagttagactacgggaagtgggagctatatattccgcctaagcaaaacaagagcgtgttagtgccccacggcagcaaattgaaagtggtgatcacatcaaagagcggagagatcctttacagaatctcaccgtgggccaagtatgtcgtgcgggagggcgataacgtaaattatgactggattcactgggaccccgaacacagctacgagttcaaacatagccgtcctaagaaacccaggtctctgcggatttacgagagtcatgtgggaatttcttctcacgaaggcaaagtggcttcctacaagcatttcacgtgcaatgttctgccacgaattaagggcttgggctacaattgtatccagttaatggccatcatggagcatgcgtattatgcttctttcggctaccagattacctctttctttgcggcatcctccaggtatgggactcctgaggagctacaagagctcgtagataccgcccactccatgggcattatagtgctgctggacgttgtgcattcacatgcatccaaaaatagcgcagatggactaaacatgtttgacggaaccgacagttgctactttcactctggcccaaggggaacccatgatctctgggattcccgactgtttgcttatagtagttgggaaatcctgaggttcctattgagtaatatcagatggtggcttgaggagtatcgctttgatgggtttcggtttgacggagttacttctatgctctaccatcaccacggcgtgggccaaggattctccggtgattactccgagtacttcggcctacaggtggacgaggacgctctgacatacctcatgttagctaaccatttggtccacacactctgtcctgattctatcaccatagcagaggacgtctctggtatgccagctctgtgtagccccatcagccagggaggcggtggcttcgactacaggctggccatggccataccagacaaatggattcaactgctgaaggaattcaaggatgaagactggaacatgggagatatcgtgtatacactgaccaataggcgttatctcgagaaatgcatagcatatgcggagtctcacgaccaggcgctagtgggggacaagtcccttgcattctggctgatggacgcagagatgtatactaacatgagcgtactgacaccttttaccccagtcatcgacagggggattcagctgcataagatgatcagattaatcactcacggcttaggaggagaaggatatctcaatttcatgggcaatgaatttggacaccccgagtggcttgacttccctcggaagggaaataacgagtcttaccattatgccaggaggcaattccacctcacagatgatgatctgttgcgttacaagttcctgaataatttcgaccgagatatgaaccgcctggaagagagatatggctggctggcggctccccaggcatacgtctccgagaagcacgagggtaataaaataattgcatttgagcgcgccggcctactgtttatcttcaacttccacccatctaaatcatataccgattatcgggtcggaacagccctccctggcaaattcaagatagtcctggactcggacgcagcggagtatggcggtcaccagagactggaccactcgacagatttcttctccgaagcctttgagcataacggtcgcccctattctctgttggtgtacattccaagtcgagtcgccctaattttacaaaatgtggatctacccaat

SEQ ID NO: 3411 - DNA, 2106 bp, Artificial Sequence
  derived and/or modified sequence
atggccgccccaatgacacccgctgcccggcctgaggattatgaggcagctctgaacgctgccctggccgatgtgcctgaacttgcccgcctactggaaatcgatccttatctgaaaccttatgccgtggatttccagcgtagatacaagcaattctcccagattctgaagaatataggcgagaacgagggcggcatcgacaagttctccagaggatacgaaagtttcggggtccatagatgtgccgatggcggcctgtactgtaaggaatgggcacctggcgcagaaggggtgttcctgactggcgactttaatggatggaaccccttctcttatccctacaagaaactcgactatgggaagtgggagctgtacatccccccaaagcaaaacaagagtgtcctggttccacatggaagcaaactgaaggtcgtgataacatcaaaatcaggcgaaattctttaccgaatcagcccctgggccaaatatgtcgtccgcgaaggggacaacgtcaactacgattggattcattgggaccctgagcacagctacgaattcaagcatagcaggcctaaaaagccacggagtctgaggatctacgaatctcacgttggcatctcaagccacgagggcaaggtcgcctcctacaaacattttacttgcaatgtccttcctcgaataaaaggtctcggctataactgcattcagttaatggcaatcatggagcatgcatactacgcctcattcgggtaccaaataaccagcttcttcgcagctagtagccgatatggaacacccgaggaattacaggaactggtcgacactgcccattcaatgggcatcatagtgctgctggatgttgtccattcccacgccagtaagaacagtgctgatggcctgaacatgtttgacggcaccgattcttgttactttcactccgggccacggggcacacatgacttgtgggattctcgcctttttgcttattcctcttgggagatcctgcggtttctgttatccaatattaggtggtggttagaggagtaccgctttgacggcttccggtttgatggcgtgacttccatgctgtatcaccaccacggggtgggccagggctttagcggggactacagtgagtatttcggcctgcaagtggacgaagatgctctgacctacctgatgctggctaaccatctggtgcacaccctctgcccagactctataactattgctgaggacgtttctgggatgcctgccctctgctccccaatctcccaaggtggcggtggctttgattatcggcttgccatggcaataccagataagtggattcagctgttaaaagaattcaaagatgaggactggaacatgggcgatattgtgtacacactgaccaacagacgctacctggaaaaatgtatcgcttacgccgagtcccacgaccaggctctggtgggtgacaagtccctcgcattctggttaatggacgctgaaatgtatactaacatgtctgtgctcaccccctttacccccgttatagacagaggcatccagctgcacaagatgatcagactgattacacatgggctggggggtgagggctatctcaattttatgggcaatgagttcggacacccagagtggttagacttccctcggaaagggaacaacgagtcctaccattatgcccgccgccagttccacctgacagacgatgatctattacgctataaatttctaaataactttgatcgggacatgaaccggctcgaggagcggtacggctggctcgccgcccctcaggcctacgtttccgaaaagcacgaagggaataaaattattgccttcgagagggcaggcctgcttttcattttcaatttccacccctccaagagctacacagactatcgggttgggactgccctgccaggcaagttcaagatcgtcctagatagcgacgctgccgagtacggggggcatcaacggctggaccacagcaccgactttttcagcgaagcctttgagcacaacggcaggccttattccctcctggtgtatattccctcccgggtggcactcatcctgcagaatgtcgatctgcccaac

SEQ ID NO: 3412 - DNA, 2106 bp, Artificial Sequence
  derived and/or modified sequence
atggcagcgccgatgacccctgcagccaggccagaggactatgaggccgcactgaatgccgccctggccgacgtgcctgaacttgcccggttgctggaaatcgacccctatctcaagccgtacgccgtggattttcaacggcgctacaagcaattcagccagatcctcaagaatatcggagagaacgagggagggatcgacaagttttcacgcggttacgagtcgttcggcgtccacagatgcgcggacggcggactgtactgcaaagaatgggctcctggagcagaaggggtctttctgactggggacttcaacgggtggaatccgttctcatacccatacaagaagctggattacggaaaatgggaactctacatcccacccaagcaaaacaaatcagtgctcgtgccacacggatccaagctcaaagtcgtgattacctctaaatcgggagagatcctgtaccgcatctccccgtgggcgaagtacgtggtgagggaaggcgacaatgtcaactatgactggattcactgggacccagagcactcgtatgagtttaagcactcgcgcccgaagaagcccaggtcattgagaatctatgagtcacacgtgggtatctcctcgcatgaaggcaaggtcgcatcttacaagcatttcacttgcaatgtgttgccccggattaagggactggggtacaattgcatccagcttatggcgatcatggaacatgcttactacgcctcattcggttaccagattacctcgttcttcgcggcaagcagcaggtacggaactccggaagaactgcaggaacttgtggacaccgcccactcaatgggaatcatagtgctgctggacgtggtgcactcgcacgcgtccaagaattcggctgatggattgaatatgtttgacggaactgatagctgctacttccactcaggcccgcggggaacccacgatctgtgggactcgcggttgttcgcctactcatcttgggagattctccggtttctgttgtcgaacattcggtggtggctggaggagtaccggttcgacggatttcggtttgacggggtgactagcatgctctaccatcaccacggcgtcggacagggcttctccggagattattccgaatacttcggattgcaagttgacgaagatgccctgacctacctgatgctggctaaccatctggtgcacaccctgtgtccagatagcatcaccatcgccgaagatgtgtccggaatgccggccctctgctccccaatctcacaaggtgggggcggattcgattaccgcctggcaatggcgatcccggataagtggatccagcttttgaaggagttcaaagacgaagattggaatatgggagacatcgtgtacaccctcactaacagaaggtaccttgagaagtgtatcgcttacgccgagtcacacgatcaagcccttgtgggtgacaaatccctggcgttctggttgatggacgcggagatgtacaccaacatgtccgtgctcaccccgttcactcccgtgatcgaccgcggtattcagctccacaagatgattaggctgatcactcatggacttgggggagaaggatacctgaatttcatgggcaacgaattcggccacccagagtggctggacttcccgcggaagggaaacaacgaatcttatcactacgccagacgccagttccacctcactgacgacgatttgctgagatacaagtttctgaacaactttgatcgggatatgaaccgcctcgaagagcggtacggatggctggcggcgccacaggcttacgtcagcgaaaaacacgaaggaaacaaaatcattgccttcgagcgggcgggactcctgttcatctttaacttccacccatcaaaatcgtacaccgattaccgcgtcggaaccgcactccctggcaaattcaagatcgtccttgattccgacgccgcagagtacggtggacaccagagactcgatcattcgaccgactttttctcagaagcattcgaacacaacggacgcccttactcgctgctggtgtacatcccaagccgagttgccctgatccttcaaaatgttgacctgcccaac

SEQ ID NO: 3413 - DNA, 2106 bp, Artificial Sequence
  derived and/or modified sequence
atggccgctccaatgaccccggcggccagaccggaggattacgaggccgcactcaacgccgcgctcgcggacgtgcctgaactggcccgcctgctggaaatcgatccgtacctgaagccgtacgccgtggattttcagcggcgctacaagcagttctcgcaaatcctgaagaacatcggcgagaacgaaggtgggatcgacaagttctccagaggatatgagagtttcggagtgcataggtgcgccgatggcggcctgtactgcaaggaatgggcccccggggcggaaggtgtgtttctcacgggcgactttaacgggtggaatcctttctcatacccgtacaaaaagctggactacggtaaatgggaactgtacattccgcctaagcagaacaagtcagtgctggtgccgcacggatccaagctcaaggtcgtgatcacttccaaatccggggaaatcctgtaccgcatctccccgtgggcgaagtacgttgtccgcgagggtgataatgtcaattacgactggatccactgggatcctgagcatagctacgaattcaaacactcgcgaccaaaaaagccgagatcgcttcgcatttacgaatcacacgtcggcatctcgtcacacgaaggaaaggtggcctcgtacaaacattttacgtgcaatgtcctcccaagaatcaagggactgggatacaactgcatccagctcatggccattatggaacatgcgtactacgcctcgtttggataccagatcaccagcttcttcgcggcatcgtcgagatacgggaccccggaggaactccaggaacttgtggacactgcgcattcaatgggaatcatcgtactgctcgacgtggtgcattcccatgcctctaaaaacagcgccgacggcctcaacatgttcgacggaacggactcctgttactttcattcaggaccgaggggtacccatgacctctgggatagccgcctcttcgcatacagcagctgggagattctgcgattcctgttgtcaaatatccggtggtggctggaagagtaccggttcgacgggttccggtttgatggcgtgacttccatgctctaccaccaccacggagtgggacaaggcttcagcggtgactacagcgaatacttcggactgcaagtggacgaggatgctttgacttatctgatgctggctaatcacctggtgcatactctttgtcccgacagcataactatcgccgaggacgtctcgggaatgccggctctctgctcccctatttcgcagggcggcggaggattcgactacagactggctatggcgatccctgataaatggatccaactgctgaaggagttcaaggatgaggactggaacatgggagatatcgtgtacactcttactaacaggcggtacctcgaaaagtgcatcgcatacgcagaaagccacgaccaagcactcgtgggcgataagtccctggccttttggctgatggatgcagaaatgtataccaatatgtcggttctgaccccgttcaccccagtgattgacaggggaatccagctgcataagatgatccgcttgatcacccacgggttgggaggagagggatacctcaacttcatgggaaacgagtttggacatcctgaatggctggattttcccagaaaaggcaataatgaatcgtaccactacgcgcggcggcaattccacctgaccgacgatgacctccttcgctataagttcttgaacaacttcgatcgcgacatgaaccgcctcgaagagcggtacggatggcttgcggccccacaggcttacgtctcagagaagcacgaaggcaacaaaatcatcgcattcgaacgggcaggactgctgttcatcttcaacttccacccaagcaagtcgtacaccgactaccgcgtcggcaccgcacttcccggaaagttcaaaattgtcctcgactccgacgctgccgaatatggagggcaccagcgcctggatcactctactgacttcttctccgaggcttttgagcacaatggtcgtccatactccctgttggtctacatcccatcacgggtggccctgatcctgcagaatgtggacttgccgaac

SEQ ID NO: 3414 - DNA, 2106 bp, Artificial Sequence
  derived and/or modified sequence
atggcagccccgatgactcccgccgcccggccggaggactacgaagctgcgcttaacgccgccctggcagacgtgcctgagctcgcgcgcctcttggagatcgatccatacttgaagccttatgctgtggacttccaacgtcggtacaagcagttctcgcagatcctgaagaatatcggagaaaacgaaggaggcatagataagttttcccgcggctacgaatcgtttggggtgcaccgctgtgcggatggtggattgtactgcaaggaatgggcccccggtgcggagggcgtgtttctgactggtgactttaatggctggaacccattcagctacccgtacaagaagttggactatggcaaatgggagctgtacatcccgccgaagcaaaacaagagcgtgctggtcccacacggcagtaaactcaaagtggtgattacgtccaaatcaggagagatcctctaccgcatcagcccgtgggccaagtacgtggtgcgagaaggtgataatgtcaattatgactggatccattgggacccggaacattcgtatgagttcaaacattcgcggcctaagaaacctcgctccctccggatctacgagtcgcacgtcggaatcagctctcatgaaggaaaggtggcgtcctataagcatttcacctgcaacgtgctccctagaattaaggggctcgggtacaactgcatccagctcatggccattatggaacacgcctactacgcatccttcggttaccagatcacctcctttttcgccgcgagctcgaggtatggaaccccggaggaacttcaggaactggtggataccgcccactcaatgggaatcatagttctgctggatgtagtccactctcatgcctccaaaaactctgccgacggactgaacatgtttgatggcactgattcctgctacttccattcaggacctcgcggtacccacgacctgtgggactcaaggttgttcgcatactcgtcgtgggagatcctgcgcttcctgctgtcaaatatccggtggtggctggaagaataccgtttcgatggttttagatttgacggagtgacttccatgctctaccatcaccatggagtgggacaagggttttcaggcgactacagcgagtacttcggacttcaggtggatgaggacgcccttacgtatctcatgctcgcaaatcacctcgtgcacaccctgtgtccggattcgatcactatcgctgaagatgtttcaggaatgccagctctctgcagcccgatctctcagggaggaggaggtttcgactaccggctcgcgatggccatacccgataaatggattcaactgcttaaggagttcaaggacgaagattggaatatgggagatatagtctacactctgactaacaggcggtacttggaaaagtgcatcgcttacgcggaatcccacgaccaggcgctcgtgggggacaagtcccttgcgttctggctgatggacgcggagatgtacacgaatatgtcggtgctcactccatttacgccggtgatcgaccggggaatccagctgcacaagatgatccgtttgatcactcacggactgggcggggaaggctaccttaacttcatgggaaacgaattcggacaccctgaatggctggactttccaaggaagggaaacaacgaaagctaccactacgcccggagacagttccatctcaccgatgatgatctgttgaggtacaagttcctgaataacttcgacagagacatgaatcgattggaagagagatatggttggctcgccgcacctcaagcgtacgtcagcgagaagcacgagggcaacaagatcattgctttcgagcgggccgggctgttgtttatcttcaacttccacccatcaaaatcgtataccgactacagggtcggaactgccctgccgggcaagttcaaaattgtgttggactccgacgcggctgaatacggagggcatcaacgcctggatcattccaccgacttcttcagcgaggcctttgaacacaatggcagaccctactcgctcctggtctacattccgagccgcgttgcgctcattttgcagaacgtggacctgccaaac

SEQ ID NO: 3415 - DNA, 2106 bp, Artificial Sequence
  derived and/or modified sequence
atggctgcccccatgacgcccgcagccaggcctgaggactacgaggccgcactaaatgcagccctagcggacgtgccggaactcgctcggctgctggagattgatccatacctaaaaccttatgctgtggatttccagaggagatacaagcaatttagccagatcttaaagaatatcggagagaacgaagggggtatcgataagttcagtaggggttatgagtcttttggcgtacaccgatgcgcagacggcggcctgtattgcaaagagtgggccccaggcgccgaaggggtattcctcacgggggatttcaacgggtggaacccgttctcatacccctacaaaaaactagattacggcaaatgggagctctacatcccaccgaaacaaaacaagagcgtgcttgtccctcacgggagcaagttgaaggtggttattacctcaaagagtggcgagatcctttatcggatctcaccctgggccaaatacgtcgtcagggagggggataatgtaaactacgattggatccactgggacccggagcactcatacgaatttaagcactctagacctaagaagccacggtctctgcggatatacgagagtcacgtgggcataagcagtcatgaaggtaaagtcgcaagctataaacattttacctgtaacgtgctgccacggataaaaggccttggctacaactgcatccagctgatggctatcatggagcatgcctactatgccagttttggctaccagatcacctctttttttgcagcgagttctagatatggcacacccgaagagctgcaagaactggtggacacagcccacagcatgggtattatagtcttgctggatgttgtccacagtcatgccagtaaaaactccgccgatggcctgaatatgttcgatggcactgatagttgctactttcactctggacctcgcgggactcacgacttatgggatagtaggctgtttgcctacagcagttgggagattctccggttcctcttaagtaacatacgttggtggcttgaggaataccggtttgatggtttcaggttcgacggcgttacctcaatgctctatcaccatcatggcgtggggcaggggttctccggcgactacagtgagtacttcggactgcaggtcgatgaagatgcacttacctacctcatgcttgccaatcacctggtccacacgctctgtcctgatagcatcacgatcgctgaagatgtcagtggaatgcctgccctgtgctctcccatttcacagggggggggtgggttcgactatcgcctggccatggctattccagataaatggatccagctgttgaaggaattcaaagacgaggattggaatatgggcgacatcgtgtacacacttacaaacagaagatacctcgaaaagtgcattgcctatgcagagtcccacgatcaggccctggtcggcgacaaaagtctagccttttggctgatggacgctgaaatgtacacgaacatgtcagttctcacaccttttactcccgttattgatcgcgggatccaactgcacaagatgatccggctgattactcatggcttgggcggggagggctacctgaacttcatggggaacgaattcggacacccggagtggcttgatttccctagaaaggggaacaatgaaagttatcattacgcacgcagacaatttcatctgacagacgatgatctgctgaggtacaaattcctcaataacttcgaccgagatatgaaccgactggaagagcgctacggatggctggccgccccgcaggcatacgtatccgagaagcacgaaggcaacaagattattgcattcgagagagcaggcctcctgtttatcttcaactttcacccatcaaagtcttacacagactatcgagttgggaccgcattacctggaaagttcaagatcgtactcgattctgatgcagcggaatatggaggccaccaaaggcttgatcactccaccgacttcttctcagaagcttttgaacacaacggaagaccctacagcctccttgtgtacatcccatccagggttgcccttattcttcagaacgtcgacctcccgaac

SEQ ID NO: 3416 - DNA, 2106 bp, Artificial Sequence
  derived and/or modified sequence
atggccgcccctatgacgccagccgccagaccagaggattacgaagccgccctcaatgccgcgctggctgacgtgccagagttggcacggctgctcgaaatcgacccgtacctgaaaccgtatgccgtggacttccagcgcagatacaagcagtttagccagattttgaagaatatcggagaaaatgaagggggaatcgacaagttcagccggggatacgaatcctttggagtgcatcggtgcgcggatggaggtctgtactgcaaggaatgggctccaggggctgaaggggtattcctgaccggagacttcaacggctggaaccctttcagctacccctataagaaattggactacggcaaatgggagctctacatccctccgaagcagaataagagcgtgctggtcccgcacggatcgaagctcaaagtggtgattacgtcgaaatccggagagatcctttacagaatctcgccatgggctaaatacgtcgtgagagaaggagacaatgtcaattacgattggatccactgggacccggaacattcgtacgagttcaagcattcgcgccccaagaaaccgaggtcactgcgcatttatgagagccacgtgggaatttcctcgcatgaaggaaaggtggcttcatacaaacactttacctgcaatgtcttgccacggatcaagggattgggatacaactgtatccaactgatggctatcatggaacatgcctactacgcatcatttggctaccaaatcacttcgttcttcgccgcgagttctcggtacggtacgcccgaagaactgcaagaactggtggacactgctcactctatgggcatcatcgtgctgctggacgttgtgcattcccacgcatcgaagaactcagccgatggacttaacatgttcgatggcactgactcgtgttacttccacagcgggccgcggggaactcacgacctctgggactccagattgttcgcctacagctcatgggaaatactgagatttctgctgtcgaatatccgctggtggctcgaagagtacagatttgacggattccggttcgacggggtgacgtcaatgctctaccaccatcacggggtgggacagggatttagcggcgactactcggagtactttggcctgcaggtggatgaagatgccctgacctacttgatgctggctaaccaccttgtgcacactctctgcccggactcaatcacgatcgcggaggatgtgtcaggaatgccggcactctgctccccaatctcgcaaggcggtggagggttcgactaccgcctggctatggcaatcccggataaatggatccaactcctgaaggagttcaaggacgaagattggaacatgggagacattgtctacaccctgaccaaccggcggtacctcgaaaagtgtatcgcttacgccgaatcgcacgaccaagccctggttggtgataagagcctcgccttctggctcatggacgctgagatgtatactaacatgtcggtcctgactcctttcaccccagtgatcgatcggggaatccagttgcacaagatgatcaggctgatcactcacggactcggcggcgagggctacctgaactttatgggaaacgaattcggacacccggaatggctggatttcccgaggaagggcaacaatgagtcgtaccactacgcacggaggcagttccacctgactgacgacgatctgctgcgctacaaattcctcaacaattttgatagagatatgaataggttggaagagcggtacggatggctggccgcgccgcaggcatacgtcagcgagaagcacgagggaaataagatcatcgcatttgaacgcgccgggctcctcttcatctttaacttccatccatcgaaatcgtacactgattaccgcgtcggtactgctctgccgggaaagttcaagatcgtcctggacagcgacgcagccgaatacggaggtcaccagcgcttggatcattcgaccgacttcttctccgaagcatttgagcataatggacgcccttactcgttgctggtctacatccctagccgtgtggctctcatcctccaaaatgtggacctgccgaat

SEQ ID NO: 3417 - DNA, 2106 bp, Artificial Sequence
  derived and/or modified sequence
atggccgcacctatgaccccggcggcacgaccagaagattacgaagcagcacttaacgccgcactcgcagatgtgccagagttggcgagactgctggaaatcgatccataccttaaaccttacgcggtcgactttcaaagacgctacaagcaattctcccaaattcttaagaacattggggaaaacgagggaggtatcgacaagttctcccgcggatacgagagcttcggcgtgcatcggtgtgcagacggtggactgtactgcaaagaatgggcaccgggagcagaaggcgtctttctcaccggagatttcaacgggtggaacccattctcctacccctacaagaagctcgactacggcaagtgggagctctatattccgccaaaacagaataagtcggtgcttgtgccacacggatccaaactgaaggtcgtgattacgtccaagtcgggtgaaattctttacagaattagcccgtgggcaaaatacgtggtgagggagggtgacaatgtgaattacgattggattcattgggatcccgaacatagctacgagttcaaacattcacggcctaagaagcctcggtcactgcgcatatacgaatcacacgtcggtatctcctcgcatgaaggtaaagtcgccagctacaagcattttacctgcaatgtgctgcctcggattaaaggactcggatacaactgcatccaactgatggccataatggaacacgcttactacgcatcgtttgggtaccagattacgagcttctttgcggcctcatcacgctacgggactcctgaggagcttcaagaactggtggacacggcacactccatgggcataattgtgctgctcgacgtcgtccattcgcatgcgtcaaagaactcggcagatggattgaacatgtttgatggcaccgattcatgttactttcactcaggtccaagaggaacccatgatctttgggattctcggctgtttgcatactcctcatgggagatcctcagatttcttctttccaatatccgatggtggctggaggaatacaggtttgatggattccggtttgacggggtgacttccatgctgtaccatcatcacggagtgggtcaaggattctctggagactacagcgaatactttggactgcaggtggatgaagatgcactgacgtaccttatgcttgcaaaccatttggtccacaccctgtgtccggatagcataacgatcgccgaggatgtcagtggtatgcccgccctttgttctcccatttctcaaggaggaggaggttttgattataggctggccatggctataccagacaagtggatacagctgctcaaggaattcaaggatgaggattggaacatgggagacattgtttatacgctgaccaatcgaagatacctggagaagtgtattgcatacgccgagtcccatgaccaggccctggtcggtgacaagtcgcttgcattttggttgatggacgccgaaatgtacactaacatgagcgttctgacccctttcacgcctgtgattgatcgtggaatccagcttcacaagatgatcagactcataacgcacggtctgggaggggaaggctacctcaacttcatgggcaacgaattcggtcatccggaatggttggatttccctagaaaaggaaataacgaatcctaccattacgcccggcgacagtttcacctcaccgatgatgacctccttagatataagttcctgaacaactttgatcgggatatgaaccggctggaggaacgatacggatggcttgcagcgcctcaggcatacgtctccgaaaaacatgaaggcaataagataattgcatttgagagagccgggctgctgttcattttcaactttcatccatcaaaatcgtacaccgactacagagtgggaaccgccctcccaggaaagtttaagattgtgttggactcggacgcagcggaatacggcgggcaccaaagactcgatcatagcaccgactttttctccgaagcatttgaacataatggtaggccttactcgctgcttgtgtacatcccttcaagagtggcgctgattcttcagaatgtggaccttcccaac

SEQ ID NO: 3418 - DNA, 2106 bp, Artificial Sequence
  derived and/or modified sequence
atggcggcaccgatgacccctgcagcaaggcccgaggactacgaggcagccctgaacgcagcccttgccgacgtcccggaactcgcgagactgcttgaaatcgacccttaccttaaaccttacgcggtcgacttccaaaggcgatacaagcaatttagccagattttgaagaatataggagaaaacgagggcggaatagataagttctcccgggggtacgaatcgttcggagtgcaccgatgcgcagatggaggtctgtactgtaaagaatgggcaccgggtgccgaaggggtgttccttacgggagacttcaacgggtggaacccattctcatatccatacaaaaagctggattacggaaagtgggagctgtatattccgccgaagcaaaacaaatcagtgttggtgccgcatggctcgaagctcaaggtcgtcattacgtcaaagtcgggtgagattctttatcggatctcaccttgggcaaagtacgtggtgagggaaggggacaacgtgaattatgattggatccattgggacccagagcactcctacgagtttaagcactcgcgccctaaaaagccacggtcccttcgcatttatgaaagccatgtcggtatctcttcacatgaaggtaaagtagcgtcatacaagcactttacttgcaatgtgttgccgagaatcaagggtctggggtataactgtatccaactgatggctattatggaacatgcatactacgcttcgtttggatatcagatcactagcttcttcgctgcatcgtcaagatacggaactcctgaggagcttcaggaactggtcgacactgcacatagcatggggattattgtgctgctggatgtggtccactcccacgcatcgaagaatagcgcagatgggttgaacatgtttgatggtaccgactcgtgttactttcattcgggacccagaggcacccatgacctgtgggactccagactctttgcatatagcagctgggagattcttcgattcctgctttcgaacattcggtggtggctcgaagaataccgctttgatggcttcagatttgacggagtgacctcgatgctctaccatcatcatggagtgggccagggattttccggtgattacagcgaatactttggtttgcaagtggatgaagatgcacttacttacctcatgcttgcaaaccacctggtgcatactctgtgtcccgattcgattaccatcgcagaagatgtttctggaatgccagcactttgcagccccatttcccagggtggaggtggatttgattaccgcctggcaatggcaatacccgataagtggattcaattgctgaaggagtttaaagatgaggattggaacatgggagatatcgtttacactctcaccaaccgccgctacctcgagaaatgtattgcttacgctgaatctcatgaccaggccctggttggagacaaatcacttgcattctggcttatggatgcggagatgtacacgaacatgtcagtgctgacccctttcacccctgtcattgatcgcggaattcaacttcataagatgattagacttataactcatggtttgggtggagaaggttacctgaactttatgggaaatgaatttggacatccagagtggcttgatttccctcggaaagggaataatgaaagctatcattacgctcgccgccagtttcaccttaccgacgatgacctcttgcgatacaagttcctgaacaattttgaccgcgatatgaatcgactggaggaacgatacggctggctggccgcaccacaagcatacgtcagcgaaaagcatgaaggcaacaagatcatagccttcgaacgcgctggattgctcttcattttcaactttcacccgtctaagtcctacaccgattacagagtgggtaccgcacttccaggaaaattcaagattgtgcttgattcagacgcagcagagtacggtggtcaccaaaggcttgaccatagcaccgactttttctcagaagcctttgaacataacggtagaccttactcgcttctggtgtacatcccatcgcgggtggcactgatcctccagaatgtggatctgcctaac

SEQ ID NO: 3419 - DNA, 2106 bp, Artificial Sequence
  derived and/or modified sequence
atggccgctcctatgactcccgcagcaagaccagaagattatgaagccgcgctcaatgctgcgcttgccgatgtgcccgagctcgcacgccttctcgagattgacccatacctcaaaccttacgctgtggactttcagcgcaggtacaaacaattttcgcagatactgaaaaacattggagaaaacgagggtggtatcgataagttttcccgcggatacgaatcgtttggagttcatcgatgtgcggacggcggactgtactgtaaggaatgggcaccaggggccgagggagtgttccttactggagactttaatggttggaaccctttctcctatccttacaagaaactggattacggtaaatgggaactttacatcccaccaaagcaaaacaaatcggtgcttgtcccacatggatccaagctgaaagtggtgattacctcgaaatcgggggaaattctgtaccgcatatctccctgggcaaaatacgtggttagagaaggtgataacgtgaattacgattggatccattgggatcctgaacattcttacgagtttaagcattcgcgtcctaagaagcctcggtcgctcagaatatacgaaagccatgtgggaatctcatcccatgagggtaaggtcgcctcgtacaagcacttcacctgcaacgtcctgcctcggatcaagggactgggctacaattgtattcaacttatggcaataatggaacacgcatactacgcgtcatttggttatcaaattaccagctttttcgcagcctcgtcgcggtacggaactccagaagagctgcaggagcttgtggacaccgcacactcgatgggtatcattgttcttctggatgtcgtccattcacatgcctcaaagaattccgccgatggcttgaacatgtttgacggaaccgacagctgctactttcactcggggccgcggggaactcatgacctctgggattcgaggcttttcgcttattcgtcatgggaaatccttcggtttcttctgtcgaacattcggtggtggctggaagaataccgtttcgatgggtttcgctttgatggcgtgacttcaatgctctaccaccaccacggagtgggccagggttttagcggtgattactcggaatacttcggacttcaagtggatgaggacgccttgacttatcttatgctcgcgaaccatctggtgcataccctttgtccggactcgattacgatagcagaggacgtgtccggtatgcctgcactttgctctcctatttcgcaaggaggcggggggttcgactaccggctggcaatggccataccagacaagtggatccagctgctgaaggagttcaaggatgaagattggaatatgggcgacattgtttacaccctgaccaatcggagataccttgaaaagtgtatagcatacgcagagagccacgatcaagcactggtcggagataagtcccttgcattttggcttatggacgcagaaatgtacactaatatgtcagtcctcactccctttacccccgtcattgatagagggattcaacttcataagatgattcgcttgataacccacggactgggcggagagggatacctgaactttatgggaaacgaattcgggcatcccgagtggcttgattttccgaggaaaggtaacaacgaaagctaccactacgcgcgcaggcagtttcacttgactgacgatgatcttcttcggtacaagttcttgaacaatttcgatcgcgatatgaacaggcttgaggagagatacggatggctggcagcaccacaagcatacgtgtccgagaagcatgagggcaacaagattatcgcctttgaacgagcagggctgttgttcatattcaactttcatcccagcaaatcgtatacggattaccgcgtgggtaccgcacttcctggcaagttcaagattgtgcttgatagcgacgcagcagagtacggtggacatcagagactggaccactccactgatttctttagcgaggcatttgaacataatggtcgtccgtactctctgctggtgtacattccttcccgggtggcattgattctgcaaaatgtggatctcccgaac

SEQ ID NO: 3420 - DNA, 2106 bp, Artificial Sequence
  derived and/or modified sequence
atggcagcccctatgaccccggcagcgcgcccagaagactacgaagccgccttaaatgctgcattggccgacgtgccagagctcgccaggctcctggagatagacccctaccttaagccctacgccgtggatttccagaggcggtacaaacagttttcacagatcctgaagaacattggtgaaaacgaggggggcattgacaagttctctcggggttacgagtcatttggcgtccatcgctgcgcagacggcgggttgtattgtaaggagtgggcgccaggggcggagggggtctttctgaccggagactttaatggctggaatcctttctcttacccctataagaagttagattacggaaaatgggagctgtatatcccacccaagcagaataagtcagtgctagtgccgcacggcagtaagctgaaggtagttatcacttccaaatctggcgaaatactatatcggatatctccttgggccaaatacgtggtgcgagagggtgataacgtgaactatgattggatccactgggatcccgagcactcgtacgagttcaagcatagcaggccgaagaaacccaggtcactccgcatatacgaaagccacgtgggcatctcaagtcacgagggcaaagtggcatcttataagcattttacttgcaacgtgcttccgaggatcaagggactgggctataattgtatccaactgatggcgataatggagcacgcctattacgcctcctttggttatcaaatcacctcgttttttgccgccagttctcgctacgggacacctgaagagctacaggagttggtggacacagcccattccatgggaattattgtgctcctggatgtggtgcattcgcatgcgtctaaaaacagtgccgacggcttgaatatgttcgatggcaccgacagttgctatttccatagtggaccacgcggtacgcacgatttgtgggattctcgactatttgcctatagctcttgggagattctccgatttctcctgtccaacattcgttggtggctcgaggaataccggttcgacggatttaggtttgatggtgtaaccagtatgctttatcaccatcatggcgtcggccagggcttcagcggtgactactccgaatacttcgggctgcaagtcgacgaagacgccttaacctaccttatgctcgccaaccatcttgtgcataccttgtgcccagattcaatcacaatcgcagaggacgtttccgggatgccagccctgtgtagcccaataagtcagggaggcggtggcttcgactacagattggccatggccattccggacaagtggatacagttgttgaaggagtttaaagacgaggattggaatatgggcgatattgtctatactctgaccaaccgtagatacctggagaaatgcatcgcatacgccgaatcgcatgaccaggcacttgtaggggacaagagtttggccttttggctgatggacgccgagatgtacaccaacatgagcgttttgacaccatttactcccgtcatcgaccgagggattcagctgcacaaaatgattcgtctcattacacacggcttgggcggcgagggatacctgaactttatggggaatgagttcgggcaccctgaatggttggattttccacgcaaaggaaataacgagtcataccactacgcacggcggcaatttcatctcactgatgatgacctgctgcggtataaattcctgaataatttcgaccgcgatatgaataggttggaggaacggtacggatggctcgctgctccccaggcctacgttagtgaaaagcacgagggtaacaaaattatagcattcgaaagagcaggattgctgttcatcttcaatttccacccttcaaaatcctacacagactatagagtgggaacggcattaccaggaaaattcaaaatagttctggactccgatgctgcagagtacggcgggcaccaacgtctagatcatagtactgactttttttctgaagccttcgaacacaatggacggccatatagtctcctagtctacatcccaagtagggttgcactgattctacagaatgtcgatcttccaaat

SEQ ID NO: 3421 - DNA, 2106 bp, Artificial Sequence
  derived and/or modified sequence
atggcggcgccgatgacgccggcggcgcgtccggaagattatgaagcggcgttaaatgcggcgttagcggatgtaccggaattagcgcgattactagaaatagatccgtatttaaaaccgtatgcggttgattttcaacgtcgttataaacaattttcgcaaatactaaaaaatataggtgaaaatgaaggtggtatagataaattttcgcgaggttatgaatcgtttggtgtacatcgatgtgcggatggtggtctatattgtaaagaatgggcgccgggtgcggaaggtgtatttctaacgggtgattttaatggttggaatccgttttcgtatccgtataaaaaactagattatggtaaatgggaattatatataccgccgaaacaaaataaatcggtactagtaccgcatggttcgaaactaaaagtagtaataacgtcgaaatcgggtgaaatattatatcgtatatcgccgtgggcgaaatatgtagtacgtgaaggtgataatgtaaattatgattggatacattgggatccggaacattcgtatgaatttaaacattcgcgaccgaaaaaaccgcgttcgttacgaatatatgaatcgcatgtaggtatatcgtcgcatgaaggtaaagtagcgtcgtataaacattttacgtgtaatgtactaccgcgaataaaaggtttaggttataattgtatacaattaatggcgataatggaacatgcgtattatgcgtcgtttggttatcaaataacgtcgttttttgcggcgtcgtcgcgatatggtacgccggaagaactacaagaactagtagatacggcgcattcgatgggtataatagtactactagatgttgttcattcgcatgcgtcgaaaaattcggcggatggtttaaatatgtttgatggtacggattcgtgttattttcattcgggtccgcgtggtacgcatgatctatgggattcgcgtctatttgcgtattcgtcgtgggaaatattacgttttttactatcgaatatacgatggtggctagaagaatatcgatttgatggttttcgatttgatggtgtaacgtcgatgctatatcatcatcatggtgtaggtcaaggtttttcgggtgattattcggaatattttggtctacaagtagatgaagatgcgttaacgtatctaatgctagcgaatcatctagtacatacgttatgtccggattcgataacgatagcggaagatgtatcgggtatgccggcgctatgttcgccgatatcgcaaggtggtggtggttttgattatcgtctagcgatggcgataccggataaatggatacaattactaaaagaatttaaagatgaagattggaatatgggtgatatagtttatacgttaacgaatcgacgttatctagaaaaatgtatagcgtatgcggaatcgcatgatcaagcgctagttggtgataaatcgctagcgttttggttaatggatgcggaaatgtatacgaatatgtcggtattaacgccgtttacgccggtaatagatcgtggtatacaactacataaaatgatacgtttaataacgcatggtttaggtggtgaaggttatttaaattttatgggtaatgaatttggtcatccggaatggttagattttccgcgtaaaggtaataatgaatcgtatcattatgcgcgtcgacaatttcatttaacggatgatgatttattacgatataaatttctaaataattttgatcgtgatatgaatcgattagaagaacgatatggttggctagcggcgccgcaagcgtatgtttcggaaaaacatgaaggtaataaaataatagcgtttgaacgtgcgggtctattatttatatttaattttcatccgtcgaaatcgtatacggattatcgtgtaggtacggcgttaccgggtaaatttaaaatagttctagattcggatgcggcggaatatggtggtcatcaacgtctagatcattcgacggattttttttcggaagcgtttgaacataatggtcgtccgtattcgttattagtatatataccgtcgcgtgttgcgttaatattacaaaatgtagatctaccgaat

SEQ ID NO: 3422 - DNA, 2106 bp, Artificial Sequence
  derived and/or modified sequence
atggcggctccaatgacgccggctgccagaccagaagattatgaggcggctctgaacgcagcacttgcggatgtgccggagctcgctcgtctgttggaaattgatccttaccttaagccatatgccgtagacttccaaagacgctataaacaattttcgcagattctgaagaatatcggagaaaatgagggaggaatcgataagttttcaagaggatatgaatcattcggagttcacagatgcgcggatggaggtctgtattgtaaggaatgggctcccggagcagaaggagtattcttgacaggagatttcaatggatggaatccattctcgtatccttacaagaagcttgactatggcaagtgggagttgtacataccgcccaaacagaataaaagcgtgttggttcctcacggtagcaagcttaaggtggtgattacttcgaagtcaggagaaatactctatagaatttctccatgggctaaatacgtcgtccgcgagggagataatgttaattacgactggattcactgggatccggaacacagttatgagtttaaacattctagaccgaaaaagcctagatcattgcgtatttacgagagtcacgttggaattagttcgcatgaagggaaagttgcctcatataagcactttacctgcaacgttttgccaagaatcaaaggccttggatacaattgcatacaactcatggccatcatggaacatgcctactacgcatcctttgggtaccagataacttctttcttcgcagcatcatcacgatacggcactccagaggaactgcaagaattggttgatacggctcatagcatgggaattattgtactccttgatgtggtccatagccacgcatctaagaactctgctgatggattgaacatgtttgatggaaccgattcgtgttatttccatagcggacctcgcggaacacatgatctgtgggattcgaggctctttgcgtacagctcgtgggaaattttgcgtttcttgctttcgaacataagatggtggctagaggaatacagattcgatggatttagattcgatggtgttacgtcaatgctttatcaccatcacggtgtgggacagggcttttcaggagactattctgaatactttggactgcaggtggatgaggatgctcttacatatcttatgctagcaaatcatttagtccataccttgtgtccagattcgattacaatcgctgaggatgtatctggaatgccggcactgtgctcaccaatttcgcaaggaggtggaggtttcgattatcgattggcaatggcaattcctgacaaatggattcaattgttgaaggaattcaaagacgaagattggaacatgggagatattgtgtacacattgactaacagacgatacttagaaaagtgtattgcttacgctgaatcccatgaccaggcacttgttggagataaaagtctcgcattctggttgatggatgctgaaatgtatactaatatgagcgtcttgacaccattcacacctgttattgatagaggtattcagttacataagatgattcgtttgatcacccatggacttggcggagaggggtaccttaattttatgggtaatgaattcggccatccagagtggcttgacttcccacgtaaaggaaacaacgaatcatatcactacgcaaggagacagttccatctaactgatgacgatcttttgagatataaatttcttaataacttcgatagagacatgaatcgccttgaggaaagatatggatggctggcagcgcctcaagcttatgtctcagagaaacatgaaggaaacaaaatcatagctttcgaaagagctggtctccttttcatcttcaattttcatccttctaaatcttataccgactacagggttggaactgcattgccaggaaaatttaaaattgtgcttgactccgatgccgctgaatatggaggacatcagcgtcttgatcattcgaccgattttttctccgaggccttcgaacacaatggacgtccatattcccttctagtgtatatcccaagccgtgttgctttaatcctgcaaaatgttgatttgccaaac

SEQ ID NO: 3423 - DNA, 2106 bp, Artificial Sequence
  derived and/or modified sequence
atggcggctccaatgaccccggccgctcgaccggaggactacgaagcagcgttgaacgccgccctggcagatgtgcctgaactcgcccgactcctcgagatcgacccgtaccttaagccgtacgccgtggattttcaacgccggtacaagcagttttcccagatcctcaagaatatcggcgaaaatgaggggggaattgacaaattctcgcgaggatatgagtccttcggggtgcacaggtgtgccgatggaggactttactgcaaggaatgggctccgggcgctgagggagtctttcttactggtgacttcaacggctggaacccattttcgtacccttacaaaaagttggactacgggaaatgggagttgtacatcccacctaaacagaataagtcagtgctggtgccgcacggatccaagctgaaggtggtcatcacctcgaagtctggagaaatcctgtaccgcatttccccttgggcaaaatacgtcgtcagagagggcgacaatgtgaactacgactggattcactgggaccccgagcacagctacgaattcaagcactcgcgcccaaagaagccaaggtccctccgcatttacgaatcacatgtgggtatctcgagccatgaaggcaaagttgcctcctataagcatttcacctgcaatgtgctgccccgcatcaaaggccttggatataactgtatccaactgatggctattatggagcacgcctattacgcatcgtttggatatcaaatcacgtcattctttgcagcctcgtcacgttatggcactccagaagaactccaggagctggtggataccgcgcactcgatgggcatcatcgtactcctggatgttgtgcacagccacgcgtcgaagaattcagctgatggactcaatatgttcgatggtactgatagctgctactttcattccggaccacgcggcacgcacgacctgtgggactcgcgccttttcgcctattcctcttgggaaatcctcaggtttctcctgtccaatattcggtggtggttggaagaataccggtttgacggatttcgctttgatggggtgaccagcatgctttaccaccaccatggggtcggccaggggttttcaggtgattactccgagtactttgggctgcaggtcgacgaagatgcactcacctacttgatgctggcaaaccacttggtgcacacgctgtgcccggattccatcaccatcgcggaggacgtgagcggaatgcccgcactctgcagcccgatctcgcagggcggcggcggtttcgactaccggctcgcgatggccatccccgacaagtggatccaactcctgaaagagtttaaggacgaggactggaatatgggcgacatcgtgtacactctgaccaacagacgctacctcgagaagtgcattgcctacgctgagtcccacgatcaggccctggtgggagacaaatcgctcgctttctggctcatggatgctgagatgtacactaatatgtcggtgctgaccccttttaccccggtgattgaccgaggcatccaattgcataagatgatccggctgattactcacggactgggaggagaaggatacctcaacttcatgggcaatgaattcggtcaccccgagtggctggactttcctagaaagggcaataacgagtcctaccattacgctcggaggcagttccatctcaccgacgacgatctgctgagatacaagtttctgaacaacttcgatcgtgatatgaaccggcttgaagaacggtacggttggctggcggcgccacaggcctatgtcagcgaaaagcatgagggaaacaagattatcgcatttgagagagccggactcctgtttatcttcaacttccatcccagcaaatcctacactgattatagggtcgggaccgcactgccagggaagttcaagatcgtgctggattccgacgccgctgaatacggaggccaccagcgcctggaccactcaaccgacttcttctccgaagccttcgaacacaacggtagaccttactctctcctcgtctacatcccaagcagggtggccctgatcctgcagaacgtggatctcccaaac

SEQ ID NO: 3424 - DNA, 2106 bp, Artificial Sequence
  derived and/or modified sequence
atggcggcgccgatgaccccggcagcaagacctgaagattacgaggccgccctcaacgcggcccttgcagacgtcccagaattggcccgcctcctggaaatcgatccttacctgaagccttacgccgtcgacttccaaagacgctacaaacagttctcgcaaatcctgaaaaacattggagagaacgagggtggcatcgataagttctcccgcggatacgaatcgtttggagtgcatcggtgcgctgacggcggcctgtactgcaaagagtgggcacccggggccgaaggagtgttcctgaccggggacttcaacggatggaacccattttcctacccgtacaagaaactggactacggcaaatgggaactctatatccccccgaagcagaataagtcggtgttggtcccgcacggaagcaagctgaaggtcgtgatcactagcaagagcggggagatcctttacagaatttcgccctgggcaaagtacgtcgtgagggaaggcgataacgtgaattacgactggatccattgggaccccgagcattcctacgagttcaagcattcgaggccgaaaaagcctcgctcacttagaatctacgaatcacatgtcggcatctcctcccacgaaggaaaagttgcctcgtacaaacacttcacgtgcaacgtgctgcccagaatcaaaggactcggctacaattgcatccaactgatggcgattatggagcacgcttactacgcgtcctttggctaccagatcacttccttctttgcagcttcatcacgctatggtacccccgaagaactgcaggaactcgtggatacggcacacagcatgggcatcattgtgcttctcgacgtggtgcactcacacgcgtcgaagaattcggcagacggactgaacatgttcgacggaaccgacagctgttactttcatagcggccctcggggaacccacgatctgtgggactccaggctgttcgcctactcgagctgggagatcctccggtttctgctgtcgaatatacgatggtggctggaggaataccggttcgatggattcagattcgacggagtgacctccatgctctaccatcaccacggagtgggccaggggttcagcggcgactactcggagtactttgggcttcaggtcgacgaggatgcactcacctacctgatgttggcaaaccacctcgtgcacaccctctgtcccgactccatcaccatcgccgaggacgtgtcaggaatgccagctctgtgctctccgatcagccaaggaggaggtggattcgattaccgcctggcgatggcaatccccgacaaatggatccagctgcttaaggaattcaaagacgaagattggaatatgggcgatatcgtgtacaccctgaccaatagacggtacctggagaagtgcatcgcctacgctgagtcacacgatcaagcgctggtgggcgataagtccctggctttttggctcatggacgccgaaatgtacactaatatgtccgtcctgactccgttcactcctgtgatagacagaggtatccaattgcataagatgattcgcctcattactcacggcctgggcggagaaggatatctgaactttatgggaaacgagttcggacaccccgagtggctggactttccacggaagggaaacaacgaatcgtaccattacgcccgccgccagttccatctcactgacgacgaccttctccgctacaagttcttgaataactttgatagagacatgaacagacttgaggaacgctacgggtggctcgcggccccgcaggcttacgtctcagagaaacatgagggcaacaaaatcattgcgttcgagagggccgggttgttgtttatctttaacttccatccatccaaatcgtacaccgactatcgcgtgggtaccgccctccctggaaaattcaagatcgtccttgattcggacgctgccgagtacggaggccatcaaaggttggatcattccacggacttcttctccgaggcgtttgaacataacggaaggccgtactcgcttctggtctacatcccgtcccgcgtcgcacttattctgcaaaacgtggacttgcctaac

SEQ ID NO: 3425 - DNA, 2106 bp, Artificial Sequence
  derived and/or modified sequence
atggccgctccgatgaccccagccgcgcggcctgaagattacgaagctgcgctgaacgcggccctggccgacgtgcctgaattggctcggctgctggagattgacccgtaccttaaaccttacgcagtggacttccagcggcgctacaagcagttctcgcagattctgaagaacatcggagaaaatgagggaggaatcgacaagttctcgcggggatacgaatcatttggggtgcaccggtgcgctgacggtggcctgtactgcaaggagtgggcaccgggagccgagggagtgtttcttaccggcgacttcaacggttggaacccattttcatacccgtacaagaagttggactacggaaagtgggagctgtacatccctccgaagcaaaacaagtcggtgttggtcccgcacggatccaagctcaaagtcgtgatcacctccaagtcaggcgaaatcctgtaccgtatttccccatgggctaagtacgtggtgagagaaggagataacgtgaattacgactggatccactgggatcctgaacattcctacgaattcaagcactcacgcccgaaaaaaccccgctccttgagaatttatgagtcacacgtgggaatctcctcacatgagggaaaggttgcatcatacaaacactttacttgcaatgtcctgccgcggatcaaaggcctcggatacaattgcatccagctgatggcgatcatggagcatgcgtactacgcgtccttcggataccaaattactagcttcttcgccgcttcgtcgcgctacgggaccccggaggagctgcaggaactcgttgacactgctcatagcatgggtatcatcgtgctgctggacgtggtgcattcgcacgcgtcaaagaattcagccgacggactgaatatgttcgacggcaccgattcctgctatttccatagcggtccgagaggaacccatgacctgtgggacagcaggctttttgcctacagctcgtgggaaatccttagattccttctgtccaatatcaggtggtggctggaagagtacagattcgatggattcaggttcgacggtgtgacgtcaatgctgtatcaccaccacggggtgggccagggattcagcggagactactcggagtacttcggccttcaggtggacgaagatgccctgacgtacctgatgcttgcgaaccacctcgtgcatactttgtgcccggactcgatcaccatcgccgaagatgtctcaggtatgccggctctctgctcgcctatctcgcagggcgggggcggattcgattacagacttgctatggctattcccgacaagtggatccaactgctgaaggagttcaaggatgaagattggaacatgggagacattgtgtacaccctcactaacagaagatacctggagaagtgtatcgcatacgcggagtcgcacgatcaagctctggtcggagacaaatcgctggcattctggctcatggacgccgaaatgtacaccaacatgtccgtcctgaccccgttcactccggtgattgatagaggcatccagctgcacaaaatgatccggctgatcactcacggcctgggaggagagggatatctgaatttcatgggaaacgaattcggccacccggaatggctcgactttccaagaaagggaaacaacgagtcctaccactacgcccggcggcagttccatctgactgacgacgacctgctgcgctataagttcctgaacaactttgaccgggatatgaacagactcgaggagcgctacgggtggctggccgctcctcaagcgtacgtctcggaaaaacatgaaggtaacaagattatcgctttcgagcgcgccgggctccttttcatcttcaacttccacccaagcaaatcgtacactgattaccgcgtcggaactgcactgccaggaaagtttaagattgtgctggactcagatgcagcagagtacggagggcaccaacggctggatcattcaaccgactttttctcagaggctttcgaacacaacggacgcccgtattcgctgctggtgtacatcccaagcagggtggcgctcatactgcagaacgtggatcttcctaac

SEQ ID NO: 3426 - DNA, 2106 bp, Artificial Sequence
  derived and/or modified sequence
atggcagctcctatgaccccagccgctaggcccgaggactatgaggcagccctcaatgctgcactggccgatgtccccgaactggctcgtctcctggaaatagacccatatctgaagccgtatgccgtggactttcaaagaagatataaacagttctcacaaatcctgaaaaacatcggggagaacgagggcggcattgacaagtttagcaggggatacgaatccttcggtgtgcaccgctgtgccgacggcggactgtactgcaaagagtgggctcctggggctgagggagtgtttcttaccggggattttaacggatggaacccgttcagttacccttataagaaattggattacggcaaatgggaattatacattccgcccaagcagaacaaatccgtcctggtgccccacggttcaaagctgaaagtagttatcacttctaagtcaggtgaaatcctttatagaatctctccttgggcaaaatacgtagttagagagggcgacaacgtcaactacgattggattcactgggaccccgagcactcatacgagttcaaacattcacggcctaaaaaacccaggtctctgcggatctacgagagtcacgtgggtatctcttcacatgaggggaaagttgctagctataaacactttacctgcaacgtcctcccacgcatcaaaggcctcggatacaactgcatccagttgatggcaattatggaacatgcatactacgcatccttcggatatcagatcacatccttctttgctgcctctagtcgctacggcacccctgaagagctccaggaactggtagataccgctcactccatggggatcattgtgctgctggatgtagtgcatagccacgcttccaaaaatagtgccgatggtctgaacatgttcgatggaactgatagttgctactttcatagtggaccgaggggaactcacgacctctgggactcacggctgtttgcatacagctcttgggagattttgagatttctgctgtccaacattaggtggtggttggaagaatatagatttgacggattccgatttgacggtgtcactagcatgctgtaccatcaccatggagtaggccaggggtttagtggagactattcggaatactttggccttcaggtcgatgaggatgctcttacctatttgatgctagcgaaccatctggtccacacactttgtccagacagtatcacaatagctgaggacgtttccggaatgccagctctctgttcaccaatctcccagggcgggggcggctttgattacaggctggcgatggctatccccgataaatggatccagctgctgaaagaatttaaagacgaggattggaacatgggcgacattgtgtataccctgaccaaccggcgctatctggaaaagtgcattgcatacgctgaaagtcacgaccaggcgctggttggtgataaatctctggcattctggctgatggacgcggagatgtacaccaatatgagcgtgcttaccccttttacaccagtcatagatcggggcatacaactccacaaaatgatcaggcttattacccacgggctgggaggcgagggatacctgaacttcatgggaaacgagtttggacatccagagtggctggacttcccaaggaagggaaacaatgagagctaccattacgctagaaggcagtttcatcttaccgatgacgatctgttgaggtacaaattcctgaacaactttgaccgggacatgaacaggcttgaggagcgttatggctggttggcagcaccccaggcttacgtctcagaaaagcacgagggcaataaaataattgcatttgagagagccggcctgctttttatttttaactttcatcccagcaaaagctacactgactatcgcgttggaaccgcattgcctggcaagttcaagattgtccttgacagtgatgccgcagagtacggtggccaccagaggcttgaccactccaccgatttcttttccgaagcatttgagcacaatggcagaccttactctctgcttgtgtacatccctagcagagtggcgctgattttgcagaacgtggatctccccaat

SEQ ID NO: 3427 - DNA, 2106 bp, Artificial Sequence
  derived and/or modified sequence
atggccgcacctatgacaccagctgctaggcccgaagattatgaggccgctctaaacgcggcattggccgatgtacccgagcttgcgaggttgctagaaattgatccttatctcaaaccatatgccgtcgatttccagcgccgctacaagcagttttctcagatcctcaaaaatataggagagaatgaaggagggatcgacaaattttcacgcggatatgaatcatttggagttcacaggtgtgcggatggaggactgtactgcaaagaatgggccccaggagcagagggggtttttcttacaggggattttaacgggtggaacccattttcttatccctataaaaagctcgattacggaaaatgggaactttacatcccaccaaagcagaacaaatcggtactcgtgcctcacgggtcaaaactcaaggttgtaattacatccaaatccggagaaatactctatagaatatccccatgggctaagtatgtcgttagagaaggggataacgtcaactatgattggattcattgggatccagagcattcttacgaattcaaacacagtagaccaaagaaacctagatctctaagaatatatgaatcccacgtcggaattagtagtcacgaagggaaagtggcgagttataaacactttacatgtaacgtactcccccggattaaagggctaggatacaactgtattcagctgatggccataatggaacacgcatattacgcttctttcggataccagatcacatcgttttttgccgctagttccaggtatgggacacccgaagaactgcaggagctcgtcgacacagcccactcaatgggaattatcgttttactagatgtcgtccatagtcacgcatccaagaattcagcagatggacttaatatgtttgatggaacagattcatgctatttccactctggaccccggggaacacacgacctttgggattctaggctctttgcatattcttcttgggaaatcctccggtttcttctttctaacatcaggtggtggctcgaagaatataggtttgacgggttcaggtttgatggagttacaagtatgctctaccatcatcacggagttgggcaggggttttccggggattacagtgaatattttggacttcaggttgacgaggatgcgctgacatatctaatgcttgccaatcacctcgttcacactctgtgtcccgattccattactatcgccgaagatgtttccgggatgcctgctctgtgtagtcctatatcacaggggggaggagggtttgactatcggcttgccatggctattcccgataaatggatccagttgctgaaagaattcaaggatgaagattggaacatgggagacatcgtttatactctcacaaaccgccggtatctcgaaaaatgtattgcatatgccgagtcccatgatcaggctctagtcggagataaatcgctggcattttggctgatggatgccgagatgtatactaacatgagtgtcctaactcccttcactcccgtcatcgatcgagggattcagctccacaagatgatacgcctcatcacacatgggcttgggggagaaggatatcttaactttatgggaaacgaattcggacacccagaatggctggattttccaaggaaggggaataacgaatcttatcattatgcacgacggcagtttcatttgactgatgacgatctcttgagatataaattcctaaacaactttgatcgagatatgaaccgattagaagaacggtacggatggctggcagcacctcaggcctatgtgagtgagaagcatgaaggaaacaaaatcatagcctttgaacgcgccggacttctctttatttttaattttcacccctcaaaatcttatacagattatcgggttggaacagctctgcccgggaaattcaagatagtgcttgattcagacgcagccgaatatgggggacatcaaaggctagatcattccacagatttttttagtgaggccttcgaacacaatggaaggccctactctctgttagtttacataccttctcgagttgcactcatcctgcagaatgtagatctccctaac

SEQ ID NO: 3428 - DNA, 2106 bp, Artificial Sequence
  derived and/or modified sequence
atggctgcccctatgacccccgctgcacgcccggaggattatgaggctgcgctgaacgccgctctcgccgacgtgcctgagctcgcacgtctccttgagatcgatccatacttgaagccctacgcggtcgacttccagcgtaggtacaagcagttttcccagatcctgaagaacatcggcgaaaacgagggcggcatcgataagttctctcggggctacgagagtttcggcgtgcaccgttgcgctgatggcggcctttactgcaaggagtgggcccccggtgccgaaggtgtgttcttgacgggcgattttaacggatggaaccccttttcttacccgtataagaagctggactacggaaagtgggagctctatatcccccctaagcaaaacaagtcggttctggtgccgcatggcagtaagctgaaggtggtcatcacctctaaaagcggtgagattctctatcgcatcagcccgtgggccaagtacgtggtgcgcgagggtgacaacgtcaattacgactggattcattgggaccctgagcatagctacgagtttaagcactctcgtcctaaaaagccccgctcgctgcgcatctacgagtcccacgtgggaatctccagccacgagggcaaggtcgcttcctataagcacttcacctgcaacgtattgccgcgtattaagggtttaggatacaactgtattcagctgatggcgattatggaacacgcatattacgcctcttttggataccagatcactagtttcttcgctgcaagttccagatacggtacccctgaggaactgcaggagctcgtcgacaccgcccattctatgggtattattgttctgctagatgtggttcacagccacgcaagtaaaaattcggctgacggcctcaacatgttcgatggcaccgattcttgctacttccactccggaccgagaggtacccacgatctttgggattcccgcctattcgcctattcctcgtgggagatcctccggttccttctttccaacattcgctggtggttggaagaatatcgttttgatggtttcagattcgatggggtcactagcatgttgtaccaccaccatggcgtgggtcagggcttctcaggcgattactctgagtactttggactccaagtcgacgaagatgcccttacctaccttatgctggcaaaccaccttgtccacaccctatgcccggacagcattaccatcgctgaggacgttagtggtatgcccgcgctctgttcgccaatcagccagggcggcggcggcttcgactaccgcctggctatggccatccctgacaagtggattcagctcttgaaggagttcaaggacgaggactggaacatgggtgacattgtgtacaccctgacaaaccggcgttatctggagaagtgcatcgcctacgcggagtctcatgaccaagccctggtcggtgacaagtctttggctttctggctgatggatgctgagatgtatacaaacatgtccgttttgacgcctttcacgcctgtgatcgatcgtggcattcagctgcacaagatgatccgcctgatcacacatggactcggcggagaggggtacttgaactttatgggtaacgaattcgggcaccccgaatggttggacttcccgcgcaagggaaataacgagtcttaccattacgcccggaggcaattccatctgactgacgacgatctgctgcgatacaaattcctgaataacttcgatcgcgatatgaaccggctggaggaacgctatggctggctcgccgcgccgcaggcctatgtctccgaaaagcatgagggcaacaagataatagcgtttgagcgcgcgggtctgctctttatttttaatttccaccccagcaagagctacaccgactaccgcgttggtaccgccctccccggcaagttcaagatcgtactagacagtgatgccgctgagtatggcggccaccaacgccttgatcactcgaccgacttcttctctgaggccttcgaacacaacggacgcccctactccctgctcgtttatattcctagccgtgtggcacttatcctgcagaacgtcgacctgccgaac

SEQ ID NO: 3429 - DNA, 2106 bp, Artificial Sequence
  derived and/or modified sequence
atggctgccccaatgactcccgcggctcgccccgaagactatgaggctgctttgaacgctgccctggcggacgtgccagagctagctcggctgcttgaaattgacccttacttgaaaccatatgctgttgactttcagcgacggtacaaacagttttcccagatcctgaagaacatcggagaaaatgaaggaggcattgacaaattctcaagaggctacgagtccttcggagtgcatcgttgcgctgacggcggtctttactgtaaggagtgggccccaggggccgaaggtgtcttcctcaccggggatttcaacgggtggaacccattctcatacccatacaaaaaactggactacggcaagtgggagctgtacataccacccaagcagaataagagtgtgctggtgccacacggatccaaactgaaggtggttataacgtccaagtcaggagagatcttgtaccgtattagcccctgggcaaagtatgttgtgagagaaggagataacgtcaactacgactggatccactgggatcctgaacatagctacgagttcaaacacagcaggccaaaaaagccccgttccttgcgtatttatgaatcccatgtgggaatatcctcacacgaaggaaaagtggcatcttacaagcatttcacctgtaatgtcctgccccggattaaaggcctgggatataactgcattcagctcatggccattatggaacacgcttactatgcctcattcggctaccagattaccagttttttcgcggctagttccaggtatggaacaccagaggagctgcaggaactggtagatactgcccactcgatggggataatcgtgctgctggacgtcgtgcacagtcacgcttccaagaacagcgccgacggactaaacatgttcgacggcactgatagctgctacttccacagcggtcccagggggacacacgacctgtgggatagcagactgttcgcctacagcagttgggagattctgaggtttctgctaagcaacatccgctggtggctggaagagtaccgatttgacgggtttaggttcgatggagtgacgagcatgctgtaccaccatcatggtgtgggccaaggattttcaggggattactctgagtactttgggctgcaggtagatgaggatgctctaacatacttgatgcttgccaaccacctggtgcacaccctgtgcccagactccatcaccatagccgaggatgtgagtgggatgccagccctgtgctcccctattagtcagggagggggggggtttgactacagactcgcaatggccattcctgataaatggatccagctgttgaaggagttcaaggacgaggattggaacatgggtgatattgtgtacacactcactaacagacgttacctggagaaatgtatcgcctatgcagagtctcacgatcaggcactggtaggggataaaagccttgctttctggctgatggacgcagagatgtatactaacatgtccgtgttaactccttttacgcctgtcattgataggggcatccagctccacaaaatgattaggttgatcacacacgggctcggtggcgagggctacctaaactttatgggtaacgagttcggtcatccagaatggctggactttccccgaaaaggcaacaacgagtcgtatcattacgctaggagacagttccacctgaccgacgacgatctcctgcgctacaagtttttgaataacttcgacagagatatgaaccgtctggaagagcgatatggatggctggcagccccgcaagcgtacgtatccgaaaaacatgagggcaacaaaatcatagcgtttgagcgtgcagggcttttatttatattcaatttccacccgtccaagtcctatacagattatagagtgggcacggccctcccaggcaaattcaagattgtcctggactccgatgctgccgagtacggcggccaccagagactggatcactctactgatttcttcagcgaggcatttgagcacaacgggagaccctatagtttgctcgtttacatccccagccgagtcgcgctgatactgcaaaatgtagatctgcctaat

SEQ ID NO: 3430 - DNA, 2106 bp, Artificial Sequence
  derived and/or modified sequence
atggcggcacccatgacgccagctgcgcgcccagaggactacgaggccgctcttaacgccgcattggccgatgtgcctgaacttgctcggctcctggagatcgacccatatctgaagccatatgccgtggactttcagagaaggtataagcagtttagccagattctgaagaacattggcgaaaatgaggggggcattgataagttcagtaggggttatgagagctttggagtgcatagatgcgcggacggcggcttgtattgcaaggagtgggcgccaggtgctgagggggtgttcctgaccggggactttaacggatggaatccattctcttatccgtacaaaaagctcgactatgggaagtgggagttgtatatccctccgaaacagaacaagtctgtgttggtgccccatggctctaagcttaaagtcgtaatcacatctaaatcaggagaaatcttgtatcggatctccccctgggccaaatacgtcgtcagagagggggacaatgttaattacgattggattcattgggacccagagcatagctatgaatttaagcactcacgccccaaaaaaccacgctctctgagaatctatgagtctcatgtgggaatttcttcccatgagggtaaagtggcatcctacaaacacttcacgtgcaacgtgctgcctcggatcaagggactcggatataactgtatccagctgatggccattatggagcatgcctattacgcctccttcgggtaccagatcaccagtttttttgccgcgagcagtaggtatggtacccctgaggaactgcaagagttggttgacaccgcacattctatgggtattattgtgcttctggacgttgtccactcccacgctagcaagaactctgccgacggtctcaatatgttcgacggaacagactcttgctacttccattctggcccccgaggcactcatgatctctgggactcccggcttttcgcctattcctcttgggagattctccggtttcttctgtctaacatacggtggtggcttgaggagtacaggttcgatggctttcggttcgatggggtgacatcaatgctgtatcaccatcacggtgtcggtcaagggttttccggtgactatagcgaatactttggactccaggtagatgaggatgcactgacatacctgatgctggctaaccatctcgtccacactctgtgtcccgattccatcacaatcgcggaagacgtctccgggatgccggcactgtgtagccccatttcccagggcggaggcggtttcgattaccgactggccatggcgattccggacaagtggattcaactgcttaaagaattcaaagacgaggattggaatatgggggacatcgtgtacactctgaccaaccgacgctatctggagaagtgtatcgcctacgcagagtcacacgatcaggcactggtgggtgacaagagtctggctttctggctgatggatgcagagatgtacactaacatgtctgtcttgaccccgtttacgcctgtcattgaccgggggattcagctgcataagatgatccgcctcatcactcacggccttgggggagaaggatatttgaacttcatgggcaatgaattcggacatcccgaatggctggacttccccagaaaggggaacaatgaatcttaccactatgccagacggcaattccatctgacagacgatgacctcctgaggtacaagtttctgaataactttgacagggacatgaacagactggaggagcggtatggttggctggccgccccccaggcgtacgtttccgagaagcatgaggggaataagatcatagcctttgagcgggccggactcttgttcatttttaatttccatccatccaagtcatacacagactatcgggtggggaccgccctgcctgggaagttcaagattgttctcgattccgacgctgcagagtacggtggacatcagaggcttgatcactccactgatttcttttcagaggcatttgagcacaacggcagaccttactctctgctggtgtacatcccatcacgggtggctctgatcctccagaacgtggacctgcctaac

SEQ ID NO: 3431 - DNA, 2106 bp, Artificial Sequence
  derived and/or modified sequence
atggctgctccaatgactccagctgctagaccagaagattatgaagctgcacttaatgctgctttagccgatgttccagaacttgcacgtcttcttgaaattgatccatatcttaaaccatatgctgttgattttcaaagaagatataagcaatttagtcaaattctaaagaatattggagaaaatgagggagggatcgataaattctctagaggatatgagagctttggagtacatcgttgtgcagatggaggattatattgtaaagaatgggctccaggagcagaaggagtttttttaacaggagattttaatggatggaacccattcagttatccatataaaaaattagattatggaaaatgggaactttatattcctccaaaacaaaataaatcagttttagtaccacacggatcaaaattaaaagtagttataactagtaaatcaggagaaattttatatagaatttcaccttgggccaaatatgtggttagagaaggagataatgtaaattatgactggattcattgggatccagaacacagttacgaatttaaacattctcgtccaaaaaaacctagatcacttagaatttatgaatcacatgttggtatttcaagtcacgaaggaaaggttgctagttataaacattttacttgtaatgtattaccaagaattaaaggattaggatataactgtatccaattaatggcaattatggaacatgcttactacgcttcattcggttatcaaataacatcattttttgcagcatctagtagatatggaactccagaagaattacaggaacttgttgatactgctcactctatgggaattatagttttattggatgttgttcatagtcatgcttctaaaaattctgctgatggacttaatatgtttgatggtacagattcttgttattttcactctggacctagaggtacacatgatttatgggattctagattatttgcttattcttcttgggaaattcttagattcttacttagtaatattagatggtggttagaagagtatagatttgatggatttagatttgatggtgttacttcgatgctttatcaccatcatggtgtaggacaaggattttctggtgattattcagaatattttggactacaagtagatgaagacgctcttacatatttaatgcttgcaaatcatttggtacatacattatgtcctgattcaataacaattgcagaagatgtttcaggtatgccagccttatgttctccaatttcacaaggaggaggaggatttgattatagacttgcaatggcaataccagataagtggattcaacttcttaaagaattcaaagatgaagactggaatatgggtgatatagtttatactttaactaatagaagatatcttgaaaaatgcattgcatatgctgaatctcatgatcaagcacttgttggagataaatctcttgctttttggcttatggacgctgagatgtatactaatatgagtgtgttaactccttttacaccagtaattgatagaggaattcaattacataagatgattagattaattactcatggattaggaggagaaggttatcttaattttatgggaaacgagtttggacatccagaatggcttgatttcccacgtaaaggaaataatgaatcttatcattatgcaagaagacaattccatttaactgatgatgatcttttgagatataaatttctaaataattttgatagagatatgaatcgacttgaagaacgatatggatggttagctgcaccacaagcatatgtatcggaaaaacatgaaggaaataagattattgcatttgaacgagcaggattattatttatttttaattttcatccatcaaaaagttatacagattatagagtcggaacagcacttccaggaaaattcaaaattgttctcgattctgatgctgctgaatatggtggtcatcaaagattagatcattcaactgattttttctcagaagcttttgaacacaacggtagaccttatagtctccttgtttatattccatcaagagtagctcttattttacaaaacgtcgacttaccaaat

SEQ ID NO: 3432 - DNA, 2106 bp, Artificial Sequence
  derived and/or modified sequence
atggccgcccctatgacccccgctgctcgacccgaggactacgaagccgccctgaacgccgctctggccgacgttccagaactcgcaaggctattagaaatcgatccttacttgaaaccatatgcagtggatttccaaagacgctacaaacaattctcccagatcctgaagaatataggggaaaacgagggaggaatagacaagttcagcagaggctacgagagctttggagtgcaccggtgcgccgatggcggactctactgtaaggaatgggcacccggcgcggaaggagtgttcctcacgggcgactttaacggatggaatccttttagctacccttataagaaactggattacgggaagtgggagctctacatcccccctaagcagaacaagtccgtgctggttccccacggatctaaactgaaagtggtgatcacctccaaatctggcgagatcctatatcgaattagcccttgggcgaagtacgtagttcgcgagggtgataacgtgaactatgattggatccactgggatcccgagcattcgtatgagtttaagcacagccgacccaagaaaccccggtctttgcggatctatgagagtcacgtcggcatcagtagccatgagggcaaggttgcctcttacaagcattttacatgcaatgtgcttcctaggatcaagggactgggctacaactgtattcagctgatggccattatggaacacgcgtattatgcttcattcggctatcagatcacttcgttcttcgctgcttccagccgctacggaactcctgaggagctacaggaactcgtcgataccgcacactccatgggcatcattgtattactggatgtggtccattcccacgcctccaaaaactccgcggatggcctgaatatgttcgacggcacagacagttgctattttcattccggacctcgcggtacccacgatctatgggattccaggttgtttgcctattcgagctgggagatcctgcgttttttgctgtcgaacattaggtggtggctcgaagagtacaggttcgatggcttccgtttcgacggcgtgactagcatgctgtaccaccatcatggcgtcgggcaggggttcagcggagattacagtgagtatttcgggctgcaggtcgacgaggatgccttgacatacctcatgctggcgaaccatttggtgcacaccttatgccccgattccatcacaattgcggaggatgtcagcgggatgccagccctctgctctccaatcagccagggcggaggaggctttgattacaggcttgctatggctattcctgacaagtggatacaactgctcaaggagttcaaagacgaggactggaatatgggagacatcgtctacaccctgacaaataggaggtatctggagaagtgtatcgcatatgcagaatcacatgaccaggccctggtgggagataaatcgctggcgttttggctaatggacgctgagatgtacacaaacatgtctgtcctcacacccttcactcccgtcatcgaccggggcattcaattgcacaagatgatcaggctcatcacccacggattaggaggtgaaggctacctgaactttatggggaacgaatttggacaccccgagtggttggactttccccgcaagggtaacaacgaatcctatcactatgcccggcgacagttccaccttactgacgatgatctgctacggtacaagttcctgaataacttcgacagagacatgaataggctggaggagcgctatggatggcttgccgcaccccaggcatacgtgagcgagaagcacgagggcaacaaaatcattgcattcgagcgcgcaggattactgttcatctttaacttccacccttctaagtcttacaccgactaccgggttgggaccgcattgcctgggaagtttaagattgtcttggactccgatgccgccgagtacggaggccatcagcgattagaccactcgacggattttttttctgaagccttcgagcataacggtcggccctattccctgctggtctatattccaagccgcgtggcactgatcctgcagaacgtggatctgcccaac

SEQ ID NO: 3433 - DNA, 2106 bp, Artificial Sequence
  derived and/or modified sequence
atggccgcccctatgacacctgcagccagaccagaagactacgaggcagccctgaacgcggctctcgccgatgttcctgagttagcacgtctcctcgagatcgacccttatttgaagccttacgcagtcgattttcagcgccggtacaaacaattcagccagattctgaaaaatatcggggagaatgaggggggcatcgacaagttctcccgtgggtatgaaagttttggtgtacatcggtgtgctgacggggggttgtattgtaaagagtgggcccccggtgccgagggtgtctttcttacaggtgactttaacggctggaacccgttcagctacccctataagaagctggattatggcaaatgggagctgtacatcccccccaagcagaataagtccgtcttggtgcctcacggaagcaagctgaaggtggtgataacttcgaaaagtggtgaaattctctaccggatctccccttgggcgaaatatgtagttagagagggcgacaacgtcaattacgactggatacattgggatcctgagcacagctacgaatttaaacacagcaggcccaaaaaaccaaggtcgttacgcatctacgagagtcatgttggtatctcgtctcatgaaggcaaagttgcatcttacaaacatttcacctgcaatgtacttcctcgaataaagggcctcggctataattgtatacagctgatggctattatggaacacgcatactacgcctccttcggataccagattactagctttttcgcagcgagctctaggtacggcacccccgaggagctccaggagctggtggacactgctcactccatgggcattatcgtgctcctggatgtggtccattcccacgcttccaagaatagtgctgatgggctgaacatgttcgatggcaccgattcatgctattttcacagtggccctcgggggacgcatgacttgtgggatagtagactgtttgcctacagtagctgggaaatccttaggttcttgttatctaacataaggtggtggttagaggaatatagatttgatggcttcaggtttgacggcgtaacttctatgctgtaccatcaccacggggtgggccagggcttttccggcgattactccgagtattttggccttcaggtggacgaagacgcattgacatacttgatgctcgcaaatcacttggtccacacattgtgtccggatagcatcactatcgcggaggacgtaagcggtatgcccgcactgtgcagtcccataagccagggaggcggaggcttcgattataggctggccatggccatccctgataagtggatccagcttttgaaggaattcaaagacgaagattggaatatgggcgacatcgtatatacgttgaccaatagacggtacctggaaaagtgtatcgcctatgccgagagccatgatcaggcactggtcggcgacaaatccctcgccttctggttgatggatgccgagatgtacaccaacatgagcgtccttacccctttcacgcccgtgatagataggggtattcagctgcataagatgattcgtctcatcactcacggactcggcggcgagggctatttaaatttcatggggaatgaatttggccacccagaatggttggacttcccacggaagggcaataacgaatcctaccattacgcccggcgccagtttcatttgaccgacgatgatctgctccgttataagttcctgaataactttgaccgcgacatgaacagactggaggagagatacggctggctcgccgcaccccaggcttacgtgtctgagaaacacgagggaaacaaaattattgcatttgaacgagccggactcctgttcatttttaattttcatccttctaagtcatataccgattacagggtggggactgcactgcctggaaaattcaagatagtgctggacagcgacgccgccgaatacggtggtcaccagcgcctcgaccactctactgatttcttttctgaagctttcgagcataatggacgtccctactctttgctggtgtacattcccagtagggtagctctgatccttcagaacgtcgacctcccaaac

SEQ ID NO: 3434 - DNA, 2106 bp, Artificial Sequence
  derived and/or modified sequence
atggcggctccgatgacccccgctgctcggcccgaggactatgaagctgccttgaacgcagctctcgccgacgtcccagaactagctaggctcctggaaatcgatccatacttgaaaccctatgctgtcgactttcagaggagatataaacagtttagtcagatactcaagaatattggagagaatgaaggcgggatagacaagttctctcgcggctacgagtcgtttggagtccaccgctgtgctgatggtggcctctactgtaaagaatgggcgcctggcgccgagggtgtttttctgaccggtgattttaacgggtggaacccctttagctacccatataagaaactggattacgggaaatgggaattgtatattccccctaagcagaacaaaagcgtgctggtcccccatggatctaagctaaaagttgtcataacatcgaagtccggagagatactctatcggatctctccctgggctaaatacgtggttcgggagggcgacaatgtgaactacgactggatccactgggacccggagcattcttacgaattcaagcattctagaccgaagaagcctagatctctgcgaatatacgaaagccatgtgggcattagtagccacgaaggcaaggtagcttcttataagcattttacctgcaacgtgctgcctcggataaagggcctgggctacaattgcatccaactcatggccatcatggagcacgcatattatgcctcctttggctaccagattaccagtttcttcgcagccagcagcaggtatggaactccggaagagctacaggagctggttgatactgcacattcgatgggtatcattgtgctactggacgtcgttcattcacacgcatccaaaaattctgccgacggcttaaacatgttcgatggaaccgattcttgctacttccacagcggccccagaggtacccacgatctgtgggacagccgcttgttcgcctactcttcatgggaaattctgagattcctactcagcaatatcaggtggtggttagaggagtatcgcttcgacgggtttcgctttgacggcgtgacatccatgctttaccaccaccatggtgttggccaggggttttccggagattactctgagtatttcggcctgcaggtggatgaagacgcgttgacctatctaatgttggccaaccatttggtgcacacactgtgtcccgattctatcacgattgccgaagacgtttccggcatgccggccctctgttccccgatttcacaggggggtgggggtttcgattatcgcctggctatggccattccggacaagtggatccagctgctaaaagagtttaaggacgaagattggaatatgggtgacattgtctacacgctgaccaatcgacgctatctagaaaaatgcatcgcctacgctgagagtcacgatcaggctctggttggcgacaaatctctcgcgttctggctgatggatgccgaaatgtatactaacatgagcgtgcttactccttttaccccagttattgatcggggaattcagctgcacaaaatgattcgcttaatcacccacggcttgggaggagaggggtacctgaacttcatgggcaacgagttcggacaccctgaatggcttgacttcccccggaagggcaacaacgaatcctaccactacgcccgaagacaatttcaccttactgacgatgatctgcttaggtataagttcctcaacaacttcgatcgggatatgaaccgtctggaagagcggtacggatggttggccgcaccacaagcttatgtgtctgagaagcatgaaggcaataaaataatcgcattcgaacgggccggtctgctgttcatctttaatttccatccaagtaaaagctacactgattaccgcgtgggtactgctctccccggcaaatttaaaatcgtactcgatagtgatgctgcagagtatggaggacatcaaaggctcgaccacagcactgattttttcagcgaggcatttgaacataacgggaggccttattccctccttgtctacattcccagtcgggtggcgttaatcctgcagaacgtagacttgcccaac

SEQ ID NO: 3435 - DNA, 2106 bp, Artificial Sequence
  derived and/or modified sequence
atggcagcccctatgacgcctgcagcgcgcccggaggattacgaagcagcactgaacgcggcacttgcagatgtgcctgaactggcacgtctgctggagattgatccatacctgaagccttacgcagtggatttccagagaagatacaaacaattctcacagatactcaagaatatcggtgagaacgaaggcgggattgataagttcagccgggggtacgagtcattcggcgtccatcgctgtgcagatggaggtctttactgcaaagaatgggcaccaggtgcagagggggtgtttctgactggcgatttcaatgggtggaatcctttttcctacccatacaaaaaactggattatggaaagtgggaattgtacatcccaccaaagcagaacaaatcagtgcttgtccctcatggatctaagctgaaggtggtgatcacctccaagtcgggggaaattctttaccgtatttcgccttgggcaaagtacgtggtgagggaaggcgacaacgtcaactacgactggatccactgggacccagagcactcctacgaattcaagcacagccggcctaagaagccacggtcccttaggatttatgagtcgcatgtgggaatatcaagccacgagggtaaagtcgcatcctacaagcatttcacttgtaacgtcttgccccgcattaaagggcttggatataactgtattcaattgatggcgataatggagcacgcctactacgcctcgtttggttaccaaattacctccttctttgcagcctcctcgagatacggtactccagaagagcttcaggagctggtcgacactgcacacagcatgggtatcattgtccttctggatgtggtgcattcccacgcgtccaagaactcggcggatggtcttaacatgttcgacggcaccgactcatgttactttcactcgggcccgcgcgggactcatgatctctgggattcgagactgttcgcctactcgagctgggagattctccgattcctgctctcgaacattcggtggtggttggaagaatacaggtttgatggttttagatttgatggggtgacttccatgttgtaccatcaccacggagtgggccaaggctttagcggagattactcggaatactttggtttgcaagtggatgaggatgcattgacctaccttatgctcgctaatcatcttgtgcataccctctgcccagattccattaccatcgcagaagatgtgagcgggatgcctgcgctttgcagccccataagccaaggtggtggaggatttgattaccgtctggcaatggcaattcctgacaagtggattcagctcctcaaggaattcaaagatgaggattggaacatgggtgacattgtctacaccctcaccaaccgccgttatctggaaaaatgtatcgcctacgcggaatcgcatgatcaggcactggttggagataagtcgctggccttttggcttatggacgcagaaatgtacactaatatgtcggtgcttactcctttcacgccagtgattgatcgcggtattcaacttcataagatgatccgtctcattactcatgggctgggcggtgagggatacctgaactttatgggaaacgaattcggccatccagagtggcttgattttcctagaaaggggaataacgaatcataccactacgcgcgtcggcagttccatttgaccgatgacgacctcctgcggtacaaatttcttaacaacttcgaccgcgacatgaacagactggaggaacgatacggatggcttgcagcaccccaggcctacgtctccgaaaagcacgagggtaataagattatcgcatttgaacgggcgggactgctgttcatctttaacttccatccgagcaaatcgtacactgactaccgggtcggaactgcacttcccggcaagttcaagattgtgctggactcagatgcggctgaatacggtggccaccaacggcttgatcactcaacggactttttctctgaggcctttgagcataatggacgaccatactcgctccttgtgtatatcccttcacgcgtcgcactgattcttcaaaatgttgatctcccaaat

SEQ ID NO: 3436 - DNA, 2106 bp, Artificial Sequence
  derived and/or modified sequence
atggctgcccctatgaccccggcagcccgccccgaggattacgaagcagcactgaacgctgctctcgcagatgtgcctgagctcgccaggctcttggagattgacccttacctgaagccttatgccgtggattttcagcgacgttataaacagtttagccagatcttgaaaaatatcggcgaaaatgagggtggtattgacaaattttccagggggtatgaaagcttcggggtgcaccgttgcgctgacggaggcctctattgtaaggaatgggcccccggcgcagaaggcgtgttcctgacaggggacttcaacggctggaatcctttttcctatccttacaagaagctggattacggcaaatgggagttgtatatcccaccgaaacagaacaagtctgtcctagtaccccacgggtcaaaattgaaggtcgtgattacctcaaaatccggcgaaatactgtataggatttccccttgggccaaatacgtcgtacgggaaggtgataacgttaactatgactggatacactgggacccagaacactcctacgagtttaaacactcccgccccaaaaaaccccgctcactgaggatatatgaatcccatgtaggcatctcctctcatgaaggcaaggtggcatcctacaagcacttcacatgtaatgtcctgcccaggataaaggggctggggtacaattgtatccagctcatggcaataatggaacatgcctattatgcctcattcggatatcagatcaccagcttttttgccgcttccagccgctacggcactcctgaagaactccaggaactagtggacaccgcccattctatgggcattatagtgctgctcgatgtagtgcatagccatgcctcaaaaaattccgcggacggactaaatatgttcgacggcacagactcatgctacttccactccggtcctagaggcacccacgacctgtgggactcccggctgtttgcatattcctcctgggaaatcctgcgtttcctgctgagtaacatccggtggtggctggaggagtaccggttcgatgggtttcgattcgatggggtgacgagcatgctctaccatcaccacggggttggacaggggtttagcggtgactattcggagtattttggcttacaggtcgacgaggatgctctgacctacttgatgctggcaaatcacttggtgcatacgctgtgccccgactctatcactattgccgaagacgtctccgggatgccggccctatgtagccctatcagtcaggggggaggggggttcgattatcgcttggccatggccatacccgataaatggatccagctgctgaaggagttcaaggatgaggattggaacatgggggatattgtgtacacgctgaccaatcggcggtacctggagaagtgcatagcctacgccgagtctcatgaccaggcgctggtgggcgataagtccctggcattttggctgatggatgcggagatgtatacaaacatgagtgtgctgacaccttttaccccggttatcgaccggggaatccagctgcacaagatgattaggttgatcacccatgggcttggaggcgaaggatatttgaattttatggggaatgaatttggccatcctgagtggctggattttccaaggaagggcaacaatgagagctatcattacgccagaagacaatttcatctgaccgatgacgacttgctccggtacaagttcctgaataacttcgatcgggacatgaataggctagaggagcgatatggatggctggcggctccccaggcttacgtgtctgagaagcatgagggaaataaaatcatcgcctttgagcgagcgggactgctgttcatctttaacttccacccaagcaagtcttacacagattaccgagtcgggaccgctcttccaggcaaattcaaaattgtgctcgactctgatgcagccgagtacggcggccaccagaggctcgaccactcaaccgatttcttcagcgaagcattcgaacataatggccggccatacagtctgctcgtgtatattccttccagagtggcgctgatcctgcagaatgtggatctgcccaac

SEQ ID NO: 3437 - DNA, 2106 bp, Artificial Sequence
  derived and/or modified sequence
atggccgctcctatgacccccgccgccaggccggaggactacgaggccgctctgaacgccgccctcgccgacgtgccagaactggcgaggctgctcgaaatcgacccctacttgaaaccctatgccgtggattttcagagacgatataaacagttcagtcaaatcttgaagaatatcggtgagaacgagggtgggattgacaagttttcccgtggatacgagagcttcggcgtgcatcggtgtgccgacggcggcctgtactgcaaagagtgggccccgggtgccgagggggttttcctcacaggcgactttaacgggtggaaccctttcagttacccatacaagaagttggattatggaaaatgggaactttacatccctcccaagcaaaacaagagtgtcctagtgccccacggttctaaacttaaggtggttatcacctcaaagtccggtgaaatactatataggatcagtccatgggccaaatatgtggttcgggagggagacaatgttaactacgattggattcactgggacccagagcactcatatgagtttaagcattccaggcccaaaaagccacgatccctgagaatctacgagtcacatgtaggcatttcaagtcatgaaggaaaggtggccagctataaacatttcacatgtaacgtactgccaaggataaaaggactgggttacaattgtattcagctcatggctatcatggaacacgcgtactatgcttctttcggctaccagatcacctcgttcttcgctgcatctagccgatatggtaccccggaggaactgcaggagctcgtggatacggcacatagcatgggcatcatcgttctgctggacgtggttcactctcacgcctcgaagaacagcgccgacgggcttaacatgttcgacggtactgacagctgttacttccactcagggccacggggcacccacgatttgtgggattcacgcctattcgcctattccagttgggaaatattgagatttctgctgtccaatattcgctggtggctcgaggagtaccgcttcgatgggttccggtttgatggcgtgacaagtatgttgtaccatcaccatggcgtgggccaaggcttctccggggattactcggagtatttcggtttgcaggtggacgaagatgcgctgacttatctgatgctggctaaccatctggttcataccctgtgtcctgacagcattacgattgctgaggatgtgagcggcatgccagcgctatgttctccaatcagccagggtggcgggggattcgattacaggctggcgatggcaattccggacaaatggattcaactcctcaaagagttcaaagacgaggattggaacatgggggatatagtgtatactctgactaacagacgctatctcgagaagtgcatagcatatgctgagagtcatgatcaggccttggtgggcgataagtccctcgctttttggcttatggacgccgaaatgtacactaacatgagcgttctgaccccttttacacccgtgattgaccgcgggattcagctccacaagatgatccggcttatcactcatggtcttgggggggagggatacctgaatttcatgggtaacgagtttggacaccctgaatggctggattttccacggaagggtaacaacgagtcctaccactacgcacgtcggcagtttcatcttactgatgacgacctactgagatacaagttcctgaacaactttgacagagacatgaatcggctcgaagaacgctatggctggctggctgccccgcaggcatatgtttccgagaagcacgaggggaataaaataatcgcattcgaacgcgccggactgttgtttatttttaactttcacccctccaagagttacaccgattacagagtgggtactgccctgccaggaaagttcaagatcgtgctggactctgatgcggcagagtacggtggacatcaacgcctcgatcattccactgactttttttctgaagcctttgagcacaacggccggccctacagtctgctagtgtacatcccctcacgggtggccctaatactgcagaatgtcgacctcccaaac

SEQ ID NO: 3438 - DNA, 2106 bp, Artificial Sequence
  derived and/or modified sequence
atggcagcgcctatgactccagccgctcgccccgaagattacgaggcagcactcaacgcagcactggccgatgtgcctgaattggcacgccttctggaaattgatccataccttaagccctacgccgtggacttccagagacgatacaagcagttttcgcagatacttaagaatataggggaaaacgaaggcggtattgacaagtttagcagaggatacgagagctttggcgtgcatagatgtgctgatggtggactgtactgtaaggaatgggctccaggagcagagggagtgttcctcaccggcgactttaacggatggaatccattttcttacccttacaaaaaactggactacggaaagtgggaactgtacatcccacccaagcagaacaagagcgtgctcgtgccccatggctcgaaactcaaggtggttattacgtcaaaaagcggtgaaattctgtaccggattagcccatgggcaaagtacgtcgtcagagaaggagacaacgtgaactacgactggattcattgggatcctgagcattcctacgagtttaaacattcgcggcctaagaagcctcgttcccttaggatttacgaatcacatgtggggatatcatcacacgaaggtaaggtcgcctcctacaagcattttacctgtaacgtgctgccccgcataaagggactcggctacaactgtattcagctcatggccatcatggagcacgcctactacgcgtcctttggataccagattacctctttctttgcagcaagctcacggtacggaacccctgaagaactccaggaattggtggatacggcccatagcatggggattattgtgctcctggatgtggtgcattcccatgcaagcaagaattccgcagatggactgaatatgttcgacggaaccgactcatgttactttcattccggaccccgcggtactcacgacctctgggattcgcgactctttgcttactcgagctgggaaatacttagattcctgcttagcaacatccggtggtggctggaggaataccgcttcgacgggtttcgttttgacggtgttacttctatgctgtaccatcatcacggagtcgggcaaggcttctcgggcgattactcggagtactttggacttcaagtggatgaagatgcgctcacttatcttatgctcgccaatcatctcgtccacactctgtgtcctgattcgatcaccattgctgaggacgtgtccggtatgccagcactgtgttccccaatttcccagggcggcggcggttttgattaccggctggcaatggcaattcctgataagtggatccaactccttaaggaattcaaggacgaggattggaatatgggtgatatcgtgtacactctcactaacaggcggtaccttgagaaatgcatagcgtacgcggaaagccacgatcaagcattggtcggtgacaagtcactggcattttggctgatggatgcagagatgtacaccaatatgtcagtgcttaccccctttacccctgtcatcgaccggggcatccaactccataagatgatcagattgatcacccacggtctgggaggcgagggatacctcaactttatgggtaacgaatttggacaccccgaatggcttgattttcctagaaagggcaataatgaaagctaccattacgccaggagacaatttcacctgaccgacgatgacctccttcggtataagtttcttaacaatttcgatcgcgatatgaatcggctggaagaaaggtatgggtggctcgccgcccctcaagcgtacgtgagcgaaaagcatgaggggaataagattattgcattcgaacgtgcaggtctgcttttcattttcaactttcatccctccaagtcctacactgattaccgagtcgggacggcactgcctggaaagtttaagattgtgctggacagcgatgcggcggaatacggaggacaccaaagacttgaccatagcaccgatttcttctcggaagcatttgaacacaatggccgcccatactcgctgctggtttacataccgtcacgcgtggcattgattcttcaaaacgtggacctgcctaac

SEQ ID NO: 3439 - DNA, 2106 bp, Artificial Sequence
  derived and/or modified sequence
atggcggcgcccatgactcctgcagcacgacctgaagattacgaagcagcgctcaatgcagccctggcggacgtgcctgaactcgcgcggctccttgagattgatccatatttgaaaccctacgcagtggacttccaacgacgctacaaacagttttcccagattcttaagaacataggtgaaaacgaaggaggtatcgacaaattctcccgtggatacgagtccttcggtgtccatcgctgcgctgacggtggactttactgtaaagaatgggcaccaggagcagagggagtgttcctgaccggagactttaacgggtggaatcctttttcgtatccttacaaaaagctcgactacggcaagtgggaactgtacattccaccaaaacaaaacaagtcggtgcttgtgccccacggatcaaaactcaaagtggtgatcacctctaagtccggcgagatcctgtacagaataagcccttgggcaaaatacgtcgtgagggaaggtgataacgtgaactacgattggattcactgggatcccgagcatagctacgagttcaagcactccaggcctaaaaagcctagatcgctcagaatttacgagtcgcatgtggggatttcaagccatgaaggtaaggtggcttcgtacaagcattttacctgtaatgtccttccccgcataaagggactgggttataactgcattcagcttatggcaattatggaacacgcatactacgcatcgttcggataccaaattacgtccttttttgccgcgtcatccaggtacgggaccccagaagagctgcaggagcttgtcgacactgcgcattcgatggggattatagtgctcctcgatgtggtgcactcccatgcatccaaaaactccgccgatggacttaacatgtttgatggaactgactcctgttactttcattcgggcccacgaggtacccatgatctttgggacagcagactttttgcatactcatcctgggagattctcagatttcttctgagcaatatcagatggtggctcgaagaataccgctttgatggttttaggttcgatggagtcacttcgatgctttaccatcatcacggggtcggccaggggtttagcggtgactacagcgagtacttcggacttcaggtggatgaggacgcactcacctaccttatgcttgcaaatcatcttgtccatactctgtgtccagatagcattaccattgccgaagatgtgtccgggatgccagcactgtgttcacccataagccagggtggaggaggtttcgactaccggctcgcaatggccattccagataagtggatacaacttcttaaggagttcaaagatgaagattggaatatgggagacattgtgtacactcttactaatagaagatacttggaaaagtgtattgcatacgcagaatcgcatgatcaagcattggtgggagataaatcgcttgcattctggctcatggatgccgaaatgtacaccaacatgtccgtgctgactccttttaccccagtcattgatcggggtattcaactgcacaaaatgatcagacttatcacccatggactcgggggagagggatatctgaactttatggggaacgaattcggtcatccggaatggctggattttccgaggaagggaaataacgagtcgtaccattacgcacggagacagtttcatcttactgacgatgatctgcttagatataagtttctgaacaatttcgaccgcgacatgaacaggcttgaggagaggtatggctggctggcagccccacaagcgtacgtgtcagaaaagcacgagggaaataagattatcgcattcgagcgggcgggcctgttgtttatcttcaattttcatccgagtaagagctacaccgattaccgggtaggcactgctcttcctggcaaattcaagatcgtgctggattcggatgcggcagaatacggaggtcatcagcgccttgaccatagcactgatttcttctccgaagcgttcgaacacaacggtaggccgtactcccttcttgtgtacattcctagcagggttgcacttattcttcagaatgttgatctccccaat

SEQ ID NO: 3440 - DNA, 2106 bp, Artificial Sequence
  derived and/or modified sequence
atggccgctccaatgacccctgccgcccgtccagaggactatgaggctgcgttaaacgcggcccttgcggatgtacctgaattggcgaggctactggagattgacccttaccttaagccctatgccgtcgactttcaacgtagatacaaacagttttctcagatcctgaagaatatcggcgagaacgagggtggaatcgacaaattctcccgaggttacgagagctttggcgtccatcgctgcgcggacgggggtctctattgcaaggagtgggcccccggggcggaaggtgtcttccttacgggggattttaacggatggaacccatttagctatccctacaagaaattagattatgggaaatgggagttgtacataccgcccaaacagaataagtccgttcttgttcctcacggttcgaagctgaaagtggtgatcacatctaagagtggtgaaatcctataccggatcagtccctgggcaaaatatgttgtccgtgaaggagataatgtcaattatgattggattcactgggatcccgaacattcatatgagtttaagcatagccgaccgaagaaacccaggagcctacgcatttacgagtcccacgtcggaattagctctcatgagggcaaggtcgcgtcatataagcactttacctgcaacgtactcccccgaattaaaggacttggctacaattgcatccagctcatggcgatcatggaacacgcctactatgcatcgttcgggtaccagatcactagttttttcgcggcatcaagccgctatggcactccagaggaattgcaagagttagtcgatacagctcactctatgggaattattgtgttgcttgacgtagtgcattcgcacgcttctaaaaattctgcagatggtctgaacatgtttgacggaacggattcctgttattttcactctgggccgcgaggcactcacgacctatgggactcacggctcttcgcttattcgtcctgggaaattttgcgtttccttctgtcaaatatccgatggtggctcgaggagtatcggttcgacggcttccggttcgacggggtcacgagcatgttgtatcaccatcatggcgtcggacaaggtttcagcggggattactcggaatactttggcttgcaagtcgacgaggatgctctgacgtacttaatgctggccaatcatctcgtccataccttgtgtccagattcgatcacgattgccgaggacgtttcgggaatgcctgcgctgtgctctccaattagtcaaggtggaggcggttttgattatcggctggccatggcgattccggacaagtggatccagctattgaaggagtttaaggatgaggattggaacatgggagacattgtgtataccttgacaaatcgccgatatctggagaaatgcattgcctatgccgagtctcacgatcaggcgctcgtaggggataagtcgctggctttttggctcatggacgcggagatgtatacgaacatgtcggttctgaccccctttacgccagtcattgaccggggaatacagcttcacaagatgatcagactcataactcatggtcttggaggtgaaggttacctgaactttatgggcaacgaatttggacatcctgagtggttggattttccgagaaaaggaaacaacgagagttatcattacgctcgtcggcagttccaccttacggatgatgaccttcttcgttataagtttttgaataactttgatcgtgacatgaatagattagaggagagatatggttggctggctgccccgcaagcttatgttagtgagaagcatgaagggaataagataattgccttcgagcgtgcggggcttctcttcatattcaattttcaccccagcaagtcgtacacggattatcgagtggggacagcactgcctgggaagttcaaaatagtccttgacagcgacgccgctgagtacggtggccatcagcgcctcgatcattccacggactttttcagcgaagcgttcgagcataacggtagaccatatagccttttggtgtacatcccctcccgcgtggctttgatactccagaacgtggatctacccaat

SEQ ID NO: 3441 - DNA, 2106 bp, Artificial Sequence
  derived and/or modified sequence
atggcagcgccaatgacccctgcagcacggcctgaggactacgaagcggcgctgaacgctgcccttgcagatgttccagaactggcaagactgcttgaaatcgacccttatcttaagccttacgcggtggacttccagagaaggtacaagcagttttcccaaatcctgaagaacattggtgagaacgaaggcggcatcgacaagttttccagaggatacgaatcctttggagtgcaccggtgtgcagatggcggactgtactgtaaggaatgggcaccgggcgcagagggtgtgttcctcactggtgactttaatgggtggaatcctttttcctacccatacaagaagctggattacggaaaatgggaactctacattccaccaaaacagaataagtccgtcctggtaccacatggaagcaaacttaaggtcgtcataacgtcaaagtcaggtgagatcctgtaccgtatttcgccatgggcaaaatacgtggtcagagaaggcgataatgtgaactacgactggatccattgggatcccgaacacagctacgaattcaagcatagcagacccaagaagcctagatcacttagaatttacgagtcccacgtgggtatttcgagccatgagggcaaagtggcttcctacaagcattttacttgtaacgtgcttcccaggattaaggggcttgggtacaactgtatccagcttatggccattatggaacatgcctactacgccagctttggctaccaaatcacttcgttcttcgcagcgtcgtcgagatacggcaccccagaagaactgcaggagctggtcgatactgcccacagcatgggcattatagttctcctggacgtcgtgcattcacatgcaagcaagaactccgcagatggactgaatatgttcgatggtaccgattcatgctactttcactccgggccccgtggaacccacgacctctgggacagccgtctgttcgcgtacagttcatgggaaattcttaggttcctgctgtcaaacatccgctggtggctggaagaatacagatttgacgggtttcgctttgatggagtgacctctatgctctaccatcaccatggtgttggacaaggattctcgggggactactcagaatactttggactccaggtcgatgaggacgctctcacctacctcatgctcgccaaccatctcgtgcatacgctttgtcctgactcaatcacgatcgcagaggacgtgtccggtatgcctgccctctgctctccaatctcacaagggggaggaggatttgattacagactggcaatggccattccagataagtggatacagctgttgaaggaattcaaggatgaagattggaatatgggtgacatcgtctacactctgactaaccgccgctacctcgagaagtgtatcgcatacgctgaatcgcatgatcaggcactggtcggagacaaatctctcgcattctggctgatggatgccgaaatgtacactaatatgtccgtgttgaccccttttaccccggtgatagaccgcggtatccagttgcataagatgattcggctgattactcatggattgggaggtgaaggatacctgaactttatgggaaacgaatttgggcaccctgagtggcttgatttcccgagaaagggtaataacgagagctaccattacgcacggagacaatttcatctgacggatgacgacctgctgcgatacaaatttcttaacaactttgatagagatatgaatcgactggaagaaagatacggttggctggcagctccccaggcttacgtttccgagaagcatgaaggaaacaagattattgccttcgagagggcaggactgctctttatcttcaacttccacccttcaaaatcctacaccgattaccgcgtgggaaccgcccttccggggaagttcaaaatcgtgctcgattccgacgccgctgaatacggtggacaccagaggctcgatcactcgactgatttcttttcagaggcatttgagcacaacggtcgcccatacagcctgttggtgtacattccatcaagagttgcactgatcctgcagaacgtcgacctgcctaac

SEQ ID NO: 3442 - DNA, 2106 bp, Artificial Sequence
  derived and/or modified sequence
atggccgccccaatgactccagccgcgaggcccgaagattacgaggcggcactgaatgctgcgcttgctgacgtgccagaactggcccggctgctggaaattgacccgtaccttaaaccatacgcggtggatttccaacgccgttacaagcagttctcgcagatcctgaagaacatcggcgaaaatgaaggaggcatcgacaagttctcacgcggatacgaatcatttggcgtgcaccgctgtgcagatgggggactctactgcaaggaatgggccccaggcgccgaaggagtgtttctgaccggggacttcaacggatggaatccgttttcttatccgtacaagaagttggactacggaaaatgggaactgtatatcccgcctaagcagaacaagtcagtgttggtgcctcacggatccaaactgaaggtggtcatcacgagtaagagtggagagatcctgtacagaatctccccttgggcgaagtacgtcgtgcgggaaggtgacaacgttaactacgattggatccactgggacccggagcatagttacgagtttaagcattcccgacctaagaagccaagatcactccgcatctacgaatcgcatgtcggaatctcaagccacgaagggaaagtggcgtcctacaagcacttcacctgcaatgtgctgcctcggatcaaaggcctgggttacaactgcatccaactgatggcaatcatggagcatgcctattacgcatcgttcggctaccagattacttcgttttttgccgccagctccaggtacggcactccggaagagcttcaagaactcgtggacacggcccattccatgggaatcatcgtcctgctggacgtggtgcactcgcatgcgtcaaaaaacagcgccgacggactgaacatgttcgatggcaccgactcctgctacttccactccggaccgaggggcacgcacgatttgtgggattcacggcttttcgcatactcatcatgggagatcctgcgttttttgctctcgaacatccggtggtggctcgaggaatatcgctttgacggatttcggttcgacggagtgactagcatgctgtaccaccaccacggcgtcggacaaggtttcagcggagattacagcgaatacttcgggctccaggtggacgaggacgcgctgacctacctcatgctggccaaccacctggtccatactctgtgtccggactctatcaccatcgctgaagatgtgagcggaatgccagccctgtgttcaccgatttcccagggcggcgggggatttgattacaggctcgcaatggccatcccggacaagtggatccaactgctcaaggagtttaaggacgaagattggaatatgggagacattgtgtacaccctgaccaatcgccggtacctcgagaagtgcatagcctacgcagaaagccacgatcaggctctggtgggggataagtcacttgcgttctggctgatggatgccgaaatgtatactaacatgagcgttttgacccctttcaccccagtcatcgatcgcggcatccagctccataagatgattcggctgatcacgcatggccttggtggagaaggatacctcaactttatgggaaacgagttcggccacccagagtggctggactttcctcgcaagggaaacaacgaaagctaccattacgctcgccggcaatttcacctcaccgacgatgatctgctgaggtacaaattcctcaacaactttgaccgggatatgaatcgcctcgaggaaagatacggttggctcgctgccccgcaagcatacgtgtcggagaagcacgagggaaataagatcatcgccttcgaacgggcaggtctgttgttcatctttaactttcatcctagtaagtcgtacaccgattatcgggtgggtaccgctttgccgggtaagttcaagatcgtgctcgattcagacgcggcggaatacggaggacaccagagactggaccactccactgatttcttctcggaagccttcgagcacaatggacgcccttacagcctgctcgtgtacatcccaagccgcgtcgcactgattcttcagaatgtggacctgccaaac

SEQ ID NO: 3443 - DNA, 2106 bp, Artificial Sequence
  derived and/or modified sequence
atggccgcaccgatgaccccggctgcccgtccggaggactacgaagcagccctgaacgctgccctcgccgacgtccccgaactggcgagactcctggaaatcgacccctacttgaaaccgtacgccgtggatttccaacgaagatacaagcaattctcccagatccttaagaatatcggagagaatgagggagggattgataagttttcacgcggctacgaatcctttggagtccatcgctgtgctgacggaggactctactgcaaggagtgggcgcctggtgcggaaggggtgttcctcaccggcgatttcaacggatggaacccgttttcctacccttacaaaaaactggactacggaaagtgggagctttacatcccaccaaagcagaataagagcgtgttggtgccgcatggaagcaaacttaaggtggtcatcacttccaaatcgggagaaatactgtacaggatctcaccttgggccaagtacgtggtgcgggaaggagataacgtgaactacgattggatccattgggacccggagcattcgtacgagttcaagcattcacgccccaagaagccaaggagtttgcggatctacgagtcacacgtcggaatttcctctcatgaaggaaaggtggcgagctacaaacatttcacctgcaacgtcctcccccgcatcaagggcctggggtataactgcattcagctgatggctattatggaacacgcttactacgcgagcttcggataccagatcacctccttcttcgccgcgtcgtcgcgctacggtactccggaagagctgcaagaactcgtggacactgcgcacagcatggggatcatcgttctgctcgacgtggtgcactcacatgcgagcaagaattctgccgacggcctgaacatgttcgacggaacggactcgtgctatttccatagcggccctcgcggcactcacgacctctgggactcaagattgtttgcatactcgtcgtgggaaatactgaggttcttgctgagcaacatccggtggtggcttgaagaataccggttcgacggctttcgctttgacggtgtaacttccatgctttatcaccaccacggagtcggccagggattctctggtgactattccgaatacttcggtctgcaagtagatgaagatgctctgacctatctcatgctggcgaaccatctcgtgcacaccctctgtcctgattcgatcactatcgcagaggacgtctcaggtatgccggctctctgttccccaatctcccagggtgggggaggattcgactaccgcttggcaatggcaatcccggataagtggatccagctcttgaaggagtttaaagatgaggattggaatatgggcgacatagtgtacacgctcactaaccgcaggtaccttgagaagtgcatcgcctacgcagagtcacatgaccaggcgcttgtgggcgacaagtccctggcgttttggctgatggacgctgaaatgtatactaatatgtcagtcttgaccccattcacccctgtcatcgataggggaatccaactgcacaaaatgattcgccttatcacccatggactgggcggagagggatacctgaacttcatgggtaacgaattcggacacccggaatggctggacttcccccggaagggaaacaacgagtcataccactacgcacgccggcaattccacctgactgatgatgatctccttcggtacaagtttctcaacaatttcgacagagatatgaatcggctggaggaacgatacggatggctggccgccccacaagcctacgtgtccgagaaacatgagggcaacaaaatcattgcttttgaaagagctggattgctgtttatcttcaatttccacccgtcgaaatcctacaccgattaccgcgttggcaccgcgctgccgggaaagtttaagattgtgctggattcggatgctgccgaatatgggggtcaccagcgccttgaccactccacggacttcttctcggaagcctttgaacacaatggtagaccgtacagcctcctggtgtacatcccctcccgggtggccttgatactccagaacgtggacttgcctaat

SEQ ID NO: 3444 - DNA, 2106 bp, Artificial Sequence
  derived and/or modified sequence
atggctgccccgatgaccccagctgcacgccctgaggactacgaagcagcgctgaacgcagcactggccgacgtcccggagctggcccggcttctcgaaattgacccatacctgaagccatacgcagtggattttcagcgaaggtacaaacagttctcgcaaatactcaagaatattggagagaatgagggcggtatagataagtttagtcgtggatacgaatcattcggcgttcatcgatgtgcagatggcggtctttactgcaaggaatgggcgcctggggccgaaggagtctttctgaccggcgactttaacgggtggaatcctttcagctacccctacaagaaattggactacggaaagtgggaactctatattcctcctaagcagaacaagagtgtgctggtgcctcacgggtcaaagctgaaagtggtcattactagcaagtcaggcgagattctttatcgcatttccccttgggcaaagtacgtcgtcagagaaggcgacaatgtgaactacgattggattcattgggatccagagcacagctacgagtttaagcattccagacccaaaaaaccacgttcacttaggatctacgagagccatgtgggtatcagctctcacgagggtaaggtggcaagttacaaacacttcacttgcaacgtgcttcctaggattaaaggacttggttacaattgcatccagctgatggccataatggagcatgcgtactacgcctccttcgggtaccaaattacctcatttttcgccgcaagctcccggtacggaacccccgaagagctgcaagaattggtggataccgctcacagcatgggtattatcgtcttgcttgacgtggtgcatagccacgcatcgaaaaacagcgcagatggactgaatatgtttgatgggaccgattcctgctactttcactcgggacctcggggaacccatgatctgtgggactcgaggctttttgcatatagttcgtgggaaattcttagatttcttctctcgaacatccgatggtggctggaagaatacagatttgacggtttccggttcgacggtgtcacttcgatgctctaccatcatcatggcgtgggccagggtttctccggcgactactctgagtactttggtctgcaggtcgatgaggatgcacttacttacttgatgctggctaaccaccttgtgcataccctgtgtccagattcaattactattgcggaagatgtgtcgggaatgccagctctctgtagcccgataagccaaggaggaggtggttttgactacagactcgcaatggcgatcccagataagtggatacaattgctcaaagagtttaaggacgaagattggaacatgggtgatattgtgtataccctcaccaaccgccggtacctcgaaaaatgtatcgcctacgccgaaagccatgatcaggcattggtaggagacaagtccctggcgttctggctgatggatgcagaaatgtatactaatatgtcggtgcttactcccttcactcctgtgattgacagaggaatccaactgcacaaaatgattcgcttgataacgcatggacttgggggagagggctaccttaacttcatgggtaacgaatttggtcacccggaatggctggatttccctcgtaagggaaataacgaatcttaccactacgccagacggcagttccatctgaccgatgatgatcttctgagatacaagtttctcaataacttcgatcgtgacatgaatcgtctcgaagaacgctacggatggctcgcagcaccgcaagcatacgtgtcggagaagcatgaaggaaataagatcattgcgtttgaacgcgcaggcctcctgttcatattcaattttcatccttcaaagtcttacaccgattatcgggtcgggaccgcacttccaggaaagtttaagatagtgctcgattccgacgcggcggaatatggtggtcatcaaagactggaccattcgactgactttttctccgaggcttttgagcacaacggaaggccatactcacttcttgtttacataccttccagggttgcccttattcttcaaaatgtggatctgcctaac

SEQ ID NO: 3445 - DNA, 2106 bp, Artificial Sequence
  derived and/or modified sequence
atggccgctcctatgacccctgccgcgcgtcccgaggattatgaagccgccctgaacgctgcgctcgccgacgttccagagctggcacgattgctggaaatcgacccatatctcaaaccctatgctgtggatttccagaggcgctataagcagtttagccagatccttaaaaacattggagaaaacgagggaggcattgataaattcagccgtggatatgaatcctttggcgttcatcgatgcgcagatggcgggctgtactgcaaggagtgggctcccggcgcagagggagtgttccttacaggggactttaacggatggaaccctttcagttacccctataagaagctcgactacggcaagtgggagctgtacatcccacccaagcagaataagtccgtcctggtccctcatggctcaaagttaaaagttgtgatcacgagtaagagcggagagattctttacagaatctctccctgggccaaatatgttgtccgcgaaggtgacaacgtcaattatgactggattcactgggaccctgagcacagctatgagttcaaacattcgcgtccgaaaaagccacgatcactcagaatctatgagtcacatgtgggtattagtagccacgagggaaaagtggcaagctacaaacactttacatgcaacgtgctgccaagaataaaggggctcggctacaactgtatccagttaatggcaattatggaacacgcctactatgcaagttttggttaccagattacttcattttttgccgccagcagcaggtacggaacccccgaagaactgcaagaattggttgacacagcacacagcatgggcatcatcgttctgctcgacgttgtccatagccatgcctcaaagaattccgctgatggacttaatatgttcgatggaaccgattcttgctatttccattcgggccctagaggtactcacgacctgtgggacagtaggttatttgcatacagctcctgggagatcctgagattccttctgtccaacattcgttggtggctagaagaatacagattcgacggtttcagatttgatggcgtgacgtcaatgctgtatcatcaccatggagtgggtcaggggttttccggcgattattccgaatacttcgggctgcaggtggatgaagacgcgttgacttatctgatgttggctaaccatcttgtgcataccctgtgccccgattctatcactatcgcggaggatgtgagtggcatgcccgccctgtgcagtccaatcagccagggcggagggggttttgattataggctggctatggctatacctgacaagtggatccaattgctcaaggagtttaaggacgaagactggaatatgggcgatattgtttacaccctcactaaccgaaggtacctcgagaaatgtatagcctacgcagaatctcacgaccaggcgctggtgggcgacaaatccttggcgttttggctaatggacgctgaaatgtatactaacatgtctgtccttactcccttcaccccagtgatcgatcggggaattcagctccacaaaatgatccggctcataacccatggcctcggcggcgaggggtacctgaatttcatgggcaacgagtttggccatcccgagtggcttgactttcccaggaaggggaacaatgagtcctatcattacgcccgcagacagttccacctgacagacgacgacttgttgagatacaaattcctgaacaattttgaccgtgatatgaaccggctcgaggagcgctacggttggcttgccgctccacaagcttacgtctcagagaagcacgaagggaataagatcatagcgtttgagcgggccggattgctatttatattcaactttcatccctccaagtcgtacaccgactaccgggtgggcactgcgcttcctggcaaatttaagattgtgctggatagcgacgccgccgagtacggagggcaccagagactggatcattccacggattttttcagcgaggcgtttgaacataacggccggccttacagtttgctggtctacatcccttccagggtggctctgatcctacaaaacgtggacctaccaaat

SEQ ID NO: 3446 - DNA, 2106 bp, Artificial Sequence
  derived and/or modified sequence
atggccgctcctatgactcccgctgcccgaccagaggactacgaagctgcacttaacgccgcgttggccgacgtccctgagttggcaaggctgcttgagatcgatccctacctgaagccttatgctgtcgactttcagaggcggtataaacagttctcacagattcttaagaatatcggtgaaaacgagggcgggattgataagttctctcggggatacgagagtttcggcgttcatagatgcgctgatggaggcctctattgcaaggaatgggcccccggggctgagggggttttcctgactggggatttcaacggctggaaccctttctcttatccttacaagaaactggattacgggaagtgggagctttatattccgccaaagcaaaacaagtcagtcctggtgcctcatgggagcaagctgaaagtggtgattacctcaaaaagcggggagatcctgtataggatctctccctgggcaaagtacgttgtgcgggagggcgacaatgttaattacgactggatacactgggatcccgagcactcttatgagtttaagcattctcgccctaaaaagcccaggagtctcagaatctacgagtcccatgttggtataagctcccacgagggcaaagtggcgagttataaacacttcacttgcaatgtgctgccacggatcaaaggccttggatacaactgcattcaacttatggcaattatggagcacgcttattacgcttccttcgggtaccagattacaagcttcttcgcagcctcctcccggtatggtacaccagaggaactgcaggagctcgtcgatacggcgcattccatgggcatcatcgtgctgttggacgtcgtgcatagtcacgcttctaagaattcagccgacggattgaatatgttcgatggcaccgactcctgctacttccattccggaccaagaggcacacacgatctctgggacagccgccttttcgcttattcatcctgggaaattctgcggtttctcctttctaacatcagatggtggctcgaggagtatcggtttgatggctttcgctttgatggtgtgacctccatgctgtatcaccaccatggtgtcggacagggatttagcggcgattactcagaatacttcgggttgcaagtggacgaggatgccctgacatacctcatgctggcaaatcacctggtacatacgctctgccctgacagtatcaccatagcagaggacgtctccggtatgcctgcattgtgttctcctatcagccagggcggggggggttttgattaccggcttgccatggcgatacccgataagtggattcagctgctgaaggaatttaaggacgaggactggaacatgggcgacatcgtttacacccttactaacagacggtacctcgaaaagtgtatcgcctacgctgaaagtcacgaccaggcgcttgtgggagataagtcacttgcattttggcttatggatgcagagatgtatacaaatatgagcgtgttgactccatttacccctgtaatcgaccgcggaattcagctgcacaagatgatcaggctcatcacacacggcctgggcggcgagggctatctgaatttcatggggaatgaatttggtcaccccgagtggctcgatttcccacgcaaaggcaataacgagtcataccattacgctcgcaggcagtttcatcttaccgacgacgatttgttgcgctacaagttccttaacaactttgatcgggatatgaaccgactggaggagagatacggatggttggccgctccgcaagcttacgtgtccgagaagcatgagggcaacaaaatcatcgcattcgaacgggcaggcctcctgttcatattcaattttcacccctccaagagctacaccgactaccgcgtgggaaccgcgcttcctgggaaattcaagattgtcttggattctgacgccgccgaatacggcgggcatcagagactcgatcattctacggattttttctcagaggccttcgaacataacggtcggccctactccctgctcgtctatataccgtctcgcgtggccctgatcctgcagaacgtagaccttccaaac

SEQ ID NO: 3447 - DNA, 2106 bp, Artificial Sequence
  derived and/or modified sequence
atggccgctcctatgactccagccgccaggccggaggactatgaagcggccctcaatgctgcactggccgacgtgcctgagttagccaggctgttggaaatcgatccataccttaagccatatgccgtggatttccagcgccggtataaacaattttcccagatcctgaagaacattggggagaacgagggagggattgataagttttccaggggatacgagagtttcggggttcacagatgcgcagacgggggtctgtattgtaaggagtgggccccaggagcggagggagtgttcttgacgggcgattttaatggttggaatccgttctcttacccctataaaaagctggactacggcaagtgggaactgtatatcccgcctaagcagaataaatccgtcttggtcccacacgggagtaaactgaaagtggtgatcacaagcaagtctggtgagattctgtaccgcatctctccctgggctaagtatgttgtcagggaaggggataatgttaattacgactggatccactgggaccctgagcattcctacgagttcaagcactccaggcccaagaagccaaggagcctcaggatctacgaatctcacgttggcatttcatcacacgagggcaaggtcgcctcctataaacacttcacgtgcaacgttctcccacgcatcaaaggactggggtacaactgtatccagctgatggctattatggaacacgcctactacgcctcatttggctatcagatcacgtctttcttcgctgcctccagccgctacggcacacccgaggagctacaggaactggtcgacaccgcacactctatgggaatcatagtgcttctggatgtggtgcactcacatgctagcaaaaattctgccgatggactgaacatgttcgacggtacagatagctgctacttccacagtgggcctcggggaacgcacgacctgtgggacagtaggctcttcgcttacagctcttgggaaatacttcggtttctattaagcaatattcggtggtggttggaggaatatagattcgacggcttccgcttcgatggcgtgacgtcaatgttataccaccaccacggagtgggacagggcttctccggtgattattccgagtatttcggcctgcaggtggatgaggatgctctcacctatctcatgctggctaatcatctcgtgcacactctctgcccagacagcatcactatcgcggaggatgtgtctgggatgcccgcgctgtgctctcctatatcccaaggggggggggggtttgactatagactggccatggcgattccagataagtggattcagctgctgaaggagtttaaggacgaagactggaacatgggcgatattgtgtatacactcaccaatagaagataccttgagaaatgcatcgcctacgctgaatcgcacgatcaagccctagtaggcgataagtctctggccttttggttgatggatgccgagatgtacaccaacatgagcgttctaacccccttcactcccgtcatcgatcgtgggattcagctccataaaatgattagactcatcacacacgggttgggcggcgagggctatctaaactttatgggcaacgagttcggtcatcccgagtggctggactttccaaggaaagggaataacgaatcgtatcattacgcccgaagacagttccacctgacagatgacgacctgctgcgatataagttcctgaacaatttcgaccgggacatgaataggctggaggaacggtatggttggctcgctgctccacaggcttacgtgagtgagaaacatgagggtaataaaatcatagcattcgaacgggccggcctgttattcatctttaatttccatccgtcaaaatcatatacagactatcgggtgggcactgctctgccaggcaagtttaagattgtcctggattccgatgctgccgagtacggaggtcaccagaggcttgaccactctactgacttttttagcgaggctttcgagcataatgggcgcccttactccctgctggtgtatattccgtctagggttgcgcttattttgcagaacgtggacttgcctaat

SEQ ID NO: 3448 - DNA, 2106 bp, Artificial Sequence
  derived and/or modified sequence
atggcagctccgatgactcccgccgcacgccccgaagattacgaggctgcccttaatgctgccctcgctgatgtgccagaactggctcggttgctagaaatagacccctacctgaaaccatatgctgtggacttccagaggcgatataagcagttctcgcagatcttgaaaaatataggggaaaatgagggcggtatcgacaagttttctaggggatatgaatctttcggcgtccatcgctgcgctgatggagggctgtactgtaaggagtgggctcccggtgctgagggggtttttcttacaggagatttcaacggatggaaccctttcagctacccctacaaaaagctggattatgggaagtgggagctgtacatcccaccaaaacagaacaaatctgtgttggtccctcacgggtccaagttaaaagtcgtgattacaagcaagtcgggcgaaatactctaccggatcagcccgtgggcaaagtatgtggtgcgggagggagacaacgtcaattatgattggattcactgggatcctgagcactcatatgagttcaagcactcaagaccgaagaagccccgctcactcagaatctatgaatcccacgttggaatctctagtcacgagggcaaagtggcctcttataaacactttacttgcaatgtgctgcctcgcattaaaggactgggctataattgtatccagctgatggccattatggagcatgcatactacgcatcattcggctatcagatcacaagttttttcgctgcctcctccaggtacggaactcccgaggagttgcaagagctcgtcgacacagcccattccatggggattatagttctgcttgacgttgttcattcacatgcctctaagaattctgccgacggtctcaatatgttcgacggtacggactcttgctattttcacagtggcccacgcggtacacacgatctctgggacagcaggctgttcgcctacagctcttgggagattctgcgatttcttctctcgaatattagatggtggttagaggagtaccgattcgatgggttcagattcgatggtgtaacaagtatgctatatcatcatcatggtgtcggccagggcttctcgggcgactactctgagtatttcggactgcaggtagatgaagatgctctgacttatctaatgctggctaatcacctcgttcatacactctgtcctgactcaatcacgatagctgaagatgtgtccggcatgcctgccctctgttccccaatatcccagggcggtggcggcttcgactacaggctggcgatggcgattcccgacaaatggatccagctccttaaggagtttaaggacgaggactggaacatgggtgacattgtgtatacactgacaaataggagatacctcgaaaaatgtattgcctacgcagaatcccacgaccaggccctggtgggcgacaagagtttggctttctggctgatggatgcggaaatgtacactaatatgagcgtgttaaccccctttaccccagtgatagaccgagggatccagctccataagatgatccggctcatcacccacggcctggggggggaagggtacctgaattttatggggaatgaatttgggcatccagaatggctggacttcccacggaaggggaataatgagtcatatcattacgcccgccgacaatttcacttgacagatgacgatttgctacgatacaaatttctcaataactttgacagggacatgaatagattagaggagcgttacgggtggcttgcagcaccccaggcctacgtctccgagaaacacgagggcaataagataatcgcttttgaacgcgcaggattactatttatttttaacttccatccttccaagtcctatactgactatagagtgggaacagccctcccaggcaagtttaagatcgtcttggattcggatgccgcagaatacgggggtcaccaaagactcgatcactcaaccgatttcttctccgaggcctttgaacacaatggccggccatactcactgcttgtgtatattccttctcgggtggcactcatcctccagaacgtggacctgcccaac

SEQ ID NO: 3449 - DNA, 2106 bp, Artificial Sequence
  derived and/or modified sequence
atggccgccccgatgaccccggccgcacgccccgaagattacgaagccgcgcttaatgcagcgttggctgatgtgccagagctcgcgcgcctgctcgaaatcgatccttaccttaagccatacgcggtcgactttcagaggcggtacaaacaattctcgcagattctgaagaacatcggtgaaaatgagggcggtatcgacaagttttcccgcggctacgagtccttcggcgtgcaccggtgtgctgacggaggactctactgcaaggaatgggccccgggggctgagggagtgttcttgactggggacttcaacggctggaaccctttttcgtacccctacaagaaactggattacgggaagtgggaactgtacatcccaccgaaacagaataagtccgtccttgtccctcatggcagcaagctgaaagtggtgatcacctcgaagagcggcgagatcctctaccggatctcaccgtgggcgaagtacgttgtgagggagggtgataatgtcaattacgactggatacattgggatcctgaacactcctatgaattcaagcattcacgtccgaagaagcctcggagcctccgtatttacgaatcccacgtcggcatcagcagccatgaaggaaaagtggcctcatataagcacttcacttgcaacgtgctgcctaggatcaagggactgggttacaattgtattcagctcatggcgatcatggagcacgcatattacgcctcattcggataccagataacttcctttttcgcggccagctcgcgctacggaacccccgaggagctgcaagaattggtggacacggctcattctatgggcattatcgtgctgctggacgtcgtgcattctcacgcatcaaagaatagcgctgatggactgaacatgttcgatggaaccgattcctgctatttccactctgggccacggggaacccatgacctttgggattcgcgcctgtttgcctacagctcatgggagatccttcggttcctgctgagcaatatccggtggtggctcgaagaataccggtttgatggcttccgcttcgacggagtgacctccatgctttaccaccaccacggggtgggacaaggattcagcggcgactattccgagtactttgggctgcaagtggacgaggatgctttgacctacctgatgctggcaaatcacctggtgcatactctgtgcccggattccatcaccatcgcggaggatgtgtctggaatgcctgctctgtgctccccgatctcgcaagggggaggtggttttgactatcgcctggctatggcaatccctgataagtggatccagttgctgaaggaattcaaggatgaggactggaacatgggcgacatcgtttacactctgactaatagaaggtaccttgaaaaatgcatcgcttacgcggaaagccacgaccaagcgttggtcggagataaatcgctcgccttttggctcatggacgccgaaatgtacaccaacatgagcgtgttgactccgtttactccggtgatcgatcgcggaatccagctgcacaagatgattcgcctcatcacccacggattgggaggagaaggttacctgaacttcatggggaacgagttcggccatccagaatggctggacttcccgcgcaaaggcaacaacgaatcgtatcactatgcccgccgccagttccatcttaccgacgacgacttgctgagatacaagtttctcaacaacttcgatagagacatgaaccgattggaagaacggtacggatggctcgcggcgccgcaggcctacgtgtccgaaaagcatgagggaaataagatcatcgcgttcgagagggctgggcttctgtttatcttcaacttccacccgagcaaaagctacaccgattacagagtgggcacggcactccccggaaagttcaagatcgtcctggattcagacgcagccgaatacggcggacaccaacgcctggaccattcaaccgacttcttctcggaggctttcgaacataacggacgtccttactcgctcttggtgtatattccgtccagagttgcactcatcctccaaaacgtcgacctgccgaac

SEQ ID NO: 3450 - DNA, 2106 bp, Artificial Sequence
  derived and/or modified sequence
atggccgctccgatgactccagctgctagaccggaggactatgaggcagcgctgaacgccgctctggctgatgtgccagagctcgcacgtctgctggagatagacccttacctgaagccatacgccgtcgatttccagcgccgctacaaacagtttagccagatactgaagaatattggcgaaaacgaaggcggcattgacaaattctcccgtggttacgagagcttcggcgtgcaccgctgtgcagatggcggtttgtactgtaaggaatgggctcctggcgctgagggagtgttccttaccggcgattttaacgggtggaacccgttttcctacccgtataaaaagctggattacggcaaatgggagctgtacatcccaccaaagcaaaacaaaagcgtcttagtaccgcatggttccaaactcaaggtcgtcattacgagcaaaagcggtgaaattctgtaccgcatctcaccatgggcgaagtacgttgtccgcgagggtgataatgtgaattatgactggatccactgggatccagaacattcctacgaattcaaacactccaggccaaagaagcctcgctccctgcggatctacgaatcccacgtgggaattagcagccacgagggcaaggttgcgagctataagcatttcacctgcaatgtgctgcccagaatcaaaggcctgggctacaactgtatccagctgatggctatcatggagcatgcatactatgcgtcttttggttaccaaataacctctttcttcgcggcttctagccgctacgggacccccgaagaactgcaggagctggtggatactgctcatagcatgggcattattgttctgctagacgttgtgcactcacacgcatctaagaactccgcagatgggctgaatatgttcgacggtaccgactcttgctatttccatagcggcccgcgcggaacccatgacctttgggatagccgcctgttcgcctatagcagctgggaaattctgcgctttctgctgagcaacattcgctggtggcttgaggagtaccgttttgacggtttccgtttcgacggtgtgacgtccatgctgtaccatcatcatggcgtgggccagggttttagcggcgattactcggaatatttcgggctgcaggtggacgaggacgcgctgacttacctcatgctggcaaatcacctagtacacaccctgtgcccggattctatcaccattgcggaggacgtgagcggaatgccggccctatgctctcctatctctcaaggcggtggaggtttcgattaccgccttgctatggcgataccagacaaatggatccagcttctaaaggagtttaaggatgaggattggaatatgggtgacatcgtgtacacgctgaccaaccgcaggtacctggaaaagtgtatcgcgtatgccgaatctcatgaccaggcactggttggtgacaagtccctggcgttctggctgatggacgcggagatgtacaccaatatgagcgtccttacccccttcacaccagttattgaccgtggtatccaactgcataagatgatacggctgatcactcatggcctgggtggtgaaggatacttgaatttcatggggaacgagtttggtcaccctgaatggcttgattttcctaggaaagggaataacgaaagctaccattatgccagacgtcaatttcatctcacagatgatgacctgcttcgctataaattcctcaataactttgaccgagacatgaatcgactggaggaaaggtacggctggttggctgcgccgcaggcgtacgtgtcagaaaaacatgagggcaacaaaattatcgcatttgaacgggccggcctgcttttcatcttcaattttcatccaagcaaaagctacacggactaccgcgtcggtactgcgctgccgggcaagttcaagatcgtgctcgattctgatgctgctgagtacggtggccaccaacgcttggatcattctacggatttcttcagcgaggcgttcgaacataatggccgcccatatagcctgttggtgtatataccgagcagggtcgctctgatacttcaaaacgtagatctgccgaac

SEQ ID NO: 3451 - DNA, 2106 bp, Artificial Sequence
  derived and/or modified sequence
atggccgccccaatgacaccagctgcccggcccgaagattacgaagcagcactcaatgctgcattagccgatgtgcctgaacttgcgcgactccttgaaatcgatccttatttaaaaccttatgccgtggatttccagagacgatataaacagttttctcagatactgaagaacatcggggaaaatgaaggagggattgataaattcagtagagggtatgagtcatttggagtgcataggtgcgctgatggagggctgtattgcaaggaatgggccccaggagccgagggagtgttccttacaggagatttcaacgggtggaaccctttttcctatccttacaaaaagctcgactacgggaagtgggagctatatattcctccaaaacagaacaaatctgtcttggtgcctcacgggtctaagctgaaagtcgtaatcacgtcaaaatccggggaaatattatataggatatccccatgggccaagtatgtagttcgggaaggggataacgtgaattatgattggatacattgggatccagagcatagttacgaatttaaacatagtcgccctaaaaaacctagatctctgaggatctacgaaagtcacgttggaatctcatctcatgaagggaaagtagcatcttacaaacattttacttgcaatgtgctcccacggatcaaagggctcgggtataattgtattcagttgatggctataatggagcacgcttactatgctagtttcggatatcagataacatctttttttgctgcctcttctcggtatggaacacctgaagagctgcaggaattagtagatacagctcactctatggggatcattgtactgcttgatgtggtgcattctcacgcctctaaaaacagtgcagatggactaaatatgttcgatgggactgatagttgttattttcactcggggccacggggaactcacgacttgtgggatagtcgtctgttcgcctactctagttgggaaatacttagattcctcctttctaatatccggtggtggctagaagaatatcggtttgatggattcaggttcgatggggtgacgtctatgctatatcatcatcacggggtagggcagggattctctggagattattctgaatactttgggttacaggtggatgaagacgccttaacatatctcatgctggctaatcatttggtccatactttatgtcccgattctattacaatagcagaagatgtaagtgggatgcctgccctatgttccccaatctctcagggagggggggggtttgactatcgcctggcgatggcaatacctgataaatggatccagcttcttaaagagtttaaagatgaggactggaacatgggagatatagtttatacattaacaaataggagatacctggaaaaatgcattgcctacgctgaatcgcatgatcaggctttagtaggggacaaatccctggcgttctggttaatggacgccgagatgtatactaacatgtctgtgctcacacctttcactcctgtgatcgatcgcgggatccagttgcacaaaatgattcgtctcattactcacggactaggaggggaagggtaccttaattttatgggaaacgaattcgggcatcccgaatggcttgatttcccacggaaaggaaataatgaatcctatcactacgcccgcagacagttccatctgacagatgatgatctcttgaggtacaagttcctcaacaactttgatagagatatgaataggttggaggaacgatacgggtggctcgctgcaccacaggcttatgtatccgaaaagcatgaggggaataaaattatcgcctttgagagggcaggactacttttcattttcaactttcatccctctaagtcctatactgattatcgcgttgggacggcccttccaggaaaattcaaaatagtccttgattcggacgctgccgaatatggggggcatcagaggcttgatcattccacagactttttttctgaagcctttgagcataatggaagaccgtacagtctgctggtatacataccttctagagtagccctcatccttcaaaatgtcgacctcccaaat

SEQ ID NO: 3452 - DNA, 2106 bp, Artificial Sequence
  derived and/or modified sequence
atggccgcccctatgactccagccgcgcggccggaggactacgaagcagcactgaacgctgccctggcggatgtgccggagctggcaagactcctggagatcgacccgtacctcaagccgtacgcagtggatttccaaagacgctataaacagtttagccaaatcctgaagaacatcggcgaaaacgaagggggaatcgataagttttcacggggatacgaatctttcggcgtccatcgctgcgcggacggaggactctactgtaaggaatgggcgccaggagctgagggagtttttctgaccggagatttcaacggttggaatccattctcctacccgtacaagaagctggactacggaaagtgggaattgtacattccgccaaaacagaacaagtcggtcctggtgcctcacggcagcaagctgaaagtggtgatcacctcaaagtcaggcgagatcctttacagaatcagcccttgggccaagtatgtggtgagggaaggagataatgtgaactacgattggatccactgggatccagagcattcttacgaattcaaacattcgcgcccgaagaaaccacgctcccttcggatctacgagagccacgtgggaatctcctcacacgaaggcaaagtggctagctacaaacacttcacctgcaatgtgctgccccggattaagggtctgggatacaactgtattcagctgatggcgattatggaacacgcatactacgcttccttcggctaccagatcacttccttcttcgcagcgtcgtccaggtacggtacccctgaagagcttcaagaactcgtcgacaccgcccactcaatgggcatcatcgtcctgctcgacgttgtgcactcgcacgcaagcaagaacagcgcggatggactcaatatgttcgacggaactgacagctgctacttccactcgggaccccggggaacccacgacctgtgggactcaagactttttgcctactcctcgtgggaaatcctgcgattcctgctgtccaacatcagatggtggctggaagaataccggtttgacggatttcggttcgacggcgtgacttctatgctgtaccaccatcacggagtggggcagggattctcgggcgactactctgaatacttcggcctgcaagtggacgaggatgcccttacgtacctgatgctcgcgaatcacctggtccacaccctgtgcccagattctattaccatcgccgaggacgtctcgggaatgcccgcactgtgttcgccaatttcgcagggcggaggaggtttcgattaccggctggcaatggccattccagacaagtggatccagctgctgaaggaattcaaagacgaagattggaacatgggagacattgtgtacaccttgactaacagacgctacttggaaaagtgcatcgcctacgccgaatcccacgaccaggccctggtcggggacaaatccctggccttttggttgatggacgcagaaatgtataccaatatgagcgtgctgacccctttcactcccgtgatcgataggggaattcagctccacaagatgatccggctgatcactcacggactggggggcgaggggtatctgaacttcatgggcaatgaattcggacacccggaatggttggactttccacgcaaggggaataatgaaagctaccattacgcgcgccggcagttccacctgaccgatgacgatctgctgcggtacaaattcctgaataacttcgaccgggatatgaaccgcctcgaggagcggtacgggtggctggctgctccacaggcgtacgtgtctgagaagcacgagggaaacaagatcatcgcgtttgagcgagcaggtttgctgttcatcttcaacttccacccatccaagtcgtacactgactaccgggtcggtaccgcgctgccgggcaagtttaagatcgtgctggactcagacgcggcggagtacggcggacatcagagactggaccactcaaccgacttcttcagcgaggccttcgaacataacggcagaccgtactcgttgttggtctacatcccctcgcgcgtggctcttatcctccaaaacgtggaccttccaaac

SEQ ID NO: 3453 - DNA, 2106 bp, Artificial Sequence
  derived and/or modified sequence
atggccgcgcccatgaccccggccgctcgaccagaagattacgaagcagccttgaacgctgccctggccgacgtgcccgagcttgcgcggttgttggagatcgacccttatcttaagccctatgcggttgattttcagcgcaggtataaacagttcagccagatcctgaagaacatcggagagaacgagggagggattgacaagttctcaagaggttatgagtctttcggcgttcatcgctgcgctgacggggggctctactgcaaggaatgggcgccgggcgccgagggcgttttcctgactggcgactttaacggttggaatcccttctcttacccatacaagaagctcgattacgggaagtgggagctatacatcccaccaaagcaaaataagtctgttctagtcccacatggaagtaagctcaaggtggtcataactagcaagtccggcgagatattgtaccgtatctctccctgggccaagtacgtcgtgagggagggggataacgtcaactatgattggatccactgggatccggaacactcatacgagtttaagcattccagaccaaaaaaaccaagatcattaaggatctacgagtcacatgtgggcatcagttcccacgagggaaaagtggcttcctataaacactttacctgtaacgtgcttccacgcatcaaaggacttggctataattgtattcagctaatggccattatggaacacgcctattacgcgtcattcggttatcagatcacgtcattcttcgcagcctcctctagatatggcacaccagaggagctgcaggagctcgtggataccgcgcactctatgggaattattgtgttactggatgtggtacattcccacgcttctaagaatagtgccgatggcctgaatatgttcgacggaaccgactcatgttatttccatagcgggccgcggggcactcatgacctctgggattcgagactctttgcttattccagctgggaaatacttcggtttctgctgtctaacattcgctggtggctggaggagtatcggttcgacggctttagattcgacggcgtcacgtctatgctctatcaccaccatggtgtggggcagggtttttcaggggactatagcgagtattttggactccaggttgacgaggacgctctgacctacctcatgctggctaatcacctggtgcacaccttgtgccctgattcaattacgatcgctgaggacgtaagcggaatgccggccttgtgttcccctatctcccagggaggaggcgggtttgattaccgcttggcaatggctattcctgataagtggatccaactcctgaaagagttcaaagacgaggattggaacatgggtgacatagtttacacgctgactaaccggaggtaccttgagaaatgtatagcatacgcggagtcccacgatcaggctctagtcggggataagagcttggccttctggctgatggatgcagaaatgtataccaatatgtcagtgctgaccccattcaccccagtaatcgacagggggattcaactgcacaagatgattcggctgatcacacatgggctgggcggagagggctatctgaattttatgggaaacgagtttggccatccggagtggctcgatttccctcggaagggaaataatgagagttatcattacgctagacggcagtttcatttgaccgacgatgacttgttacggtacaaattcctgaacaatttcgatcgcgatatgaatcggctggaggagcgttacgggtggctcgctgcaccacaggcttacgtctccgagaagcatgaggggaacaaaatcatcgctttcgaacgagcggggctgctgttcattttcaacttccatcctagcaagagttatactgactaccgtgtgggtaccgcactcccgggcaagttcaagatcgtcttggacagtgatgccgctgagtatggggggcaccagcgacttgaccattccactgactttttctctgaggcattcgaacataacggcagaccctattcactcctggtgtatattccctcccgggtcgcccttatcctgcagaacgtggacctgcccaac

SEQ ID NO: 3454 - DNA, 2106 bp, Artificial Sequence
  derived and/or modified sequence
atggccgcgccaatgacaccggcagctcgtccggaggactacgaggcggcactgaacgccgcattggccgatgtgccggagttagcgcgtctgctggaaattgatccatatttgaagccctacgccgttgacttccagagacgatacaaacagttttctcaaattctgaagaacataggtgagaacgagggtggtatcgataagttctcacgcggctatgaatcctttggagtgcatcggtgcgcagatggtggattgtactgcaaagagtgggcacccggcgccgaaggggtctttctcacgggagatttcaatggctggaaccccttctcgtatccgtacaagaagctagattacggcaagtgggagttgtacataccgccgaaacaaaacaagagtgtactcgtgcctcatgggtccaagctgaaggtcgtgatcacgtccaagtcgggggagatcctttaccggatatccccctgggcgaagtatgtggttcgggagggagacaacgtcaactacgactggattcactgggacccggaacactcctatgaattcaaacactcccgcccaaagaagcctagaagcctgaggatttatgagagtcacgttggcattagctcccacgagggcaaggtggcctcgtacaaacacttcacatgtaacgtgttgccccgcatcaagggccttggatacaactgcattcagctgatggcaatcatggagcatgcctactacgcgagcttcggctatcagatcacatcgttcttcgccgcatcatcccggtacggaaccccagaggagctgcaggaactggtcgatacggcccacagtatgggcatcatcgtcctgctggatgtcgtacactcacacgcttccaaaaattcagccgacggactgaatatgttcgacggcacggattcctgctacttccatagcggacccaggggaacacatgacctgtgggattcgaggctgttcgcctactcaagctgggaaatcctcaggtttctgcttagcaacattcgctggtggcttgaagaatatcggtttgacggcttccgttttgacggcgtgaccagcatgctgtatcaccatcacggtgtcgggcagggattctcaggagattactccgagtactttggtttgcaggtcgacgaggacgcgctcacgtatctcatgctcgccaatcatctagtacataccctgtgccccgacagcatcacgattgcggaagatgtgtccggcatgcctgcgttgtgttcgccaattagccaaggtggcggcggattcgattatcggttggcgatggctatcccagacaagtggatacagctcctgaaggagtttaaggatgaggactggaatatgggcgacattgtttacaccctgactaatcgaagatacttggagaagtgcattgcctacgctgagagccatgaccaagcattggtcggagacaaatccctggcattttggcttatggatgccgagatgtacaccaacatgagcgttctgaccccctttactccagttatcgatcgaggcatacaactgcataagatgatcagacttatcacgcatgggctgggcggggaaggatatttgaattttatgggcaacgaattcggtcacccagagtggctggacttcccacgtaagggaaataatgagtcctaccactacgccagacgacagtttcatcttacggatgacgatctacttcggtataagtttttgaacaactttgaccgtgatatgaatagactggaagagcgctatggctggctggccgcgccacaggcctatgtgagtgagaagcatgagggaaacaagattatagccttcgaacgagcgggattgttgtttatttttaattttcacccctcaaagagttacacggattatcgcgtgggcacagccctaccgggcaagttcaagattgtcctcgactcagacgcggccgagtacggcggacatcagaggttggatcattcgaccgatttcttttcagaggcgttcgaacataacggtcgcccgtacagcctccttgtgtacattccaagccgagtggccctgattctgcagaacgtagacttgcctaat

SEQ ID NO: 3455 - DNA, 2106 bp, Artificial Sequence
  derived and/or modified sequence
atggccgcgccaatgacccctgcggcgcgaccagaggactatgaagccgcactcaatgccgctctcgctgacgtgccagaacttgcaaggctccttgaaatcgatccataccttaagccctacgcagtggacttccaaaggcggtacaagcagttttcacagatactcaaaaacatcggcgagaacgaaggtggcatcgataagttttcgagagggtacgaatcatttggcgttcacagatgcgccgatggaggtttgtactgcaaagagtgggcccctggggcagagggtgttttcctgaccggagactttaacggatggaacccattttcatacccgtacaaaaagctggattacggcaagtgggagctttacattcccccgaagcaaaacaagtcggtcctcgtgcctcacggatcgaagctgaaggtcgtcataacctcgaagtccggggaaattctgtacaggatttcaccttgggccaagtacgtggtgagggaaggagataatgtgaattatgactggattcactgggaccctgagcactcctacgagtttaaacattcaagacccaagaagccccgttccctgcggatttacgaatcacatgtgggaatttcgagccacgagggaaaggttgccagctataagcattttacttgtaacgtgcttcccagaatcaagggactgggatacaactgtattcaactgatggcgatcatggaacatgcatactacgcatccttcgggtaccagatcacttcgttttttgcagcaagttcgcgatacggaactccggaggaactccaagaacttgttgatacggcgcactcgatgggtattatcgtgcttctggatgtcgtgcattcgcatgcgtcgaagaacagcgcagatggtttgaatatgttcgatggtaccgacagctgttacttccattcaggaccccggggaacccatgacctctgggactcaagactttttgcttactcctcgtgggagatcttgcgctttctgctgagcaacattcgatggtggttggaagaataccgatttgatggctttcggtttgacggcgtgacttccatgctgtaccatcaccatggagtcggacagggattctcaggcgattacagcgaatactttggactgcaggtggatgaagatgcactcacgtacctgatgcttgcaaatcatcttgtgcacaccctttgccctgatagcattactattgcagaggatgtgagtggaatgccagcactctgtagcccgattagccaaggtggcgggggttttgattacagacttgcaatggctatcccagacaagtggatccaactgcttaaggaattcaaggacgaagattggaatatgggagatattgtgtacaccctcaccaatcgccgctacctcgaaaagtgtatagcctatgcagagtcgcatgaccaagctctggtgggtgataagtcgctcgccttttggcttatggatgccgaaatgtacaccaacatgtcagtgctgaccccctttactccggttattgatcggggaatccaactgcataagatgattcgccttattactcatgggcttggaggtgaaggctacctcaatttcatgggtaatgagtttgggcaccctgagtggcttgactttccacggaaaggtaataacgagtcctatcattatgcaagacgccagttccacctgaccgatgatgatcttctccggtacaagtttctgaacaactttgatagggatatgaaccgcttggaggaacggtacggatggcttgccgcaccgcaggcatacgtcagcgaaaagcatgagggaaacaagatcattgcatttgaaagggcaggtttgcttttcattttcaatttccatcctagcaagtcctacactgactaccgagtggggactgcactgcccggcaagtttaagatcgtgctggactcggacgcagcagagtacggaggacaccagcgtcttgatcattcaactgactttttctcggaggcgttcgaacacaacggacgaccttactcgctgctggtgtacattccttcaagagtggccctgatcctccagaatgtcgacctccccaat

SEQ ID NO: 3456 - DNA, 2106 bp, Artificial Sequence
  derived and/or modified sequence
atggccgcccccatgacgccagcggccagacccgaggactacgaggccgctctgaatgctgctctggctgacgttcctgaacttgcccgcctcctggagatcgacccctatctgaaaccctatgctgtggactttcaaaggcgttacaagcaatttagccagatcctgaagaacattggtgagaacgaggggggaatcgataaattcagtaggggctatgagtccttcggagtccaccgttgtgccgacggcggcctgtattgcaaagaatgggcacccggcgccgagggcgtgtttctgacgggggatttcaatggatggaacccctttagttacccatacaagaagctggattacggaaaatgggagctgtatattccacctaagcagaataagagcgtgctggtaccccatggaagcaagctgaaggtagtgatcacatccaagagtggggaaattctctatcgtatctctccttgggctaagtatgttgtccgcgaaggcgacaacgtaaactatgactggatccattgggaccctgagcacagctatgagtttaaacacagtagaccaaagaagccgcgctctctgaggatctatgagagtcacgttggtattagctcccacgagggcaaggtggcctcgtacaaacacttcacctgcaatgtgctgcctcgaatcaaaggactgggttacaattgtattcagctgatggcaatcatggaacatgcgtattacgcatcatttggatatcagatcacctccttctttgccgctagttccaggtacggcacgcctgaagagctgcaggagctggtggatacagcccacagtatggggataattgtgctgctggacgtggtgcactcacatgctagcaagaattcagcagatggtctgaacatgttcgatgggacagactcttgttactttcattcaggcccccgaggcacacatgacctatgggactctcgactgttcgcctactctagctgggaaattctccgctttctgctgtctaatatcagatggtggcttgaggagtaccggttcgatggcttccgttttgacggggttacaagcatgttataccatcatcacggcgtgggacagggtttctcaggcgattactctgagtacttcggccttcaggtcgacgaagatgccttgacatacctgatgctggctaatcacttggtccacacattatgccccgactctatcaccattgcagaagacgtgtcaggcatgcccgcgctgtgcagccctatctcccagggaggcggaggctttgactacagattagcaatggcaatcccggacaaatggatccagctcttgaaggagtttaaggatgaggactggaatatgggagacatcgtttacaccctgacaaaccgccggtacctcgagaagtgtatcgcctacgccgagagtcatgaccaagcattggtgggcgacaaaagcctggccttttggctgatggatgcggagatgtacacaaacatgagtgtccttaccccgttcacaccggtaatcgatcgtgggatccaactgcataaaatgataagactgatcacacacgggttaggaggcgaaggttacttgaattttatgggaaacgagttcggccatcctgaatggctggactttcctcgcaaaggaaacaacgagtcatatcattacgctcggcggcagtttcacctgactgacgatgacctgctcagatacaaatttctaaacaattttgaccgagacatgaacagactcgaagagagatacgggtggttggccgcaccacaagcatacgtgtcagagaagcatgagggaaataaaataatagcctttgaacgtgccggattgctgtttatcttcaacttccatccctcgaagagctacacagattaccgggtgggtaccgcgctgcctggcaaattcaagattgttctcgattccgacgcagctgaatacggtggtcatcagcgtcttgaccatagcacagactttttctcagaggcattcgagcacaacgggaggccctactctctcctggtttatattccttcccgcgtcgctctgattctgcagaacgtggacctgccgaat

SEQ ID NO: 3457 - DNA, 2106 bp, Artificial Sequence
  derived and/or modified sequence
atggcagcacctatgactcctgcagcaagacctgaggactacgaagcagctctgaacgctgcactggccgacgtgcctgagctggcaagattgcttgaaattgatccatacctcaaaccttacgcagttgactttcaacgaaggtataaacagttctcacaaatcctgaagaacataggagagaacgaagggggaatcgacaaattctcccgcggatacgaatcatttggcgtgcatcgatgtgctgatggtgggttgtactgtaaggaatgggcgcctggtgcagaaggtgtgtttcttacgggagatttcaatggttggaatccattcagctacccttacaagaagctggattacggcaagtgggaactttacattccacctaaacaaaacaagtccgtgcttgtccctcatggaagcaagctcaaagtggtgataacgtcgaaaagcggagagattttgtaccgcatttcgccttgggcaaagtacgtggttcgagaaggtgataacgtgaattacgattggatacattgggaccctgagcactcatacgagtttaagcactcgcgcccaaaaaagcctagaagccttagaatttacgagtcccatgtcggaatatcaagccacgagggtaaagtggcctcatacaaacacttcacctgtaacgtgcttcctcgcatcaagggattgggatacaattgcatccagcttatggcaattatggaacatgcctactacgcgtccttcggataccagattacctcgttcttcgcggcatcatcacggtacgggacccccgaggagctgcaagaactcgtggatactgcacattcaatgggcattatcgtccttctggatgtggtgcactcccacgcatcgaagaactccgcggatggactcaatatgttcgatggcaccgattcgtgttactttcactcgggaccccgcgggactcatgatctgtgggattctcgcctgttcgcatactcgtcatgggagattttgagatttctgctttccaacattaggtggtggctggaagaataccggttcgatggatttagatttgacggagtgacttcaatgctgtaccaccatcacggggtcggacaaggtttctcgggcgattactctgagtacttcggacttcaggtcgacgaagatgcactgacctacttgatgctcgcaaaccatctggttcatactctctgtccagattcaatcaccattgccgaagatgtctcaggtatgcctgcactgtgttcgccaatttcacaaggtggcggggggttcgactacagactggcaatggccattcccgataagtggattcagcttctgaaggagtttaaagacgaggactggaatatgggcgatattgtctacaccctcactaataggagatacctcgaaaagtgtatcgcatacgccgaatcgcatgatcaggcactggtgggtgataaatcactggcattttggctgatggacgcagagatgtatactaacatgagcgtgctgaccccttttacccccgtcatagatagaggtattcaacttcataagatgatcagactgatcacccacggtcttggaggagaaggttacctcaactttatgggaaacgaattcggacatccagaatggttggattttcctcggaaagggaacaacgaatcgtaccattacgctaggaggcaatttcacctcaccgatgatgacctgctgcggtacaaatttctgaacaatttcgatagggacatgaatcgccttgaggaacgatacggctggctggccgccccgcaagcgtacgtgagcgagaaacatgaaggtaacaagattatcgcatttgagagagccggtctgcttttcatattcaattttcaccctagcaaatcatacacggattatcgtgtcggcactgcactccccggaaagttcaagattgtcctggatagcgatgccgcagaatatggggggcaccagcgtctggatcactcgacggactttttctctgaagcattcgaacacaatggtagaccttacagccttctggtgtacatccctagccgggtggcacttatcctgcagaacgtggacctgccaaac

SEQ ID NO: 3458 - DNA, 2106 bp, Artificial Sequence
  derived and/or modified sequence
atggcagccccgatgactcctgccgcaaggcctgaagattatgaggcggccttgaacgccgcactggcggacgtccctgagcttgcccgcctgctggagatcgacccatacctgaagccgtatgccgtggactttcagcggagatacaaacaattttcgcaaatcctcaagaacattggggaaaatgaagggggaatcgataagttctcacgaggttacgagtcgtttggcgtccacagatgtgccgacgggggactctattgcaaagagtgggctcccggtgctgagggagttttcctgactggagactttaacggttggaacccgttctcgtacccgtacaagaagctcgactacggcaagtgggagctttacatcccgccaaagcaaaacaagtccgtgctggtcccacatgggagcaagctgaaggtcgtgatcacttcgaagagcggagaaatcctctatagaatttcgccctgggctaagtacgttgtgcgagaaggtgacaacgtgaactacgattggatccattgggatcccgaacactcctacgaattcaaacatagccggcccaagaagccgcgcagcctccggatctacgagagccacgtcggaatttcctcgcacgaaggaaaagtggcgtcgtacaagcactttacctgcaacgtgctgccgcgcatcaagggcctcggttacaactgtatccagttgatggcaatcatggagcatgcctactatgcatcattcggctaccagattacttcctttttcgccgctagctcgcgctacggtactcctgaagagctgcaagaactggttgacaccgcccactcgatgggcattatcgtgctgctcgatgtggtccacagccatgcatcgaagaactcagcggacggactcaacatgtttgacggtaccgacagctgttactttcactcgggacctcgcggcacccacgatctgtgggacagccgccttttcgcatactcctcgtgggagattcttcgcttcttgctgtcgaacattcggtggtggctcgaagaataccggttcgacggatttcggttcgacggggttacctctatgctctaccatcaccacggggtgggccagggcttctcaggcgactacagcgaatacttcggactccaagtggatgaggacgcattgacgtacctgatgctggctaatcatctggtgcataccctctgcccggactccatcactatcgccgaggatgtcagcgggatgccggcactgtgttcgccgatctcgcagggtggcggtgggtttgattacagactggccatggcaattcccgacaagtggatccaactgctgaaagagttcaaggatgaagattggaatatgggagacatcgtctacactctgaccaatagacgctacctggaaaaatgtattgcgtacgccgaatcacatgaccaggctttggtcggggacaaatcactggcgttctggctgatggacgccgaaatgtacaccaacatgagcgtgctgactcctttcaccccagtgatcgaccgcggaatccaactgcacaaaatgatccgcctcatcacccatggattgggaggcgaaggatacttgaactttatgggcaatgaattcggacatccggagtggcttgacttcccgcggaagggcaacaatgaatcgtaccattacgccagacggcagttccacctgacggatgatgacctcctcaggtacaagttcctcaataacttcgacagggatatgaaccggctggaagaacggtacggatggctggcggctcctcaggcttacgtttcagaaaagcacgaaggtaacaagatcatcgctttcgaacgcgctgggctgctgttcattttcaactttcacccatcgaagtcttacactgattatcgggtgggaactgcgcttccggggaaattcaagatcgtcctcgactcagacgcggcagaatacggcggacaccagcgcctggatcattcgactgactttttcagcgaagcatttgagcacaacggacggccatactcgctcctggtgtacatcccatcgcgggttgcgctgatcctgcagaatgtcgaccttcctaat

SEQ ID NO: 3459 - DNA, 2106 bp, Artificial Sequence
  derived and/or modified sequence
atggcagcacctatgaccccggcagcgcggccagaggactacgaagcggcacttaacgccgccctcgcggatgtgcccgaactcgcgagactgctcgaaatagatccctatttgaaaccatatgcagtggatttccaaagacggtataaacaattttcgcagattctgaagaatatcggtgagaacgagggtggaattgataagttcagcaggggatacgagtcatttggagtgcatcgttgtgctgatggcggtctgtactgtaaggaatgggctcctggagcagagggtgtgttccttaccggtgatttcaatgggtggaacccgttttcatacccatacaaaaaacttgattacgggaagtgggagctctacatcccacctaagcaaaacaagtcagtccttgttccgcacggctccaagctgaaggtcgttattacttcgaagtcaggggaaattctttatcgcatctccccttgggccaagtacgtggtgagagaaggggacaatgtgaactacgattggatccactgggatccagaacattcctacgaattcaagcattcgcggccgaagaaacctaggtcgctgagaatatacgagtcccatgtgggcatctcctcgcacgaggggaaggttgcatcgtacaagcatttcacctgtaatgtgctgcctcggataaagggtctggggtacaactgcattcaactcatggcaataatggaacacgcctactatgcatcgtttggataccaaattaccagctttttcgcagcttcgtcgagatacggtaccccagaagagcttcaagaactggtcgacaccgcacattccatgggtatcatcgtgcttctcgacgtggttcattcacatgcctctaagaacagcgcggacggactgaatatgtttgatggaacggattcatgttactttcactcgggtccccggggaactcatgatctctgggacagcagactttttgcatactccagctgggagatacttagattcctgctttccaatattcggtggtggctcgaagagtaccgttttgatggattccgttttgacggagtgacctccatgctttaccatcaccatggagtcggccaaggattttcaggtgattattcggaatactttggccttcaggtggacgaagatgcactcacttacttgatgcttgccaatcacttggtgcataccctgtgtcctgattcgatcaccatcgccgaagatgtctccggaatgcctgcactctgttcccccatcagccaaggtggtggtggattcgattaccgacttgccatggcgattcccgataaatggatacagctgctcaaagaattcaaagacgaagattggaacatgggggatattgtctacaccttgactaatcgaaggtacctggaaaagtgcattgcatacgcagaatcccatgatcaagctctcgtgggagacaaatcacttgcattctggcttatggacgcagagatgtacaccaatatgagcgtgctgaccccgtttacccccgtgatcgaccgtggcattcaactgcataagatgatccgcctgattacgcatggcttgggtggtgagggttacttgaatttcatggggaatgaatttggacatccagaatggctggatttcccaagaaaggggaacaacgagtcataccactatgcacggcggcagtttcatcttactgacgacgaccttctgaggtacaaatttctgaataacttcgatcgggatatgaaccgcctggaagagaggtacggatggctggcagcacctcaggcatatgtgtccgagaaacacgagggaaacaagattatcgcatttgaaagggcaggacttcttttcattttcaacttccacccatccaagtcgtacactgactacagagtcggtactgcactgcctggaaagtttaagatcgtcctcgattcagatgcggcagaatacggaggtcatcagcgcctggaccacagcactgactttttcagcgaagccttcgaacataacggaaggccatactcgcttttggtgtacatacccagccgcgtggcgctgattctgcagaacgtggatctccctaac

SEQ ID NO: 3460 - DNA, 2106 bp, Artificial Sequence
  derived and/or modified sequence
atggcggcccctatgacgcctgctgcccgacctgaggactatgaggctgccctaaacgcagcacttgcagatgtgccagagctggcacggttgctagagatagatccatatctgaagccctacgctgttgacttccaaaggcggtataaacaattttcccaaatactgaaaaatattggagaaaatgagggtggcatcgataagttctccaggggctacgagtccttcggcgtccaccgctgcgccgatgggggactttactgcaaagagtgggctcctggtgctgaaggagtctttttgactggtgacttcaatggctggaatcctttttcatatccatacaaaaagctcgattacggaaagtgggagctgtatatcccacctaagcagaataagtctgtgctggttccccatggctcaaagctaaaagtcgtgatcaccagcaagagcggggagattctgtaccgcatatccccatgggccaaatacgtggtccgtgagggagacaatgtgaactatgactggattcactgggatccagaacattcctatgagtttaagcactcccggcctaaaaaaccgcgcagtctacggatctacgagtcccacgtgggaatctcaagccacgaagggaaagttgccagctataaacattttacgtgtaatgttttaccacgcataaaaggcctaggatataattgtattcagcttatggctatcatggaacacgcatactatgcctcattcggataccagataacctctttcttcgcagcctcttctcggtacggaacccctgaggaactgcaggagcttgtcgatacagctcactccatgggtatcattgtattactggatgtggtgcattcccatgcttccaaaaactccgctgatggccttaacatgttcgatggtacagacagctgttactttcactccgggccaagaggcacccatgacctctgggatagcaggctattcgcatatagctcctgggagatactccgctttctgctgtccaacatccgttggtggcttgaggagtatcggttcgacggattcagatttgatggcgtgacatccatgttatatcaccaccacggagttgggcagggcttttctggagattactccgaatattttggactgcaggtagacgaggatgccctgacgtatctgatgcttgcaaatcatctggtccatacgctgtgccctgacagcattacgatcgcagaggatgtttccggtatgcccgcattgtgcagccccattagtcagggcggagggggttttgattaccggttagcaatggccataccagataagtggatccagctgctgaaagagttcaaagacgaggattggaatatgggtgatatcgtttacactctgaccaataggcgctatctcgaaaaatgcattgcttatgcggaatcgcatgatcaagctctggtgggcgacaaaagcctggcattttggctgatggatgccgaaatgtataccaatatgagtgtcctgacaccattcaccccggttattgaccgcggaatccagctgcataaaatgattcgactgatcacacacggtcttgggggagaaggctacctcaacttcatgggcaatgagttcggccacccggaatggctggacttccccaggaaaggaaacaatgaatcctatcattacgcacgcaggcagttccacctgaccgatgatgacttgctgagatacaaatttctcaacaactttgaccgtgacatgaaccggctcgaggagcgctacggctggttggctgcaccccaagcgtacgtatctgaaaagcacgagggaaacaaaatcattgcctttgagagggctgggttgctcttcatattcaattttcatcctagcaaatcatataccgactaccgagtgggaacagccctgcctggcaagttcaaaatcgtcctggattcagatgcggctgagtatgggggccatcagcgtttggatcattccacagacttctttagtgaggccttcgagcacaacggacggccatattcgctgttggtgtatatcccgtctcgggtcgccctcatcctccagaatgtggacctacccaat

SEQ ID NO: 3461 - DNA, 2106 bp, Artificial Sequence
  derived and/or modified sequence
atggccgcccccatgactccagccgcccggcctgaggactacgaggccgctctcaatgcagctctggccgacgtgccagagctcgcccgattgttggagatagatccctacctgaagccttacgctgtggatttccagcggaggtacaagcaatttagccaaatactaaagaacattggggaaaacgaaggcgggattgacaagttcagccggggatatgagagctttggcgttcacagatgcgcagatggcggactgtactgcaaggagtgggcgccaggcgcagagggcgtattcctcacaggagatttcaacggctggaatcctttcagctacccgtataagaagctggactacggtaagtgggagctttatattcctccaaaacaaaacaagtcagtcctggttccacatggctcgaaattgaaggtggtcatcacctctaagtctggcgagattctgtatagaatctccccttgggccaagtatgtggttagggagggcgacaatgtgaattatgactggatccactgggaccccgaacactcttacgaatttaagcatagccgccccaagaaaccacgcagcttgagaatctacgaatctcatgtggggatcagctctcacgaaggcaaggtggccagctacaaacattttacttgcaacgtgctcccgagaattaagggcttgggttataactgcatccagctcatggccattatggagcatgcatactatgcctcttttggctatcagatcacctcgttcttcgcggcatcttccaggtacggtacacctgaagagctccaagagctggttgacaccgcacactctatgggaatcatcgtcctcctggatgtggttcacagtcacgctagcaagaattcggcagatgggctgaacatgtttgatggcaccgacagttgctacttccatagcggccctagaggaacacacgacctttgggattctaggctctttgcttactctagctgggaaatcctgcgattcctgctgagtaacattagatggtggctggaggaatacagattcgacgggtttcggtttgatggagttactagcatgctgtaccaccaccacggtgttggacagggctttagcggcgattacagcgaatatttcggtctgcaggttgacgaagacgctcttacatacctgatgctcgccaaccacctggtgcacactctgtgccctgacagtataaccattgctgaggatgttagtggcatgccggcgctgtgcagcccaatctctcaaggcggaggcgggttcgactacaggttggcaatggcaatccccgacaaatggattcagttattgaaggagttcaaagacgaagactggaacatgggagatatcgtttatactctgacaaatcgtagatacctggagaagtgtattgcctacgccgaaagccatgatcaagcccttgtgggcgataaatcactcgcattttggctgatggatgctgaaatgtacaccaatatgtctgtcctgacacctttcacccctgttatcgatcgtggtatccaactgcacaagatgataaggctgataactcacggcctcggaggcgaagggtaccttaactttatgggaaacgaattcggacacccagagtggctcgattttcctaggaaggggaacaacgaaagttaccactacgcgagacggcagttccatcttaccgacgatgatctcttgcgctacaagttcctgaacaatttcgatagggacatgaacaggctcgaagagaggtacggttggctcgctgcaccccaggcctatgtgagcgagaagcacgaaggcaacaagatcatcgcttttgaaagagccggtctgctgttcattttcaacttccacccttcaaaatcatacacagactacagggtcggcactgcattgcccggaaaatttaaaatcgtgctggattccgacgccgcagagtacggagggcaccagcgactggatcatagtacggactttttctccgaagcattcgagcataacggaagaccttacagtctgctcgtttacattcccagccgtgtcgcgcttatcctccagaatgtagatctccctaat

SEQ ID NO: 3462 - DNA, 2106 bp, Artificial Sequence
  derived and/or modified sequence
atggctgcccctatgaccccggccgcacggccggaagattacgaagccgccctcaatgcggcactcgcggatgtcccagaactggccagactgctggaaatcgacccctacttgaagccatatgctgtggactttcagcggcgctacaagcagttctcacaaattctgaagaacatcggagagaacgaaggaggaatcgacaagttctcacgcggatacgaatcgttcggagtgcaccgatgtgccgacggtggcctctactgcaaggagtgggctccaggagccgaaggagttttcctgactggggatttcaacggatggaacccgtttagctacccatacaagaagctcgattacggcaagtgggaattgtacatccctcctaaacaaaacaagagcgtcctggtgcctcacggatccaagctgaaggtggtcatcacctccaaaagcggtgaaatcctctaccggatctccccgtgggccaagtacgtcgtgagagaaggcgataacgtgaactatgactggatccactgggacccggagcactcgtacgaattcaaacactcaaggccgaagaagcctcgctctctcagaatctacgaatcacacgtgggaatctcgtcgcacgaaggaaaggtggcctcctacaagcacttcacttgcaacgtcctcccacgcattaaaggattgggatacaactgcatccagctcatggcgatcatggagcatgcatattacgcgagcttcggctaccagatcaccagcttctttgccgcgtcctccaggtacggaacgcctgaagagcttcaggaactggtggataccgctcatagcatgggaatcatcgtcctgctggacgtcgtgcactcgcatgcgtccaagaactcggcggacggattgaatatgttcgacggcactgactcatgttacttccactcgggaccgcgcggcacccacgacctctgggactcacgcctgttcgcctactcctcatgggagatcctccgctttttgctgtcgaacatcagatggtggcttgaagagtacagatttgacggcttccgcttcgacggagtgacctcgatgctgtaccaccatcatggggtgggccaagggttctcgggagattactcagaatacttcggactgcaggtcgatgaagatgctctgacctacctcatgctggccaaccacttggtgcacactctctgcccggacagcatcactatcgcggaggacgtcagcgggatgccagccctgtgctccccgatctcgcaaggcgggggcggtttcgactaccgattggctatggcgattcccgataaatggatccaactgctcaaggaattcaaggacgaggactggaacatgggagatatcgtgtataccctgactaatagacgctacctggaaaagtgcatcgcctacgccgagagccatgatcaggcccttgtcggggacaaatcgctggcattttggctcatggatgccgaaatgtacacgaacatgtccgtgctgactccgttcactccagtcatcgaccggggaatccagttgcacaagatgatcagactgattactcatggactcggaggagaaggttacctgaatttcatgggcaacgaattcgggcaccctgagtggctggactttccaaggaaaggcaacaacgaaagctaccattacgcccgccgccaattccacttgaccgacgacgacctcctgcgctacaagtttctgaacaatttcgacagggacatgaaccgcctggaagaacgctacggctggctggcagcgccgcaggcttacgtttcggaaaaacatgaaggaaataagataatcgccttcgagcgcgcgggactgctgttcatcttcaactttcacccgtccaaatcgtataccgactacagggtgggtacggccctgcctggaaaattcaaaatcgtgctggattctgacgccgcggagtacggaggccaccagagactcgaccactcgactgacttcttttcggaggcctttgaacataacggtcgcccgtattctctcctcgtctacatcccaagcagagtggcccttatcctgcagaatgtggatctgccgaac

SEQ ID NO: 3463 - DNA, 2106 bp, Artificial Sequence
  derived and/or modified sequence
atggcagctcctatgacccccgccgctaggcctgaggattacgaggccgccctcaacgcagccttggctgatgtgcctgagctcgcccggctgctcgagatcgacccgtatctgaagccttatgctgttgattttcaacgaagatataagcaattttcccagatcctcaaaaacattggagagaacgagggaggaatcgacaaattctctcgaggctatgaatcatttggggtgcataggtgtgctgacggcggactgtactgcaaggagtgggcccctggagcggaaggagtatttctgactggcgactttaacgggtggaatcccttctcctacccgtacaagaagctagattacgggaagtgggagctgtacattcccccaaagcaaaataagagcgtactggttccacacggaagcaagcttaaggtggtcataacatcaaaatctggtgaaattctctatcgtatcagcccctgggccaagtacgtggtgagggagggtgacaacgttaattacgattggatccactgggatccagaacattcgtacgagttcaagcatagcaggcccaagaaacccaggagcttgcgaatttacgagtctcacgttgggatcagctcccacgaggggaaggtcgcatcctacaagcattttacctgtaacgtgcttccccggattaagggcctcggctacaactgcattcaacttatggctatcatggagcatgcatactatgctagcttcggttaccaaattacttctttcttcgctgcttccagtaggtatggcacgccagaagagcttcaggagttggtagacactgcccatagtatgggaattatcgtgctgctggatgtggtccatagccacgcaagtaagaacagtgccgatgggctcaatatgttcgacggaactgactcctgttactttcatagtgggccccggggcactcatgatctatgggactctcgattgttcgcctattcaagctgggagattctgcgctttctgttaagcaatattaggtggtggttggaggaataccggttcgatggatttcgcttcgacggtgtgacttcaatgctgtaccatcatcacggcgttggacaaggtttcagcggtgactacagcgagtactttggtcttcaagtggacgaggacgccctgacttatttgatgctagcaaaccatctggtgcatactttgtgtcctgatagtatcaccatcgctgaggacgtgtcaggcatgccagcgctgtgttcgccaatcagccagggtggtggcgggttcgactacaggttagctatggccatccctgataagtggatacaactgctgaaggagtttaaggatgaagattggaacatgggcgatatcgtctacacactgactaaccgtcggtacctcgagaagtgtatcgcttatgcagagtcccatgatcaagccctggttggggacaagtcacttgctttttggttgatggatgcggagatgtatactaacatgtccgtactgacgcccttcactcccgtgattgacagagggatccagctccacaaaatgatccgcctcatcacccatggcctaggaggcgaggggtatcttaactttatgggcaacgagtttgggcatcccgagtggctcgatttccctcgcaagggtaacaatgagtcctaccattacgctaggaggcagttccatttgactgacgacgacctcctcagatataagttccttaataactttgaccgggatatgaaccgactcgaagaacgatatgggtggttggcagcaccacaagcctacgtgtccgagaaacacgagggaaacaagatcatagcgtttgaacgagctggcctgttatttatatttaattttcacccctccaagagctacactgactacagagtggggacggctcttcctggcaaattcaaaatcgttctggacagcgatgccgccgagtacggcgggcatcagagacttgaccattcaaccgatttcttcagcgaagcatttgagcataacggacgcccatatagtctgcttgtctatatcccaagtagggtcgcgctaattttgcaaaacgtggacttgccaaac

SEQ ID NO: 3464 - DNA, 2106 bp, Artificial Sequence
  derived and/or modified sequence
atggcagctcccatgaccccagcagcaagacctgaagattatgaggcagctctgaatgctgcactcgcagatgtgccagagcttgcaaggctcttggagattgatccatacctaaagccctatgcggtggactttcagcgtagatacaagcagttcagccaaatcctgaagaatatcggggaaaatgagggaggaattgacaagttttctcgcggctatgagtcctttggagtgcataggtgcgcggacggtggcttatactgtaaggagtgggcgcctggtgctgagggcgtgttcctgactggcgattttaacggctggaatcccttttcatatccttacaagaagcttgactatggtaagtgggagctatacatccctccaaagcagaacaaatcagttctcgtgccccatgggtcaaaattgaaagttgtgatcactagtaagtctggtgagatcctttaccggatcagcccgtgggctaagtacgtggtgagagagggagacaacgtgaactatgactggattcactgggatcccgaacactcatacgaatttaagcatagtcgacctaaaaaacccagaagcctacgaatctatgagtcacatgtgggcatctcctcacacgaaggtaaggttgcgtcctacaagcatttcacatgtaatgtactgccacgtataaagggcctcggctataattgcatccagctcatggccatcatggaacatgcctattatgcctcattcggttaccaaatcacttcttttttcgcggcgagctcacgttatggtactcctgaggagcttcaggagctcgtggataccgcacactctatgggcattatcgtgctgcttgacgttgtacacagccacgcaagtaagaatagcgccgacggactaaatatgtttgatggaacagactcatgttacttccattcgggaccccgcggaacgcatgatctgtgggattctcggttgttcgcgtacagttcatgggagatcctccgcttccttttatcaaatattcggtggtggctcgaagaatacagatttgacgggttcaggtttgacggagtgacgtctatgctgtaccatcatcacggagtggggcaggggttttcgggcgattactcagaatattttggccttcaggtggacgaggacgcactgacctacctgatgctcgcaaaccatcttgtgcatacactctgtcctgactcaatcaccatcgccgaagatgtgagtggcatgcctgcgctatgtagcccgatcagccagggcggaggcggctttgattataggctggcaatggccatccccgacaaatggatccaattgcttaaggagtttaaggatgaagactggaatatgggcgatatagtttacacactcacaaaccggagatatctggaaaaatgcatcgcttacgccgaatcccacgaccaggccctcgtcggcgataaaagccttgcattctggttgatggatgctgaaatgtataccaatatgtccgtactgacacctttcacaccagttatcgacaggggtatccagctgcacaaaatgatccggcttatcacccacggcttgggtggtgagggatacttgaatttcatgggaaacgagtttggtcacccggaatggctggacttcccacgcaagggtaataatgagtcgtatcactacgctcggcgccaatttcacctgaccgatgatgacctgttgaggtataaatttctgaataatttcgacagggacatgaatcggctcgaagagaggtatggctggctggctgctccccaggcttatgtctctgagaagcacgaggggaataagatcattgccttcgagagggcaggcttgctgttcatcttcaatttccacccttccaagtcctacacagattaccgagtgggaacggccctgcccggaaaattcaaaatagttctggatagcgacgctgccgagtacggcggacaccagcgcttggaccactccacagatttcttctctgaggcctttgaacacaacggtcgcccatattctttgcttgtgtacattcctagtcgggtcgctctcatactgcagaatgtggatctgccaaat

SEQ ID NO: 3465 - DNA, 2106 bp, Artificial Sequence
  derived and/or modified sequence
atggcagccccgatgactcccgccgccaggcccgaagactatgaggcagcgctgaatgccgcactggccgacgtcccggaactagcacgtctcctggagatcgatccatacctgaagccttacgctgtggactttcaacgccgttacaaacagttcagtcagattctgaagaacatcggagaaaacgaaggggggattgacaaattcagccgtggatatgaatcctttggcgtgcacagatgcgccgatggcgggctgtactgcaaggaatgggctcccggcgccgagggggttttcctcaccggcgactttaacgggtggaatcctttttcttatccctacaagaagcttgattatggaaagtgggagctctacattccccccaaacagaacaaaagcgtcctggtgccccacggatccaagctgaaagtggttataacctcgaaatcaggggagatcttgtaccgcatcagcccctgggccaaatacgtcgtgagagagggggataatgtgaattatgactggatacattgggatccggagcacagctatgaattcaagcattcccgccccaagaagccgcgttctcttcgcatctacgaaagccacgtgggaatctcttcccacgaaggtaaggtagcatcgtacaagcatttcacctgcaacgtgctgccacgtatcaagggtcttggttataattgtatacaattaatggccattatggaacatgcatactacgcgagctttggttaccaaatcaccagcttctttgccgcctcttctcgatatggcacacctgaagaactgcaggagctcgttgacacagctcatagcatggggatcatagttcttctggacgttgttcacagtcacgccagcaagaactcagccgatgggctgaacatgttcgatggcacggactcttgctacttccactcaggaccaagggggacccacgacttgtgggattcaagattgtttgcttacagttcgtgggagatccttaggtttctgctgtccaacatacgctggtggctggaagagtacagatttgatgggttcagattcgacggagtgacaagtatgctttatcaccaccatggagttggacaaggattttccggggactactcagagtattttggcctgcaggtcgatgaggatgccctcacttatctgatgctggccaaccacttggtgcatacattatgtcctgattctataaccattgctgaggacgtctcgggtatgcctgctctgtgtagccccatctcacaggggggcggcgggtttgattatagactcgcaatggcaattcctgacaaatggattcagctgcttaaggagttcaaagatgaggactggaatatgggggatatagtgtacacactgaccaatcgtaggtatctggaaaagtgcatcgcctacgccgaatcacatgatcaggctctggtcggtgataaatcattggctttttggcttatggacgccgaaatgtataccaacatgagcgtgctaacaccgttcacacctgtcatcgataggggaattcaactccacaagatgattcggctgatcacgcacggactcggcggcgagggttacctgaatttcatgggaaatgagtttgggcatcccgagtggctcgacttcccccgcaaagggaacaatgagagctatcattatgccagacgccagtttcaccttaccgacgatgatctgcttagatacaagtttctgaataactttgaccgcgatatgaacagactcgaggaacggtacgggtggctggccgctccccaggcttatgtctcggagaagcacgaggggaataaaatcatcgctttcgagagagctgggttactattcatctttaattttcatccaagcaagtcgtatacagactatagggtgggaactgctctgcccggtaaattcaagattgtgctggactcagatgcagctgaatatggtggccatcagcgcctggaccattcgacagatttttttagcgaagccttcgaacataatgggcgcccctacagtcttcttgtatacatcccaagtagggtagcactgatcctgcagaatgtggatcttcccaac

SEQ ID NO: 3466 - DNA, 2106 bp, Artificial Sequence
  derived and/or modified sequence
atggcggctccaatgactccagcagcccgcccggaggactatgaggcagcccttaacgccgcactggcagacgttccggaactcgcccgcttgctggagattgacccgtacttgaagccatacgcggtcgacttccaacgcagatataagcaattctcgcagatcctcaagaacatcggtgaaaacgaaggcggcatcgataagttctctcgcggatacgagtcattcggagtccacaggtgcgcggatgggggtctgtactgcaaggaatgggctcctggggcagagggtgtgttcctgaccggggacttcaatggatggaacccgttcagttacccgtacaaaaagttggattatggcaaatgggagttgtatatcccgcctaagcagaataagtcggtcctggttccccacggatcgaaattgaaagttgtgatcacgagcaagtcgggggaaatcctgtacagaatctcaccttgggcgaaatacgtggtgagagaaggggacaatgtcaactacgactggatccactgggaccctgagcattcgtacgagtttaaacatagccggccgaagaagccacggagcctccgcatctatgaatcacacgttggaatcagcagccacgaaggaaaggttgctagctataaacacttcacttgcaatgtcctcccgcgcatcaagggactcggatacaactgtatccagctgatggcaattatggagcacgcctactatgcttcgttcggatatcagatcaccagcttctttgccgcatcctcccgctacggaacccccgaagaacttcaggagctggtcgacactgcacatagcatgggtatcatcgtccttctggacgtggtgcatagccacgccagcaagaatagtgccgacgggctcaatatgtttgatggaaccgactcctgctactttcattcgggtcctagaggcactcacgatctgtgggactcccggctgttcgcgtactcaagttgggagatcctcagattccttctgagcaacatccggtggtggctcgaagagtaccggtttgacggatttcggttcgatggcgtgacttcgatgctctaccaccaccacggagtgggccagggattctcaggcgactactcagaatactttggactccaggtggacgaggacgcgctgacctacctgatgcttgctaatcacttggtgcatacgctctgtccagattcgatcaccatcgcggaggatgtgtcgggaatgcccgccctctgctctccgataagtcaggggggaggaggatttgactacagactcgctatggccatccctgacaagtggatccagctgctcaaggaattcaaggatgaagattggaacatgggagacatagtgtacaccctgaccaaccgacgctacctcgaaaagtgcattgcctacgccgaatcccacgatcaagcgttggtgggagataagtcactggcattctggctcatggatgcggagatgtacactaacatgtcggtgctgactccgttcactccggtgatcgacaggggaatccaactgcataagatgattaggctcatcacccatggcctcggaggggagggatacctgaatttcatgggaaatgaattcggacacccagagtggctcgatttcccaagaaagggaaacaatgaaagctaccattacgcccgccgtcaattccacctgacggatgatgatctgctgcgctacaaattcttgaacaactttgaccgggacatgaaccgcctggaagagaggtacggttggctcgcagccccgcaggcctacgtcagcgagaaacacgagggcaacaagattatcgcgtttgagcgggcgggcctgcttttcatcttcaactttcatccctccaagtcgtacaccgactaccgagtcgggactgccctgccgggtaaattcaaaatcgtgctggactcagacgcagcggaatacggtggacaccagcgcctcgaccattcaaccgactttttctccgaggcctttgaacacaacggacgcccatactcgctgttggtgtacattccttcacgggtcgccctcatcctgcagaacgtcgacctgccgaac

SEQ ID NO: 3467 - DNA, 2106 bp, Artificial Sequence
  derived and/or modified sequence
atggccgctcccatgacccctgcggcgcgtcctgaagattatgaagcagcgctcaatgccgccttggccgatgtacccgagctggcccggttactggagattgatccctatctgaagccatatgctgtcgactttcagaggagatacaaacagttcagtcagattctcaagaatattggcgagaatgagggaggaatcgacaagttttctcgcggatatgagtcattcggcgttcatcggtgtgccgacggggggctttattgcaaggagtgggctccgggagccgaaggtgtgtttcttacaggagactttaacggatggaatcccttcagttatccatataagaagttggattatggcaaatgggagttatacatccctcccaaacagaacaaatccgtcctggtgcctcatggttcaaaactcaaggtagtgattacatccaagtccggagagatactgtataggatttcgccgtgggccaaatatgtggtgcgcgagggagataacgtgaattatgactggattcactgggacccagagcatagctatgagtttaagcatagtcggcccaaaaagccacgcagcctgcggatttatgagtcccatgtaggcatttcttctcacgagggaaaggttgccagttacaagcacttcacgtgcaatgtgttgccccgaattaaggggctcggctataactgcattcagttgatggccataatggagcacgcctactatgcttccttcggctaccaaatcacgagtttctttgcggccagctccaggtacgggaccccagaggagctccaggagctggttgataccgcccactcgatgggcataatcgtgctcctcgatgtagtgcacagtcatgcttctaagaacagcgccgatgggctcaacatgtttgacggaactgattcatgctactttcactctgggcctcgaggaacgcatgacctgtgggactctaggttatttgcctactcttcttgggagatcttaagattccttctctccaatatcaggtggtggctggaggaataccgattcgacggattccgttttgacggtgtcacatctatgttgtatcaccatcacggcgtcggccaggggttctctggggactacagcgaatactttggccttcaggttgatgaagacgcactgacttaccttatgctagctaaccacctcgtgcacacgttgtgcccagactctattactattgcagaggacgttagtggaatgcccgcactgtgtagcccgatctcccagggggggggagggtttgattataggctggcaatggccatcccagataagtggatacagttacttaaggagttcaaggacgaagactggaacatgggtgatattgtctacaccctgacaaacagacgttacctcgagaaatgcatcgcctatgcagagagtcacgatcaagctctcgtaggagacaagtccctcgccttctggctaatggacgcagagatgtatactaatatgtccgtgctgaccccgttcacccctgtgatcgaccgcgggattcagttgcacaaaatgatccggctcattactcatgggttaggaggggaggggtatctgaacttcatggggaatgagttcggacaccccgaatggttagactttccccgaaaaggcaataatgaaagttatcattacgcgagacgccagttccacctgacagacgacgacctgctcaggtacaagttcctcaacaattttgaccgagacatgaaccgcctggaagagagatatgggtggttggcagcccctcaagcatatgtgtctgagaaacacgaaggcaataagattatcgccttcgaacgagctggcttgctgtttatatttaacttccaccccagcaagagctatacagactacagagtagggaccgctctacccggaaagttcaagattgttcttgattctgatgctgccgaatacggcggccaccagcggctggatcactccacggatttcttcagcgaggcgttcgaacataatggcagaccctactcactgcttgtgtacatcccctccagagtggccctaatcctgcagaacgtggatctgccaaat

SEQ ID NO: 3468 - DNA, 2106 bp, Artificial Sequence
  derived and/or modified sequence
atggcggcccccatgacacccgccgcccgccccgaggattacgaggccgccctgaacgctgcattggctgatgttccagagctggcacgcctgttggagatagatccatatctgaagccttacgctgtggatttccaacggagatacaaacaatttagtcagatcctcaagaatatcggcgagaacgaagggggaatagataaattttccaggggctacgaatctttcggcgtacatagatgcgcggacggaggcctctactgcaaggaatgggctcctggcgctgagggcgtatttttgaccggggattttaacggttggaaccccttctcttatccctataagaaactggattatggcaagtgggaactgtatatacctcccaagcagaataagagcgttctggtcccccacggcagcaagctcaaagtggttattacctccaagagtggggagatactctaccggatctctccgtgggccaaatacgtagtgcgcgagggcgataacgtaaattacgactggattcactgggatcccgagcacagctacgagttcaagcactctcgaccgaagaagcctagatcactccggatttatgagagtcacgtaggaatcagttctcatgagggaaaggttgcctcatacaaacactttacatgcaacgttctgccacggattaagggcctgggatacaactgtatccagctgatggccatcatggaacatgcctactacgcctcctttggttatcagataacctccttctttgccgccagtagtcgctacggcaccccagaagagttgcaagagctcgtcgatacagcccactccatgggaataattgtgctcctcgacgtggtgcactcacacgcgtccaagaattctgcggacggtcttaacatgtttgatggtacagatagctgctattttcacagcggacccaggggtacccatgatctgtgggattcaaggctgtttgcttacagttcctgggagattttgcgcttcttgttgagcaatatcaggtggtggctggaagagtataggtttgacgggtttaggttcgacggcgtcacatctatgctttaccatcatcacggcgtcggacagggctttagcggcgattacagcgaatactttggactccaggttgacgaggacgcactgacttaccttatgctggccaaccacctggtacacactctctgccccgactctataactatcgcagaggacgtgagtggaatgccagccctgtgtagcccgattagccaaggcggaggggggtttgattaccgcctcgcaatggcgatacccgataagtggatccagctgttgaaggaattcaaggatgaggattggaacatgggagacatcgtatacaccttgacgaacagaagatacctggaaaaatgtatcgcctatgcagaaagccacgaccaggccctcgtgggcgacaaaagccttgccttttggctcatggacgccgagatgtacaccaacatgtctgtcttgacgccgtttacgcctgtgatagatcgcggaattcaattgcataagatgatccggttgatcacgcatggactgggcggagaggggtacctcaactttatggggaatgagtttggtcatccagagtggctcgatttccccaggaagggcaataatgaaagctatcactatgcaaggagacagtttcacttgacagatgatgatctgctccgatacaagttcctgaacaattttgatagagatatgaaccgcctggaggagagatatgggtggctggccgcccctcaggcgtacgtgagcgaaaagcatgagggcaacaagataatagcctttgagagagcaggcctgctgtttattttcaacttccacccttctaaaagttacactgactatcgggtggggaccgccttgccgggtaaattcaagattgtgctggacagtgacgctgctgaatacggaggtcaccagcggctggatcattccactgacttctttagtgaagcatttgagcacaatgggaggccctattctctgctggtttacatacccagcagggtggcgttgattcttcaaaacgtggatctccccaac

SEQ ID NO: 3469 - DNA, 2106 bp, Artificial Sequence
  derived and/or modified sequence
atggccgctcccatgacacccgccgctcggcctgaagactacgaagccgcgcttaatgccgctctggctgacgtacctgaactggccagattgctcgagatcgacccgtacctaaaaccctacgcggtagattttcaaaggcgttataagcagttctcacagattctgaaaaacataggagagaacgagggagggattgacaaattttcccgggggtacgagtctttcggagtgcaccgctgcgccgatggcggcttatactgcaaggaatgggcccctggcgctgagggtgtgtttctgaccggcgatttcaatggttggaacccttttagctacccgtacaagaagctggactacggcaagtgggagctgtacattccccctaagcagaataagagtgtactagtccctcacgggtccaaacttaaggtcgtgattacctcaaaatcaggcgagatcctgtacagaatttccccctgggccaaatacgtagtccgagaaggggacaatgtcaactacgattggatacattgggaccctgagcatagctatgaatttaaacatagtaggcccaaaaagcctcgctctctcagaatctatgaaagccatgtaggtatctcttctcatgagggcaaagtggcgtcctataagcattttacatgtaatgtgctgccaagaatcaagggtctgggatataattgcatccagctgatggccatcatggaacatgcatattacgcctcctttgggtaccaaataacgtccttctttgcagcaagctcacggtatggcacacccgaggaactacaggaactagttgacactgcccatagtatgggtatcatcgtccttctggatgtggttcatagccacgccagtaagaactccgctgatgggcttaacatgtttgacggcactgactcttgttatttccatagtggccccaggggtactcacgacctgtgggacagtcgcctgttcgcctactcaagttgggagatcctccgtttcctgctatcaaacatccgctggtggctagaggagtatcgcttcgatggttttaggttcgatggggtcacatccatgctctatcatcaccacggggttggccaaggcttttccggcgactacagcgagtacttcggactccaagtcgacgaggatgccctaacgtacctcatgctcgccaaccacctggttcatacactgtgcccggatagcataacaatagcggaggacgtgtccgggatgcccgcgttgtgctcccctatctcccagggcggtgggggctttgactatcggctcgccatggctattcccgacaaatggatccagctacttaaagaatttaaggatgaagattggaacatgggtgacatcgtgtacacattgacaaacaggaggtatttggaaaagtgtatcgcatacgctgagagtcatgaccaggctctggtgggggacaagtctctggctttctggttaatggacgctgagatgtacacaaacatgtccgtgttgacacccttcacccccgtgattgaccggggcatccagttgcacaaaatgattaggttgattacgcacggtctgggcggcgagggctacctaaactttatgggcaatgagtttgggcatcccgagtggctcgattttcccagaaaaggcaataacgaatcctatcattacgcaagacgccagttccacctcacagacgacgacctcctgaggtacaagttcctgaacaacttcgatcgcgatatgaaccggctcgaagaacgatacggttggctggccgctccccaggcatatgtaagcgaaaagcacgaaggaaataaaattatcgccttcgagcgggctggccttctgtttatatttaatttccacccttccaagtcttacaccgattatcgagtaggaaccgcgctacccggcaagtttaaaatcgtgctcgactcagacgctgcagaatatgggggccaccaaagactcgaccattccactgattttttctcagaagcttttgagcataatggcagaccctactccttgttggtgtatatccccagtcgtgttgctctgatcttacagaatgtggatctgcccaac

SEQ ID NO: 3470 - DNA, 2106 bp, Artificial Sequence
  derived and/or modified sequence
atggccgccccaatgacacctgcagccaggcctgaagactacgaggccgccttaaacgcggccctcgcggacgtccccgagttggcaagacttctggagattgacccatacctgaagccatacgcagtcgattttcaacgccggtataagcagttttcccagattctgaagaatatcggagagaatgaagggggcatagacaagttctccaggggatacgagtccttcggggtgcaccggtgcgccgatggagggctgtactgcaaagaatgggcgcccggagctgagggagtcttcctcactggagattttaacggatggaacccttttagttatccgtacaagaaactggattatggcaagtgggaactgtacatccctcccaaacagaacaagtccgtccttgtgccccacggaagcaaactgaaggtggtcataacgagcaagtccggagagattctgtatcggatctctccttgggccaagtacgtggtgcgtgaaggcgacaacgtgaactatgactggatccactgggacccagaacacagttatgaatttaagcattccaggccaaaaaaaccccgcagcctgaggatctacgaatcacacgttgggatcagctcccatgaaggtaaggtggccagctacaaacactttacctgcaacgtcctgcctcggatcaagggtttgggttacaattgcatacagcttatggcaattatggagcacgcctattacgcatccttcggttaccaaatcacatcattctttgccgcttcctcacgctatggtactcccgaggagcttcaagagctggtagatacggctcattcaatgggcatcatcgtgttactggacgtggttcactcacatgctagcaaaaactcagccgatggccttaacatgtttgatggaactgatagctgttactttcactcaggcccccgcgggacacacgacctgtgggattctaggctgttcgcctatagcagttgggagatactgaggtttttgctgtcaaacatccggtggtggttagaggagtacagatttgacggtttccgctttgacggagtgacaagcatgctttatcatcatcatggggtgggtcagggattctctggggactacagcgaatatttcggcttgcaagtggacgaagacgctctgacctacttgatgctggctaaccacctggtgcacaccctgtgccctgactctatcaccattgcagaagacgtgtcaggaatgcccgcactctgttcacccatcagccaggggggaggcggctttgactacaggctggccatggccatacccgataaatggatacaactgctcaaagaatttaaagatgaggattggaacatgggggatatcgtctatactctgactaatagaagatacctggaaaagtgtattgcctacgctgaaagccacgaccaggcgctggtgggcgataaaagccttgccttttggttgatggacgctgagatgtacaccaacatgtcagtgctcaccccatttacccccgttatagaccggggcatccagcttcacaagatgatcagactcataactcatgggctgggaggtgaaggatatcttaattttatgggaaatgaattcggccacccagaatggctggattttcccaggaaaggaaataacgagtcctatcactacgctcggcgccagttccatctgaccgacgatgatctcctgagatacaaattcctgaataacttcgaccgagacatgaaccgtctggaagaaaggtacggctggctggctgccccccaggcctatgtgagtgaaaaacacgaaggaaacaagattattgcatttgaaagggctggcctcctctttatatttaacttccaccctagtaagagctacacagattacagagttggaaccgctctgcccggcaagtttaagatcgttctagattctgacgctgcggagtacgggggacaccagcgcctcgatcactctacagatttttttagcgaagcttttgagcacaacggacgaccctattccctgcttgtgtacatcccgtccagggtcgccctgatcctccagaacgtggacctccccaat

SEQ ID NO: 3471 - DNA, 2106 bp, Artificial Sequence
  derived and/or modified sequence
atggcggcaccaatgacacccgccgctcggcccgaagactacgaggccgctctcaacgcggccctggccgatgtgcctgagctcgcccgtctgctggagattgatccttatctaaaaccctacgccgtggactttcagcgacggtacaagcagttttcacagatcctgaagaacatcggcgaaaacgaaggcggaattgacaagttcagtagagggtacgagagcttcggcgtccatcgctgcgctgacgggggactctactgcaaggagtgggctccaggggccgaaggtgttttcctgacaggtgacttcaacggctggaatcccttctcctatccatataaaaagctcgactatggcaagtgggagctgtatatcccacctaaacagaataagagcgtgctcgtgcctcatgggtcaaagctgaaggtcgtaattacttccaagagcggcgagattctctatcgaatctccccctgggctaagtacgttgtcagggagggggacaacgtgaactatgactggattcattgggatccagagcactcgtacgagttcaagcattcgagacccaagaaaccccgctccctacgaatttacgaatcccacgtgggaatctctagccatgagggtaaggttgcttcctacaagcactttacgtgtaacgtgttaccccgaatcaagggcctgggctacaactgtattcagctcatggctatcatggagcacgcgtattacgcgtctttcgggtaccagatcacttcatttttcgcagcctcatcaagatatggtacgcccgaggaactacaagaactcgtcgataccgcacattcaatgggcattatcgtcctgttggacgtggtccactctcatgcttctaagaactctgccgacggtctcaacatgttcgacggcaccgattcttgctacttccatagcgggccgagagggactcacgacttgtgggattctagactgttcgcttattcgtcttgggaaattctgcggtttcttctaagcaacatacgatggtggcttgaagagtaccgttttgacggcttcaggttcgacggtgtgacgagcatgctatatcatcaccacggcgtgggccagggcttctccggcgattacagcgagtactttggtctgcaggtcgatgaggatgctcttacctacctcatgctggctaaccatcttgttcataccctgtgtccagatagtatcacaattgcagaggacgtgtctggaatgcctgccctttgctcccccatcagccaaggcggaggagggtttgactatagattagcaatggccatccccgacaagtggatacaacttttgaaagaattcaaagatgaagattggaacatgggtgacatcgtatacactctcactaatcgccgatacctcgaaaaatgcatagcatatgccgaatcgcacgatcaggccctagtaggggataaatccctggctttttggctcatggatgcagagatgtacaccaacatgtccgttctgaccccattcacacctgtcattgaccgagggatccagctccacaagatgatccgccttattacccatggacttggtggcgagggatacctcaattttatggggaatgaatttggtcacccagagtggttggactttccacggaaggggaataatgagtcctaccattacgcaaggcggcagttccacctaacagacgacgatctcctgaggtataaattcctgaacaacttcgatcgcgatatgaaccgcctggaagaacgctatggttggctcgcagcccctcaggcatacgtgtctgaaaagcacgagggcaacaagatcatcgcttttgagcgcgcggggctactgttcatcttcaatttccacccttctaagtcttacactgactaccgggtgggcacagccctaccggggaaatttaagattgttctggacagtgacgctgcggagtatggggggcaccagcggctggaccatagtactgactttttttctgaggcatttgagcataacggcagaccttattcattactggtatacataccctcccgcgtggccttgatcctccagaacgtggatcttcccaac

SEQ ID NO: 3472 - DNA, 2106 bp, Artificial Sequence
  derived and/or modified sequence
atggcggctcccatgacacccgcagccagaccggaagattatgaggcggcattaaacgccgctcttgctgacgtaccagagttggcccgactgcttgaaatagacccctacctgaaaccttacgccgtggatttccagaggagatataaacagttcagccagatcctcaagaacattggggagaacgagggcggtatcgacaagttttcccggggatatgaaagctttggcgttcacagatgtgccgatggcgggctgtactgcaaagagtgggcacccggcgcagagggtgtgtttctcaccggagactttaacggatggaaccccttttcctatccttacaaaaaactggattacgggaaatgggagctgtatattccacctaagcaaaataagagcgttctggtcccacacgggtcaaagctgaaggtagttatcacaagtaagagtggggagatcctatatcgcattagtccatgggccaaatacgtggttcgcgaaggcgacaacgttaattatgactggatacactgggaccctgagcattcctatgaattcaagcattcacgcccgaaaaaacctaggagcctgaggatttatgaaagccacgtgggaattagttcccacgagggaaaggtggcaagctataagcactttacatgcaatgttctccctcgcatcaagggacttggttacaactgtattcagctgatggctataatggaacacgcctactatgcatccttcggttatcaaataacttcgttctttgcagcaagcagtcgatacgggactcccgaggaactgcaggagctggtcgatacagctcactccatgggaatcatcgtgctgctcgacgttgttcactcacacgcctcgaagaacagcgcagatggactgaatatgtttgatgggaccgatagttgttactttcactccggtccaaggggcactcatgacctttgggatagccgactctttgcctatagtagctgggagattctccgattcctgctgtcgaatattcgttggtggcttgaagaataccgatttgatgggttcaggttcgatggtgtgaccagcatgctgtaccaccatcacggagtcgggcagggtttttccggtgactacagtgagtactttggcctgcaggtggacgaggacgccctgacatacctgatgttggcaaatcatttagtccacacgctttgccctgacagcatcaccatcgctgaagatgtctctggtatgccggccttgtgtagccctattagtcagggcggtgggggatttgattacagactggcgatggccatccccgataaatggatacagttgctgaaggaatttaaagacgaggattggaacatgggtgacattgtgtataccctcaccaacaggcgctacctagaaaagtgtattgcatatgccgagtcacacgaccaggcgctggtgggggataaatcgttagcattttggctgatggatgctgaaatgtacacaaatatgtctgttctcacccccttcactcctgtcatcgaccgcggtatccagctgcataagatgattcgactaatcacacacggactgggaggcgagggctacctgaactttatgggcaatgagttcggccatcctgagtggctagatttccctcggaagggaaataatgagtcctaccattatgccaggcgccagttccatctgaccgacgacgatctgctgaggtacaagttcttgaacaactttgaccgggatatgaatagattggaggagcgctatgggtggttggccgccccccaggcgtatgtctccgaaaagcacgaaggcaacaaaatcatagcttttgagagggcaggccttctgttcatatttaatttccacccatctaaaagctatactgattacagagtagggaccgccctccctggcaagtttaagatcgtgcttgattccgacgcagccgaatacggtgggcatcagcggttggaccacagtaccgacttcttttctgaggcctttgagcacaatgggcgcccttactccttactggtttacatcccctcacgagtagcgctaattctacagaatgttgacttgccaaac

SEQ ID NO: 3473 - DNA, 2106 bp, Artificial Sequence
  derived and/or modified sequence
atggcagccccaatgacgccggccgcacggcctgaggattacgaggcagccctcaatgccgcgctggctgacgtgcctgaattggcaagactgctcgaaatcgacccttacctgaagccttacgccgtcgacttccagcggcgttacaagcagttctcccagatcctcaagaacatcggagagaacgagggcggaatcgacaagttctccagaggatacgaatcgtttggagtgcaccgctgcgccgacggaggactgtactgtaaggaatgggcaccaggggcagagggggtctttcttaccggcgatttcaatggctggaacccattctcatatccttacaaaaaactcgactacggaaaatgggagctctacatcccgcccaagcaaaacaagtccgtcctggtcccacacgggagcaagttgaaggtggtgatcacttcaaaatcgggcgaaatcctctaccgcatctccccgtgggccaaatacgtcgtcagggagggagacaacgtgaactacgattggatccattgggacccagaacacagctacgaatttaagcattcgcggcccaaaaagccgcgctccctccggatttacgagtcccatgtgggaatctcgtcccatgaaggaaaggtggcgtcgtacaagcacttcacttgcaatgtgctgccgcggattaagggccttggatacaactgcatacagctgatggcgatcatggaacacgcctactacgcgtccttcggataccaaattacgtccttcttcgctgcgtcgtcacgctacggaactcctgaggagcttcaggagctggtggacaccgctcattcgatgggcattatcgtgcttctcgacgttgtccactcccacgccagcaaaaatagcgcggatggactcaacatgttcgatgggaccgacagctgctacttccatagtggaccgcgcgggacccacgacttgtgggacagcagactgttcgcttactcgtcgtgggaaatcctgcgcttcctgctctcaaacattcggtggtggctggaagagtaccgctttgacggttttagattcgacggagtgacgagcatgctgtaccaccatcatggcgttgggcaaggattttcgggcgactactccgaatatttcggactccaggtcgatgaggacgccttgacctatctgatgctggcgaatcaccttgtccatactttgtgcccggactccatcactatcgccgaagatgtgtcggggatgcccgctctctgctcacctatctcgcaaggaggcggaggtttcgactaccgcctggctatggcaatcccggataagtggatccagctgctgaaggagttcaaagacgaggactggaacatgggcgacatcgtgtataccctgaccaaccggcgatacctggaaaagtgtatcgcttacgctgaaagccacgatcaagccctggtgggagataaatcgctggcgttctggctgatggatgccgaaatgtacactaatatgtccgtactgaccccattcactcccgtgatcgaccgcgggatccaactccataaaatgatcagactgatcacccacggtctgggtggagaaggatacctcaatttcatgggaaatgagttcggccatccggagtggctcgattttccgagaaagggcaacaacgaatcataccactacgcccggaggcagttccacctgactgatgacgacctgctgagatacaagttcctgaataactttgatcgggatatgaatcggctcgaagaaaggtacggatggctcgccgcaccgcaggcctacgtgtcagaaaagcacgagggaaacaagatcattgccttcgaacgcgcgggcttgctgttcatcttcaactttcacccgagcaaatcatataccgactacagggtgggtaccgcccttccgggcaagttcaagatcgtcctggacagcgacgcggcggaatacgggggtcaccagcgcctcgatcactctactgattttttctccgaagcctttgagcataacggtcgcccgtacagcttgctcgtgtacattccatctcgagtggcactgatcctgcagaacgtggatcttccaaat

SEQ ID NO: 3474 - DNA, 2106 bp, Artificial Sequence
  derived and/or modified sequence
atggcggcacctatgacacccgctgcccgtccggaagactatgaagccgctttgaacgctgccctagctgatgtgcccgaactggcacgcctgttagaaatcgacccttatttgaaaccatacgcagtcgactttcagcgacggtacaagcagtttagccagattctcaaaaacatcggcgaaaacgaaggtggaatcgacaagttctctagaggctatgaaagttttggtgtgcacagatgtgccgacggcggattatattgtaaggaatgggccccaggagccgagggcgttttcctgaccggcgactttaacggatggaaccccttttcttacccctacaagaaactggattacggcaaatgggaactttacatcccaccaaagcagaataagagcgtgttggtaccacatggaagtaaactcaaagtcgtgatcacctctaaatctggcgagatcctctaccggatctccccttgggccaagtatgtggtccgagaaggtgataacgtcaactacgactggatccactgggaccccgagcacagctatgaattcaagcattccagaccaaagaaaccaagatcgctcagaatctacgagagccacgtcggaataagttcccatgagggcaaggtggctagctataagcactttacctgcaatgttcttcctcgcataaaggggctggggtacaactgcattcaactgatggctatcatggaacatgcctactatgcttcgttcgggtaccagatcactagcttcttcgctgcaagctcaagatacggcacccctgaagagctgcaggagctggtggataccgcgcacagcatgggcataatcgtactgctggatgtcgtgcactcccatgcaagcaagaattcagctgatgggctcaacatgttcgatgggaccgactcgtgctactttcatagcgggcctagaggaactcacgatttgtgggatagcagactgttcgcgtatagctcttgggagatcctgcggtttctcctcagtaacatacggtggtggcttgaggagtatagattcgacggtttcagatttgatggtgtcacgagcatgctgtaccatcatcacggcgtaggccagggcttcagcggagactactctgaatattttggcctccaggtggacgaagatgctctgacttacttgatgctcgctaatcacctggtccatacactatgcccggatagcatcactatcgccgaagacgtcagcggcatgcccgccctgtgcagtccgataagccagggaggaggaggattcgactatcggctcgccatggccatcccagataagtggatacaactcctaaaggagttcaaagacgaagactggaatatgggggacatcgtctacaccctgaccaaccgtaggtacctggagaaatgtatcgcatacgccgagagccacgaccaggctcttgttggagacaagagcctggccttttggctgatggacgccgaaatgtatacaaatatgtcagtactaaccccatttacaccagtcattgacagaggcatccaactccacaagatgatccggttgattacacacggtctgggtggggaagggtaccttaactttatggggaacgaattcggacatccggaatggttagactttccccgaaaaggaaacaacgagtcttaccactatgcaaggagacaatttcatcttaccgatgacgacctgctcaggtataagtttcttaacaactttgatagagatatgaatcggctagaagagcgctacggatggctcgcagcccctcaagcctatgtgtccgagaaacatgagggaaacaagataatcgctttcgagagggcaggactgctcttcatctttaactttcatccatcaaagtcctacacagattaccgcgtgggaaccgccctcccaggcaagttcaaaattgtgcttgactctgacgctgccgaatatgggggccaccagagactcgaccatagcaccgactttttctcagaggctttcgaacacaatggtcggccttactcactgctcgtctacatcccgagcagagtcgcactgatccttcagaacgtggatttgcccaat

SEQ ID NO: 3475 - DNA, 2106 bp, Artificial Sequence
  derived and/or modified sequence
atggcggccccgatgaccccagccgctcgccccgaggattacgaagctgcactgaacgccgctctcgcagatgtcccagaattggccagattgctcgagatagatccatacctgaagccctacgctgttgactttcagcgacgatacaaacagtttagccagatcctcaagaacataggcgagaatgagggtggcatcgacaagtttagcaggggctatgagtccttcggcgtccacagatgcgctgatggcgggctctactgtaaggagtgggccccaggagccgagggagtgttcctaactggagactttaatgggtggaatccatttagctacccatacaagaagctggactacgggaagtgggagctttacattcccccaaagcaaaacaaaagcgtcctcgtaccacacggctccaagctgaaggttgtgatcacgtcaaaatcgggcgagatcctctaccggatttccccttgggctaaatatgtggtacgcgaaggggacaacgtgaattatgattggatccactgggatccagagcatagctacgagtttaaacatagtcgccctaaaaagccccggtcattgcggatctatgagagtcatgtcggcatcagcagccacgagggcaaagtggcgtcctataagcacttcacctgcaacgtcctacccagaatcaaaggactggggtacaattgtatccaactgatggctatcatggaacacgcttattacgcctcctttgggtatcagatcacctcgtttttcgccgcttcttcccggtatggaactccagaggaactgcaggaattggtcgacaccgcccattccatggggatcatcgtgctcttggacgtcgtgcactctcacgccagtaagaactctgccgacggccttaatatgtttgacggaacggactcgtgctacttccacagtggtccccgagggacccacgatctgtgggacagccggcttttcgcctactctagctgggagatcctgcgttttctgctcagtaacatcagatggtggttagaggagtatagattcgacgggttccgctttgatggagtcacctcaatgttatatcaccatcacggtgtggggcagggattttcgggagattattcagagtacttcggattgcaggtcgatgaggacgccctgacttacctgatgctggcaaatcacctcgttcataccctgtgtcccgactctataacaatcgcagaagatgttagcggcatgcctgcgttgtgctccccgatctcacaggggggcggtgggtttgactacaggctagcaatggctatccccgacaagtggatccaattgctgaaggagtttaaagatgaagactggaacatgggcgacatcgtgtacacgttgacaaatcgtagatacctggagaagtgcatagcatatgcagaaagccacgatcaggctctggtcggcgacaagagcctagcattctggctgatggatgccgagatgtacacaaatatgagcgtgctcaccccctttaccccagtgatcgacagaggaattcagctccacaagatgattcgcctaatcactcacgggttgggcggagaaggctatctgaacttcatgggcaacgagtttggtcatccggaatggctcgacttccccagaaaagggaacaatgaatcttaccattacgcacgacggcagttccatctcacagatgacgatctgctgcgctacaaatttctcaacaatttcgaccgcgacatgaacaggctggaggaacggtacgggtggctcgcggctccacaggcctacgttagcgaaaagcatgaagggaataaaattatcgccttcgagagggcaggtttactgttcatttttaatttccaccccagcaagagctacacagactaccgcgttggaactgccctgccaggaaagttcaagattgtattggactcagatgctgccgaatatggggggcaccaaaggcttgaccactcgaccgacttcttctccgaagcttttgaacacaatgggcggccatattctctcctcgtgtatattccctctcgggttgcactgattctgcaaaacgtggaccttcccaat

SEQ ID NO: 3476 - DNA, 2106 bp, Artificial Sequence
  derived and/or modified sequence
atggcagcccccatgacccccgccgccaggcccgaggattacgaagccgcactcaacgcggcactggcagacgtacccgagctggcccgcctgctcgaaatcgacccttacctgaagccctatgctgtcgacttccagcggcggtataaacaattttcacagatcctgaagaacatcggcgagaacgaaggagggatcgataagttttccagaggctatgaaagcttcggagtgcatcggtgtgctgatggtgggctctactgtaaggagtgggccccaggcgccgagggcgtattcctgaccggcgacttcaatgggtggaaccctttctcttatccatataagaagctggattacgggaagtgggagctatatatcccccccaaacagaataaaagcgttctggtgccacacgggtcgaaactgaaggtggtcattacctcaaaatccggggagatcctataccgaatctccccgtgggccaaatatgtggtcagagagggtgataatgttaattacgactggatacactgggatccagagcattcttacgagtttaagcattccagacccaaaaagccacggtctttgcggatctatgagagtcacgtggggatctcctctcacgaaggaaaggtcgctagctataaacattttacgtgcaatgtgctgccccgtatcaagggactcggatacaactgcatccagctgatggctatcatggaacacgcctactatgcttcctttggataccagattacgtcattctttgctgcctcttccaggtacggtacaccggaggagttgcaggagctcgtcgacaccgctcactccatggggatcatagtgctattggacgttgtgcactcccacgccagcaagaactcggcagatggattaaatatgtttgacggcacagactcctgttactttcacagcggccctcgagggacccacgatttgtgggattcgcgtctgtttgcctattcttcttgggaaattctgaggtttctgctgagcaatattagatggtggcttgaggagtatcgtttcgacggattccgatttgatggagtgacatccatgctctatcatcaccacggggtaggccagggctttagtggagactattcggagtacttcggtttacaggtggacgaggacgccctgacgtacttgatgctggccaaccaccttgtacataccctgtgcccagacagcataaccattgccgaggatgtgtccggcatgcctgccctctgttccccgatttctcagggagggggcgggttcgattaccggctcgcaatggccatccctgacaagtggatccagctcctgaaagagttcaaggacgaggactggaacatgggcgacatcgtgtataccctcacaaatcgcagatatctcgaaaagtgtatcgcctacgccgagtcacatgaccaagccctcgttggagataaaagcctcgccttctggctgatggatgcagagatgtacaccaacatgagtgtgttgaccccgtttacccccgtcattgaccgaggcatccagctgcacaaaatgattcgcctcattacccatggcctagggggtgaaggatacctgaatttcatggggaatgagtttgggcaccccgaatggttggactttccaagaaagggcaacaacgagtcctatcactatgcacgccgacagtttcatctgaccgacgatgatctgctccggtataagttcttgaacaactttgatagagacatgaatcgactggaggagcgctacggatggctcgctgctccccaagcctacgtatctgaaaaacatgaaggtaacaaaattattgccttcgagagggcagggctgctttttatttttaattttcatcccagtaagagttacacagattacagggtgggcacagcactgcctggaaagtttaaaatagttctggatagcgatgccgccgagtatgggggccaccagcggctggatcattcgactgacttcttctccgaagccttcgagcacaatggccgaccctactccctgcttgtctatatacccagcagagttgccctgatcctgcaaaacgtggacctccctaac

SEQ ID NO: 3477 - DNA, 2106 bp, Artificial Sequence
  derived and/or modified sequence
atggctgccccaatgaccccagcagcacgcccggaggattacgaagccgccctgaatgcggctttggccgatgtgccggagctggcccgtttgctggagattgatccatatctgaagccttatgcagtcgattttcagcgccgctacaagcagttttctcaaattctcaagaatatcggcgagaacgaaggaggcatcgacaaatttagtcgcggatacgagagttttggcgttcataggtgtgccgatggcggcctctactgcaaggagtgggccccgggagcggagggagtctttctgaccggagattttaacggctggaatccgttcagctatccctataaaaagctggattacgggaaatgggagctgtatatccctccgaagcagaataaatcggtgttggtgccacacggatcaaagctcaaggtggtgattaccagtaagagcggggaaatcctgtataggatcagcccctgggccaagtatgtggttcgcgagggtgacaatgtcaactatgactggatacactgggacccagagcactcgtatgagtttaagcactccaggcccaagaaaccgcgaagtctgcgtatttacgagtcgcacgtcggcatttcgtcgcatgagggcaaggttgctagttacaaacatttcacctgtaacgtgctgccgaggattaagggattaggatataattgcattcagctaatggccataatggagcatgcctactacgcgtccttcggttatcaaatcacctcctttttcgccgcctcctctcgatacggtacgcccgaggaattgcaggagctggtcgacacagcgcacagtatgggcatcattgtattattggatgttgtacattctcacgcgagcaaaaatagcgcggatggtctaaacatgttcgacggcacggattcttgttacttccactcgggtccaaggggaacgcacgacttgtgggatagcaggctatttgcatactcctcctgggagatattgaggttcttgctctctaacatacgctggtggcttgaggaataccggttcgatggattccgctttgacggagtcacgtcgatgctgtatcatcatcacggagtgggccagggtttctcgggggattattcagagtatttcggccttcaggtggatgaagacgccctgacctatttgatgttggccaaccatctggtgcacaccctgtgcccggacagcatcactatagcagaggatgtcagtggcatgccagctctgtgcagccccatctcccaaggcgggggtgggttcgactatcgactagctatggctattccagataaatggatccagctgctcaaggagtttaaggatgaggactggaacatgggggatattgtttatacattaacaaaccgccgctaccttgagaaatgcatagcctatgcggagagccatgatcaggcactggttggagataaaagcctggcgttttggctgatggacgcagaaatgtacaccaacatgtccgttctcactccctttactccagttattgaccggggtatccagcttcacaaaatgatccgtctgataacccacggtctaggtggagagggatatctgaattttatgggaaacgagttcggccaccccgagtggttggatttcccccgcaagggcaataatgagtcctaccactacgcgcgtcgacagttccacttaactgacgatgatctgctcaggtacaagttcctgaataacttcgatcgcgatatgaacaggcttgaggagcgctacggttggctcgctgcaccgcaggcttacgtgtcggagaagcatgaaggtaacaagataattgcgtttgagcgagcgggtctgttgttcatcttcaattttcatccgtccaagtcgtacaccgattatcgtgtcgggaccgccctgcccggaaagttcaaaatcgtactagattccgatgccgctgaatatggaggccatcagcgcctggaccactccaccgatttcttctctgaggcctttgagcataatgggcggccctactcgctgctggtgtacatcccctcccgggtcgccttgatactgcagaatgtggacctgcctaat

SEQ ID NO: 3478 - DNA, 2106 bp, Artificial Sequence
  derived and/or modified sequence
atggcggctcctatgactccagctgcccgacccgaagactatgaggccgccctgaacgccgcgctggcggacgtacctgaattggcccggcttttggagattgacccctatctcaagccgtacgctgtcgacttccagagacgatataagcaattcagccagatcctgaaaaacattggagagaatgaaggtggcatcgataagttctcccggggatacgagtctttcggggtgcaccggtgtgctgatggcggcctatactgtaaagagtgggctccaggagcagagggcgtgtttcttacgggagattttaacggatggaaccccttcagttatccttataaaaaactggactacgggaaatgggagctgtacattccacctaaacagaacaaatcagtgcttgtgccccacggcagtaagttgaaagtggtgataaccagtaaaagcggtgagatactgtatcgcatcagcccgtgggctaaatatgttgtgcgagagggcgacaatgtgaattacgattggatacattgggacccagagcactcatacgagtttaagcatagcagacccaagaagccaagaagtctgcggatttacgagtcccatgtaggaatttcttcccacgagggcaaggtggcctcatacaagcactttacttgcaatgtgctgccacgaatcaaaggcctaggatataattgtatccagctgatggcaatcatggaacacgcctactacgcatcttttggatatcagataaccagtttcttcgcagcctcgtctaggtatggcacgccagaagagctgcaggaactcgtggacactgctcactccatgggaataatagtcctgttagacgttgtccattcgcacgccagcaaaaacagcgcggacggcctaaatatgttcgacggcaccgatagttgctatttccacagcggcccaagaggtacccacgatctgtgggatagtcggttgtttgcttactcctcttgggaaattttgcggttcctgctgtctaacatcagatggtggcttgaagagtatcgtttcgatggcttcaggttcgacggcgtcacaagcatgctgtatcaccatcacggcgtgggccagggcttcagtggggactattcagaatactttgggctgcaagtcgacgaagacgcactcacatatctcatgctggcgaaccatctggtgcatacactttgccccgactccattactatcgctgaggacgtcagtggcatgccagccctctgtagtcccatctctcagggcggaggcggttttgactatcgtctggcaatggctatccctgataagtggatacagctgcttaaagagttcaaggatgaggattggaacatgggcgacatcgtgtacacacttactaatagaaggtacctggagaagtgcattgcatatgccgagtcacatgaccaggcgctcgtgggcgacaagagtctggctttttggctgatggacgccgaaatgtacacaaacatgtccgtcctgactccatttacccctgtaatcgatcggggaattcaattacacaaaatgattcgcttgattacccacggccttggcggcgaagggtacctgaactttatgggtaatgaattcggccatccggaatggttagacttcccccgtaagggaaataacgagtcctatcactacgcccgcagacaattccatctgactgacgatgacctcctgagatataaattcctgaacaacttcgaccgggacatgaacaggttggaggagcggtatggatggctggctgcccctcaggcttacgtctcggaaaaacacgaggggaataaaatcattgcttttgaacgggcgggccttctgttcatttttaacttccacccttccaagtcttacactgactacagagtcggaaccgcccttccaggaaagtttaagatcgtgctggattccgacgccgccgagtatggcggacaccagcggctggaccactcaacagactttttttcagaggctttcgaacataacgggaggccgtactcattattggtatatatcccttcacgagttgccctgatattgcagaacgtggacctccccaat

SEQ ID NO: 3479 - DNA, 2106 bp, Artificial Sequence
  derived and/or modified sequence
atggcggctcccatgacgcccgcggcaaggccagaagactatgaagcagccctaaatgccgctctcgccgatgtgcctgagctggcccgcctcctggagattgatccgtatttgaagccatacgccgtcgacttccagaggcgatacaaacaattcagccagatcttgaaaaacatcggggaaaacgaagggggtatcgataagtttagtcgtggttacgagagttttggggtgcaccggtgtgcagacggaggactatactgtaaggagtgggctccgggagctgagggcgtatttttgacaggcgacttcaatgggtggaaccccttctcttatccttataaaaagctcgattacgggaagtgggaactgtacatccctcctaagcagaacaaaagtgtgcttgtaccccatggctctaagctgaaggtagtaatcactagtaaatccggggaaatactgtatagaatctccccctgggccaaatacgtggtgcgcgaaggggacaatgtcaattatgattggatccactgggaccccgagcattcttacgaatttaaacattcacgccctaagaaacccagaagtctgcggatctatgagtctcacgtgggaatttccagtcatgaaggcaaggtggcctcttacaagcacttcacttgcaacgtcttgcctcgcatcaaggggttaggatacaattgtatccagttgatggccatcatggagcatgcatactatgcttcattcggctaccagatcacttccttctttgctgcctcctcgagatatggtaccccagaggagctccaagaactggtcgatacagcacattcaatgggaatcatagtgctgctggatgtggtacactctcatgcctcaaagaacagcgccgacggcttaaacatgttcgacggaactgattcatgctatttccactctgggcctaggggcacccatgacttgtgggactcaaggctctttgcatacagttcttgggagatacttcgtttcctgctttcgaacatcagatggtggctggaggagtatagatttgacgggtttcggttcgatggggtcaccagtatgctgtatcatcatcatggcgtcggccaaggttttagtggggattattcagaatatttcggactgcaggtggatgaagatgctctgacgtacttgatgctggccaatcatttggtccacacgctttgtcccgactctatcacaatcgccgaggacgtgagtggtatgcccgcgctctgtagtccaatctctcagggcggtggaggttttgactaccgtctcgctatggctatcccagataaatggatacaactcctgaaagaattcaaggatgaagattggaacatgggcgatatcgtgtatacactcaccaatcggagatatttggaaaaatgcattgcctatgctgaaagccacgaccaagcactcgtgggcgataagtccctggcgttttggttaatggacgctgaaatgtataccaatatgagcgtgctgacaccttttacccctgtgatcgacaggggcatccagctccataagatgattagactcataacccacggccttggtggggaaggctatctgaactttatgggaaatgagtttggtcaccctgagtggttggatttccctcggaagggaaacaacgaatcgtatcactacgctcggcgtcagtttcacttgacagacgacgatcttctgcggtataagttcctcaacaatttcgaccgagacatgaaccgcctggaggaaaggtatggttggctggccgcgccgcaagcgtatgtaagcgagaaacacgaggggaacaagatcattgccttcgaaagagccggcctgttgttcatatttaactttcaccctagcaagtcatatacagactacagagtgggaacggcgctcccggggaagttcaaaatcgtactggactctgatgcagcggagtacggagggcaccagcgactagatcacagtactgacttcttttccgaggccttcgaacataacgggcgcccttactccctgcttgtgtatattccaagtagggtcgctctcatcctacagaatgtcgatctccctaac

SEQ ID NO: 3480 - DNA, 2106 bp, Artificial Sequence
  derived and/or modified sequence
atggctgcgccgatgaccccagccgcacgcccggaggattacgaggccgcgctgaacgcggctctggcggacgtgccggagctggcacgtctcctggagattgacccttaccttaagccatatgctgtagacttccagcgtcgctataaacagttctcccagatcctgaagaacatcggtgaaaacgaggggggcatcgataaattctcaaggggatatgagtcgtttggcgttcatcgctgcgcagacggcggcctgtactgtaaggagtgggccccgggggcagagggtgtgttcttgaccggcgatttcaatggttggaacccgtttagctacccgtataaaaagctggattacggcaaatgggagctttatatcccgcctaagcaaaataaaagcgtgctggtcccacatggaagtaagttaaaagtcgtgatcacttctaagagtggtgagatcctctaccgtatttcaccatgggccaaatatgtggttcgtgagggcgataatgtgaactacgattggatccactgggatccggagcacagctatgaatttaagcacagccgaccgaagaagccgaggagcctacgtatttacgaaagccatgttgggattagcagccacgaagggaaggtggcaagctataagcacttcacttgcaacgtactgcctcgaataaaaggtcttggttataactgcatccagctgatggcgattatggagcacgcgtattacgcttctttcgggtaccagatcaccagcttttttgccgcatcaagccgctacgggacgcccgaggagctgcaagagctggttgacaccgcccattcaatgggtattattgttctgttggatgttgtgcactcccacgcttctaaaaatagtgccgacggcctaaacatgttcgacgggactgattcctgctactttcattccggcccacgaggcacccatgacctgtgggattcacgcctctttgcctattcttcctgggagattctgcgcttcctgctgagcaacattagatggtggctggaagagtatcgcttcgatgggttccgcttcgacggagtaactagcatgctgtaccatcaccacggcgttggtcagggctttagcggtgattacagcgaatacttcggactgcaagtggatgaggacgcgctgacctatctgatgttggcgaaccatttagttcacaccctgtgtcctgattccatcaccatcgccgaagatgtgagtggtatgcccgcattgtgttcaccgatctcccagggtggtggtggttttgattatcggcttgcaatggcgattcctgacaagtggattcaacttctgaaagagttcaaggacgaggactggaacatgggcgacatcgtgtataccctgaccaaccgccgctatctggagaagtgtatcgcgtatgcggagtcacacgaccaagccctggtgggagacaagagcctggccttttggctgatggatgccgaaatgtacaccaacatgagcgtgctcaccccgtttaccccggtgatcgatcgaggcattcagcttcacaaaatgatccgtctgattacgcacggcctggggggagaaggttacctgaatttcatgggtaatgagtttgggcaccctgagtggctggacttcccccgtaagggcaacaatgagtcttatcactatgctcgccgccaatttcacctaacggatgatgacttgctgaggtataaattcttgaacaatttcgacagggatatgaataggctggaggaacgttacggctggctggccgcaccgcaggcttatgtgtctgaaaaacacgagggtaataaaattattgcattcgagcgcgctggtctgctgttcatcttcaatttccacccaagcaaaagctacacggactaccgcgtcggaaccgcactccctggcaaatttaaaattgtcctggattctgacgccgcggagtacggcggccaccagcgcctggatcacagcacggattttttttccgaagcttttgagcataatggacgcccgtacagcctgctggtgtatatcccaagccgcgttgctctgatccttcagaatgtggacctgccgaat

SEQ ID NO: 3481 - DNA, 2106 bp, Artificial Sequence
  derived and/or modified sequence
atggcagcaccaatgacaccagccgcccgccctgaggactatgaagcagccctgaatgccgctctcgcagatgtgccagagctggcccgtttgcttgagatagatccatacctgaagccgtatgccgttgattttcagagaaggtataaacagttctcccaaattctgaagaacatcggtgaaaatgagggcgggatcgataaattcagcagggggtacgagagttttggtgtgcatcggtgtgcagatggtggcctgtactgcaaggagtgggccccaggcgccgagggagtgtttctgaccggggattttaacgggtggaacccattcagttacccctacaaaaagctggactacggcaaatgggagttgtacattccccctaagcagaacaagtcggtcctggtccctcatgggtccaaactaaaagtggtcatcacaagcaaaagcggtgaaattctgtacagaatcagcccgtgggccaagtacgtggttagggaaggcgataacgtaaattatgactggattcattgggaccctgagcatagctatgagttcaagcactcgcgaccaaagaagccacggtctctacggatttacgagagccacgtgggaatctcctctcacgagggcaaggttgccagctacaagcactttacctgcaacgtgttacctcgtattaaggggcttggttataactgtatccagctcatggcgattatggaacacgcctactacgctagtttcggctatcaaatcacctcgttttttgccgcgagttctcggtacggaacaccggaagagctgcaggaactggtagacaccgcacactctatgggcatcatcgttttgctggacgtggtccattcgcatgcgtccaaaaatagcgccgacggtctgaatatgttcgacgggaccgactcgtgctacttccacagcggtccccgtgggacccacgacttgtgggacagccggctgttcgcctatagttcttgggaaattctgaggtttttgctctcaaacatcaggtggtggctggaggagtatcgcttcgatggtttccggttcgatggggtgacatccatgttgtatcatcaccacggcgtggggcaaggctttagcggcgactattcagagtacttcgggctgcaggtggatgaagacgccctcacatacctgatgctcgcgaatcacttagtacacactttgtgtcctgactcgatcaccatcgcagaggatgtgtctggtatgccggcactatgctcgcctattagtcagggaggcggcggcttcgactatcggctggcgatggccattcctgataaatggatccagcttctgaaggagtttaaggatgaagattggaacatgggagacattgtttacactctgacaaacagaaggtacctggaaaagtgcattgcgtatgcagagtcccacgatcaggcactggtcggggacaagtccctggcattctggctgatggatgccgaaatgtacacgaacatgagtgtcctgacaccattcaccccggtgatcgacaggggcatacagctgcataagatgattagattaatcacccacgggttaggcggtgagggttacctgaatttcatgggtaacgaattcggccaccctgaatggttagactttcccaggaaggggaataatgaaagttaccattatgcccgacggcagttccatctgactgatgacgacctcctgaggtacaaatttttgaataattttgaccgggacatgaaccggctggaagagagatacgggtggctggcggccccccaggcttacgtgtcggagaagcacgaagggaacaagataatcgctttcgagagagctggccttctgttcatctttaattttcaccctagtaagagctatactgattatcgcgtgggtaccgctctcccggggaagttcaaaatcgttctggactccgacgctgctgagtatggtgggcaccaaagactcgatcactccaccgacttcttttctgaggcgttcgagcacaacggacgtccttattccctgctcgtctacatcccgagtcgggtagcactgatcctgcagaatgtcgacttaccaaac

SEQ ID NO: 3482 - DNA, 2106 bp, Artificial Sequence
  derived and/or modified sequence
atggcagcaccgatgacccccgctgcccgtcccgaggattatgaggccgccttgaacgcagcgttggctgacgtgcccgagctggccagactcttggagatcgatccgtacctcaagccttatgccgtggactttcagagacggtataaacagttctcccagatcctcaaaaacattggggagaatgaaggcgggatcgacaagttctcacggggttacgaatcattcggtgtgcaccggtgtgctgacggaggcttgtactgcaaagaatgggcacccggcgcagaaggggtctttttaaccggagatttcaatggctggaatccattttcctacccgtataagaagctcgactacggcaagtgggagctctatatcccccctaagcagaacaaatcagtgctggttccacatggatccaaattgaaggtggtaatcacctccaagtccggcgagatcctgtaccgaatcagcccgtgggccaagtacgtggtgcgagagggggacaatgtgaactacgactggattcattgggaccccgagcactcctacgagtttaaacattcacggcctaagaaaccaaggtcgcttcgcatttatgagtctcacgtcggaatctcgtcccatgaaggaaaagtggcctcgtataagcatttcacatgtaacgtccttccccgtatcaaggggcttggctacaattgcatccagctgatggccatcatggagcacgcttactacgcgagcttcggatatcaaatcaccagcttcttcgcggcatcctccaggtacggcacgccggaggaattgcaggagctggtggacactgcccattctatgggtatcatagtactgttagacgtggtgcactctcatgcctcaaaaaatagtgcagacggcctcaatatgtttgatggaactgactcctgctatttccattccggtcctcgaggtacccacgacctctgggattcacgcctgttcgcatacagcagctgggagatccttagattcctgctttctaatatccgctggtggctggaggaatacaggttcgacgggttcagatttgatggtgtgaccagtatgttatatcatcaccacggggtggggcaggggttttcaggcgattatagcgaatactttgggctccaagttgacgaggacgcacttacctatctgatgctcgcaaatcacctagtgcacactttgtgcccagatagcatcaccatagccgaagacgtctccggaatgccagcactgtgtagccctatcagccagggcggcggcggctttgactaccgtttggctatggccattcctgacaagtggattcaattgctcaaagaattcaaagatgaagactggaacatgggggatatcgtttatacactgaccaaccggaggtacctagaaaagtgcatcgcctacgccgaaagtcacgaccaggcactagtgggggacaagtcacttgcattctggctcatggatgccgaaatgtacacaaatatgagcgtgctgaccccattcacacccgtgatcgatcgagggatccaacttcataaaatgatccggctaattacccatggcctcggtggtgagggctatcttaacttcatgggcaatgagttcggtcacccggaatggctcgattttccacgaaagggaaataatgagagttaccactatgctcgccgtcagttccaccttaccgatgacgacttgttacgctataagtttctgaacaattttgacagggatatgaatcgccttgaagagagatacggctggctcgcagccccacaggcatatgtgtctgaaaaacatgaggggaataaaattatcgcctttgagcgagcgggtcttctcttcatcttcaacttccatcccagcaagtcctatacagactaccgtgtaggtacggccctgcccgggaagtttaaaatcgtcctggacagcgatgccgccgagtatggtggacatcagagacttgatcacagcacagactttttctccgaggcctttgagcataatgggaggccgtatagcctactagtgtatatcccctctagagtggctctgattttacaaaatgtggaccttcctaat

SEQ ID NO: 3483 - DNA, 2106 bp, Artificial Sequence
  derived and/or modified sequence
atggctgcccctatgacacccgccgcacggcccgaagactatgaggcggctcttaacgctgctctcgcagatgtgcctgaattggcccggctactcgagatcgacccatatctcaaaccttatgcagttgatttccaacgccgatataaacagttttcccaaattttgaagaatatcggcgagaacgagggtggtatcgacaagttcagccggggctatgaatcgttcggagttcaccgatgcgccgacgggggattgtactgtaaagaatgggcgcctggcgctgaaggagtgtttttaacgggagacttcaatggctggaaccctttctcgtatccttacaaaaagctcgactacggaaagtgggaactctacatccccccgaaacagaacaagtctgtgctcgtgccgcacggctccaaacttaaggttgtgatcacttcaaagtcaggcgagatcctttaccgaatctcgccgtgggcaaagtatgttgtgagggagggcgataatgtgaattacgactggatccattgggaccctgaacattcatatgagttcaagcacagcagacccaaaaaacctcgatccctccgcatatacgaaagtcacgtcggtatatcgtcgcatgagggcaaagttgcttcttataagcatttcacatgtaatgtcttacctcgcataaagggattggggtacaattgtatacagttgatggccatcatggagcatgcgtattacgctagttttggataccagattacctcgttctttgctgcctcgagtcggtacgggacacccgaggagcttcaagagctggttgataccgcacattccatgggtatcattgtattgctcgatgtggtgcattcccatgctagcaagaactccgccgatggcctgaatatgtttgacggcacggattcatgttacttccatagtggcccccgtggtacccacgatttgtgggactctagactgttcgcctatagttcgtgggagatcctgcggtttcttctttccaatattagatggtggttagaggagtacaggttcgatggattccggttcgacggcgtgaccagcatgctataccaccatcatggggtcggccagggcttttcgggtgactacagcgaatacttcggtttacaggtcgatgaagacgcccttacatatctgatgctagcgaatcacttagtccataccctctgtcctgatagcattaccattgccgaagacgtcagcggcatgcccgctctctgctccccaatctcgcagggagggggggggttcgactatcggttggccatggcgatcccggataagtggatccagctcctcaaggagttcaaggatgaggactggaacatgggcgatatcgtttatacgcttaccaatcgtaggtatctagaaaagtgtatagcttacgcggaaagccacgaccaggccctcgtcggtgacaaaagtttagctttctggcttatggatgcagagatgtatactaatatgtcggtgctgactccattcactccggtgattgatcgcggcatccagctccataagatgatccggctgattacccacggtttggggggtgaaggttaccttaatttcatgggtaatgaattcggacatccggagtggttggattttccaaggaaaggaaacaacgagtcgtatcattacgctcgaaggcagtttcaccttactgacgatgacctgcttcgctataagtttctcaacaatttcgatcgtgacatgaaccgactcgaagaacgatacggctggttggcagcgccgcaggcctacgtgagtgagaagcatgagggtaacaagatcattgctttcgagagagctggtttgctattcattttcaatttccatccctcgaagtcttatacagactaccgcgttggcacggctctccccggcaagttcaagatcgtgctcgacagcgacgcggcagagtacggcggtcatcagcgcctggatcatagcacagattttttctcggaggcatttgaacacaacgggaggccttactcgcttctcgtgtacatcccttcccgtgttgcactcatcctgcagaatgtcgacctgccaaat

SEQ ID NO: 3484 - DNA, 2106 bp, Artificial Sequence
  derived and/or modified sequence
atggcagcgccaatgacccccgccgccagacctgaagattacgaagccgctctgaacgctgccctcgccgacgtgccagaattagcccggttactggagattgatccttacctgaaaccctacgcggtcgattttcagagacgttacaagcagttctcacaaatcctgaaaaacataggtgagaacgaggggggcattgacaaattttcccgcggttacgaatcattcggagtccatagatgcgcagatggaggtttgtactgtaaagaatgggctcccggagccgagggcgtgtttctgaccggcgatttcaacgggtggaacccattctcatacccgtataaaaagttagactatggaaaatgggagctgtacattcctccgaagcagaacaagagcgttctggtcccccacggctccaagctgaaagtcgtcataacctctaagtctggggagattctgtatcgcatcagtccctgggctaagtatgtcgtccgggagggcgacaacgtgaattacgattggatccattgggatcccgaacactcttatgagttcaagcattcccggcctaagaaaccccgttcattgcggatttacgagagtcatgtggggatttcctcacacgagggaaaagttgcctcttacaagcactttacatgtaacgtgctcccacgcattaaaggccttggctacaattgcatccagctgatggcgattatggagcatgcctattatgcaagcttcggataccagatcacatccttcttcgcagctagctcccggtatgggactccagaagaacttcaggaactggttgacacagcccattcgatgggtatcatcgtcctcttggatgtggtccactcccacgcctctaagaactctgccgacggactaaatatgtttgacggaacagatagttgctacttccattcagggcccaggggtactcacgacctgtgggatagccggctgtttgcctactcgtcctgggagattttgaggtttcttctgagtaatatcagatggtggctggaagagtacaggttcgatgggtttagatttgacggtgtaacatcgatgctgtaccatcaccacggcgtggggcagggctttagtggtgattattctgagtatttcggactgcaggtggacgaggacgccctcacctatctgatgctggcaaatcatttagtgcacacactctgccccgattcgattaccatcgctgaggacgtttctgggatgcctgctctctgctcgcccatctctcagggcgggggcggctttgattaccggctcgccatggcgattccggataagtggattcagctcctgaaagagttcaaggatgaagactggaatatgggcgatattgtatacactctcacaaatcgaaggtatctggagaagtgcatagcctacgccgagtctcacgatcaggcattagtgggagacaagagtctggccttctggctgatggacgccgagatgtacacaaacatgtctgttctcaccccattcacccccgtgatcgaccgcggcatacagcttcacaaaatgatccggctgatcacccacgggttgggaggagaagggtacttgaatttcatggggaacgagttcggtcacccagagtggctggacttcccccggaaagggaacaacgaatcttatcactacgcacgcaggcagtttcatctgactgatgacgatctcttgaggtataaatttctgaacaacttcgacagagatatgaacagactcgaagaacggtatggctggctggccgccccccaagcatacgtgtcagagaaacacgaaggcaacaagattattgctttcgaacgggccggcctgctgttcatctttaacttccacccaagtaaaagctacaccgattacagggtcgggactgctctcccaggcaagtttaaaattgtcctggactccgacgccgctgaatacggtgggcatcagagactcgatcattcaacagacttctttagcgaggccttcgagcataacggacggccatactcactgcttgtgtatattcctagtagagtggcattaattcttcagaatgtagacttacctaac

SEQ ID NO: 3485 - DNA, 2106 bp, Artificial Sequence
  derived and/or modified sequence
atggctgctcctatgacacccgctgcccgtcctgaggattatgaggccgccctgaatgccgcactggcggacgtacccgagctggccaggcttctggagattgacccctacttgaaaccatatgcagttgactttcagaggagatataagcagttctcgcagatcctcaagaatattggcgagaacgagggcggcattgacaaattttctcgaggatacgagtcgttcggagtgcacagatgtgctgatggggggttatactgcaaagaatgggctccaggagctgaaggcgtttttctaactggagatttcaatgggtggaatccattctcatatccctacaagaagctggattacgggaagtgggagttgtatatcccgcctaagcagaataaaagtgtcctcgtgccacatggttctaaactcaaggtggtgattacgtccaagagtggtgaaattctatatagaatttccccatgggcaaagtacgtagtgagagagggggacaacgtgaactatgactggatccactgggatcccgagcattcttatgagttcaagcactcccggcctaaaaaacccaggagcttacggatttacgaatcccacgtcgggatctcttcccacgaaggcaaagttgcctcttacaagcactttacttgtaacgtactcccaaggatcaaaggtctgggatacaactgcatccaactaatggcaattatggagcatgcatactacgcctcttttggctatcagatcactagctttttcgcggctagttctagatacggaacccccgaagagctccaagagctggtagacacggcccattccatgggaattatcgtgctgctggacgtggtgcattcccatgcatctaaaaactccgctgatggtttgaacatgttcgacggcacggatagctgttacttccattctggccccaggggcacacacgacctgtgggattcaagactgtttgcctacagctcctgggagatcctcagattcctgttgagtaacatccggtggtggctcgaggaataccggtttgacggattcagatttgacggcgtgactagcatgctctatcaccatcacggggtggggcaggggttttctggagattactccgagtatttcggcctgcaggtggacgaggatgccctcacctatctcatgttagcaaaccacctggtgcatactctctgtcctgacagcattacgatcgccgaagatgttagtggaatgccggccctctgttcacccatatcccaagggggcggaggcttcgactacagactggctatggccatccccgacaaatggatccaacttctgaaggaatttaaagacgaagactggaacatgggagacatcgtgtacacattgaccaatcgtcggtacctcgagaagtgcatcgcttacgccgaaagtcacgaccaggcactggtaggggataaatcccttgccttttggctgatggatgccgaaatgtataccaatatgtccgtcctcacacccttcactccagtgatagaccgcggtattcagttacataagatgattcgtctgatcacacatgggctgggcggtgagggctatctaaattttatggggaacgaattcgggcaccctgagtggctggacttccctcgaaaaggtaataacgagtcttatcattatgcccggcggcagtttcatctaacagacgacgatctgttgcgctacaagtttctgaataactttgaccgggacatgaaccgtttggaagaacgctatggatggctggcagccccacaggcctatgtcagtgagaagcatgaggggaacaagataatcgcctttgaaagggcaggactgctgtttatttttaactttcacccttccaaatcctataccgattatagggtaggaacggcgctgcccggaaaatttaagatcgtgctggattcggatgcagccgaatatggcggacatcagagactagatcacagcacggatttcttctctgaagctttcgagcataatgggcggccctactctctgctggtgtatattccatctcgcgtggctttgatcctccagaacgtagatctacccaac

SEQ ID NO: 3486 - DNA, 2106 bp, Artificial Sequence
  derived and/or modified sequence
atggcggcacctatgaccccagctgctagaccagaggattacgaagccgctctcaacgctgctcttgcagatgtgccagaattggctagactccttgagatcgacccttatctcaagccttacgcagttgactttcaaagacgctacaagcaattctctcagattctgaagaacattggcgaaaatgaagggggaatcgataaattttcgcgcggttacgaatcctttggagttcaccggtgcgctgacggagggctatattgcaaggaatgggcacccggagcagaaggagttttcttgacgggggatttcaacggctggaaccctttttcgtacccatataagaaacttgactacgggaaatgggaattgtacattccaccaaagcagaataagtctgttctggttccccatggttcaaagcttaaggtagttataacatcgaaatctggtgaaatcctgtaccgaatatccccttgggcaaagtatgtagtgagggaaggtgataacgtgaactatgattggatccattgggatccagaacatagttacgaattcaaacattcaaggcctaagaaacctagatcactcaggatctacgagtcccatgtcggtatcagttcgcacgagggcaaagttgcatcatataagcattttacctgtaacgttcttcctaggattaaggggcttggatacaactgcatacagttgatggcaatcatggaacatgcatattatgcttcattcggttatcaaataacaagcttctttgctgcatcaagtcgttatggcacccctgaggaactccaggaacttgttgataccgcacactcgatgggtattattgttttattggacgtcgtgcactcgcatgcatctaaaaactccgcagacggacttaatatgtttgatggtactgattcttgctacttccattcggggccgcgtggaacgcacgatctttgggattctagactgttcgcttactcctcgtgggagatcttgcgttttctgctaagtaatatcagatggtggctcgaagagtataggtttgatggtttcagattcgatggggttacttccatgctttatcatcatcacggtgtcggacaaggattctcaggtgactactcagaatacttcggattgcaagtagacgaagatgccctcacttatttaatgctcgctaatcatctggtgcatacactctgtccagattctatcacgatcgcagaggatgttagtggtatgcctgctttgtgcagtcctatttcccagggaggcggtggatttgattataggctagctatggccatccccgacaaatggatacaacttttgaaagagtttaaggatgaggattggaacatgggtgatattgtttacacgcttactaaccgtaggtacttagaaaagtgcattgcttacgccgaaagtcatgatcaggcgttagttggtgataagtcactggctttttggttgatggatgccgagatgtacactaacatgtccgttcttacaccatttacacctgttatagatcgcggaatacaattgcataagatgatcaggctcattacccatgggcttgggggcgagggctacttgaacttcatgggtaatgaatttggacacccagagtggcttgatttcccaaggaaagggaacaatgagtcttatcattacgcacggcgacaatttcacctgaccgacgatgatcttctcaggtataagtttttgaacaattttgatagggatatgaacaggctggaagaaaggtatggatggttggctgcacctcaagcctatgtatctgaaaaacacgaaggtaataagatcatcgcatttgagcgagccggtctactgtttatctttaatttccacccaagcaaatcatacacggactaccgtgtgggtactgctttaccaggtaaattcaaaattgtgctcgattcggatgcagcagagtacggtgggcatcaaaggcttgatcatagcactgattttttttcagaggcctttgagcacaacgggagaccatattcattgttggtgtatattcccagccgagttgctctgattcttcaaaatgttgatttgccaaat

SEQ ID NO: 3487 - DNA, 2106 bp, Artificial Sequence
  derived and/or modified sequence
atggctgcccctatgacacctgctgctaggcccgaagactacgaggcagctcttaacgctgcccttgccgacgtccccgagttggccagactcttggaaatcgacccttacctgaagccttatgccgtcgatttccagcgccgctacaagcagttttcacagatcctgaagaatattggcgagaacgagggtggtatcgacaagttttctcgcggttacgagtccttcggcgtgcaccgctgcgccgatggaggactgtattgtaaggagtgggctcctggtgccgaaggtgtcttcctgaccggtgattttaacggatggaatccttttagctacccctacaaaaaattggactatggcaaatgggagctgtacattcctccaaagcagaacaagtctgtattggtgccccacggcagtaagctcaaagtggtgatcacttccaaatccggcgagatactgtatagaatctctccctgggctaagtacgttgtccgcgagggtgacaacgttaactacgattggatccattgggaccctgaacattcttacgagttcaagcactcaagacctaaaaagcctcgcagccttagaatttatgagtcccatgtgggtatcagtagtcacgaaggcaaggtcgcctcttataaacatttcacttgtaacgtgctgcctaggatcaagggtctgggttacaattgcatccagctgatggccattatggagcatgcttattacgcttcattcggataccaaatcacctctttcttcgccgccagctcccgctacggcaccccagaggaactgcaggagctggtcgacactgcccacagtatgggaatcattgtcttgctcgacgttgtgcatagtcacgcttccaagaattctgctgacggcttgaacatgtttgacggtaccgattcttgttatttccactccggtcccagaggtacccacgacttgtgggacagccgccttttcgcttattcttcctgggagattcttcgtttccttctctcaaatatcaggtggtggctggaggaatacaggtttgacggatttcgttttgatggcgtaacctcaatgttgtaccatcatcacggtgtcggacaaggattcagtggcgactacagcgagtacttcggtctgcaggtggatgaggacgctctgacctacctgatgctcgccaaccacctggtccatactctttgtcctgacagtatcaccatcgccgaagatgtgagtggaatgccagctctgtgtagcccaatctcacagggtggcggcggattcgattatcgcctggccatggccatacccgataagtggattcagctgctgaaagagttcaaggatgaagattggaacatgggtgacattgtttacacattgaccaaccgtcgttatctggagaaatgcatcgcctatgctgagtcccacgatcaagctctcgtcggtgacaagagccttgcattctggctgatggacgcagaaatgtataccaacatgagcgtgttgaccccattcaccccagtcatagacagaggtatccagttgcacaaaatgatccgcttgatcacccacggactgggcggcgaaggatatctgaattttatgggtaacgagtttggtcaccccgaatggttggatttcccccgcaaaggtaataacgaatcctaccactacgcccgtcgtcagtttcacttgaccgacgatgaccttcttaggtataaatttttgaacaacttcgaccgcgacatgaaccgccttgaggagagatacggatggttggccgccccccaagcatacgtttccgaaaagcacgaaggcaacaaaatcattgcatttgagcgtgctggtctgctcttcatattcaacttccacccatccaagtcttataccgactatcgtgtaggaactgccctgcctggaaagttcaagatagttttggatagcgatgccgccgaatacggtggccaccaacgcctcgaccattctacagacttcttctcagaagcttttgagcacaatggaaggccctactcattgctggtgtacatcccatcacgtgtcgccctgatcttgcagaatgttgacctgcctaat

SEQ ID NO: 3488 - DNA, 2106 bp, Artificial Sequence
  derived and/or modified sequence
atggcagccccaatgacccccgccgcccgacccgaggattatgaggctgcactaaatgccgccctggccgacgtgccggagctggctagactgctggagatcgatccctatttgaagccatatgcagtggactttcagcggaggtacaaacaatttagccagatcctgaagaacataggggagaacgagggcggcatagataagttttccaggggatacgaatccttcggcgttcatcgatgtgccgacggaggtctgtactgcaaggagtgggcccccggtgctgagggagtgtttctgactggcgactttaacggttggaaccccttctcttatccctacaaaaagttagattatggaaagtgggagctgtacatacccccgaagcagaacaagtcagtacttgtgccccacggatcaaagctcaaggttgttattacaagcaagagcggggaaattctttacaggatttctccttgggctaagtacgtcgtcagagagggggacaacgtgaattacgactggatacattgggacccagagcactcatacgaattcaagcactcccgaccaaaaaaaccacggtccctcaggatttatgagagccacgtcggaatcagctctcacgaaggcaaagtcgcatcatataagcatttcacatgcaatgtgctgcctcgaatcaaggggctcggttataattgtatacaactcatggctataatggaacacgcctactatgcctcctttgggtaccagatcacatcattcttcgccgcatccagcaggtatggaacgccggaggaactgcaggaactggtggacaccgctcactctatggggatcatcgttctgctcgacgtggtgcattcccatgctagcaagaactccgccgatggactcaatatgttcgacggcacagactcctgctacttccatagcggacctagggggacccatgacttgtgggacagccgactgtttgcttacagttcttgggagattctgcgatttctactgtctaatattagatggtggcttgaggaatacaggtttgacggtttccggttcgatggtgtgacaagtatgctgtatcaccaccacggtgtgggtcagggtttctccggggactattccgaatactttggcttacaagttgacgaagatgccctgacgtatcttatgctcgcgaatcatttagtccacactttatgccctgacagcattacaatcgcggaagatgtatccggtatgcctgccctgtgtagtccgatatcacaggggggcggcggattcgattaccgacttgctatggctattccggataaatggattcagctactgaaggagttcaaggatgaagattggaacatgggcgacatcgtgtacaccctgactaacaggaggtacctggaaaaatgtattgcttatgctgagtctcatgaccaggctcttgtcggagacaaatccctggctttctggctgatggatgcagaaatgtataccaacatgagtgtgctaacaccttttacccctgtgatagaccgaggcatccagctgcataagatgattcgattgattacccacggattgggcggcgaagggtacctgaattttatgggaaatgagttcgggcatcctgaatggctggatttccccagaaaaggcaataatgagtcctatcactatgcgcgaagacagttccacctgactgatgacgatctgctacgatataaattcctgaataacttcgatagagacatgaatcgccttgaagagcgatacgggtggcttgcagcgccccaggcttatgttagtgagaagcacgaaggcaataaaatcatagcatttgaacgggctgggttgctctttatcttcaattttcatccttcgaaaagttacaccgactaccgagtggggacagccctcccgggtaagtttaagatcgtcctggattctgacgccgccgagtacggagggcatcagcgcctagaccattctacagattttttctcggaagcctttgagcataacgggaggccttatagtctgcttgtgtacataccttcacgtgtagctttgatcctgcaaaatgtggatctgcccaac

SEQ ID NO: 3489 - DNA, 2106 bp, Artificial Sequence
  derived and/or modified sequence
atggcggctcctatgacaccagcagctcggcccgaggattatgaggctgctctcaacgcagcgctcgccgatgtcccagagctggccagactcctcgagatcgacccttatctgaagccgtacgccgtagactttcagagaaggtataagcagttcagtcagatcctaaagaatatcggcgagaacgaaggagggatcgacaaatttagccgcggctatgagagctttggtgtccaccgatgtgctgacggaggcctgtactgcaaagaatgggcccctggcgctgagggtgtctttctcacaggggacttcaacggatggaacccctttagctatccctacaagaagctggactatgggaaatgggagttgtatatcccacctaaacagaataaaagtgtacttgtccctcacggaagcaagctgaaagtagtgatcacaagtaaatctggagaaatattgtacagaatcagcccttgggccaagtatgtggtacgcgagggcgacaacgtgaattatgattggatacactgggatcctgagcactcgtacgagtttaagcattcccgaccaaagaaacctcgcagcctaagaatctatgagtcacatgttggaatcagctcacacgagggcaaagtggcgtcctacaaacactttacttgcaacgtcctccctcgaattaaaggcctgggctataattgcatccaacttatggccataatggagcacgcctactacgcttcattcgggtaccagattacatcgttcttcgctgcctcttcaagatacggtacaccagaagagctccaggagcttgttgataccgcccacagcatgggaataattgtattgcttgacgtggtgcatagccacgccagcaagaattcagcggatggcctaaatatgttcgacggaaccgactcttgctatttccactctgggcccaggggtacacacgacctctgggattctcggttgtttgcctattctagttgggagatcctgaggtttctgctcagtaatataagatggtggcttgaggagtaccgttttgacgggttcagatttgacggggtgactagtatgttatatcaccatcacggggtggggcagggcttctccggggactacagtgaatactttggattacaagtggatgaggatgcactgacctacctaatgcttgccaatcacttagttcacacactgtgtccagattcaatcaccattgcagaggatgtgtcagggatgcccgccctgtgttcccctataagccaggggggcggcggttttgactatcgcttggccatggctattcccgataagtggatacagctcctgaaggagttcaaggacgaggattggaatatgggggacatcgtctacaccctcacaaaccggcgctacttagaaaagtgcattgcttatgcggaatcccacgatcaggcactcgtcggtgataagagcctggccttttggctaatggatgccgaaatgtatacaaacatgtctgtgttgactccctttaccccagtgatcgatagaggcattcaactgcacaagatgatccgtctgatcacacacggcctgggaggggaaggttacctgaattttatgggcaacgaatttggccatcctgagtggttggacttccctcgtaagggtaacaatgaaagctatcattacgcacgccggcaatttcacctcaccgacgacgatctgcttcggtacaaattcctgaataattttgatcgggatatgaacaggctagaggagcgctacggatggctggctgcaccccaggcttatgtgtccgaaaaacacgagggcaacaaaatcatcgccttcgaacgcgccggcctcctttttatctttaattttcacccaagtaagagttatacagattatcgcgttggtaccgcactacccggcaagtttaagattgtcctggactctgacgctgccgagtatggtggacaccagcgactcgaccactctactgacttcttcagcgaagcatttgagcacaatgggaggccgtactcgctcctggtctacattccatcaagagtggcgctcatactgcagaatgtcgatctcccgaac

SEQ ID NO: 3490 - DNA, 2106 bp, Artificial Sequence
  derived and/or modified sequence
atggcagcccctatgacccccgctgcccggcccgaggactatgaagctgccctcaatgccgccctggctgatgttcctgaactagcccgattactggaaatcgatccctacctgaagccctacgccgttgacttccagaggcgatacaaacagttttctcaaatactgaagaatattggagaaaacgagggcgggatcgacaaattttcccgaggctatgaatcctttggcgtgcacagatgcgctgacggcggactgtattgcaaggagtgggccccaggcgctgaaggcgtcttcctgaccggtgattttaatggctggaaccctttctcctacccatacaagaaattagactacggaaagtgggaactttatatacctcctaaacagaacaaatcagtcctggtgcctcacggaagcaagctgaaggtggtcattaccagtaaaagtggggaaatactgtatcgcatatctccatgggctaagtatgtcgtccgtgaaggagacaacgtaaactatgactggatccattgggacccagaacatagctatgaattcaaacactctcggcccaagaagcctaggagtctccggatctacgagtcccacgtgggcatcagcagccacgaagggaaagttgccagttataaacactttacatgtaatgtcctaccccgcataaagggtctgggctataactgcatccagttaatggccatcatggagcacgcatactatgcttcatttggctatcagattacttcctttttcgccgcatcctcccggtatggaacccctgaggagctacaggaactggttgataccgctcactcaatgggcatcattgtgctgctagacgtggttcatagccacgccagcaagaacagtgctgatggcctcaatatgtttgacggtacagactcttgttactttcactctgggccccgcgggacacatgatctgtgggattctcgcctgttcgcctattcaagttgggaaatcctgagattcctcctgtccaatattcgctggtggctcgaggaatatcgtttcgatggctttcggttcgacggggtgaccagcatgctctatcaccaccatggggttggccagggcttttccggcgactatagcgagtatttcggtctgcaagtggacgaagatgccttaacttatctaatgctggcaaatcatctggtgcacacactatgccctgactctataactatagccgaggatgtgagcggtatgcccgctttgtgtagcccaatcagccagggaggaggaggtttcgactaccgcctcgccatggctatccctgacaagtggattcaactgctgaaggaattcaaggacgaagattggaatatgggcgacatcgtctacactctgactaaccgcaggtacctggagaagtgtatcgcctatgcagaaagccacgatcaggccctggttggcgataagagcctggctttctggctaatggatgccgagatgtataccaacatgagtgtgctgaccccatttaccccagtgatagataggggtatccaactccataaaatgatcagacttataacacatgggctgggcggggaggggtacctaaatttcatgggtaatgagtttggccatcctgaatggcttgacttcccccgaaagggcaataacgaatcttaccactacgccaggcgccagtttcacctcactgatgacgatctgctaagatataagttcctcaataattttgacagggacatgaatcgcttagaagaacgttatggatggctagccgctccacaagcttatgtgagcgaaaagcatgagggcaataaaataattgcctttgagcgagctggtctgctgtttatcttcaatttccaccctagcaagtcctacactgactatcgtgtgggaaccgctttacccgggaagttcaaaatagttctggatagcgatgctgctgagtacggcggccaccagcggctggatcattcaaccgattttttctccgaggcatttgaacataatggtcggccatacagcctgctagtgtacattcctagtagagtggcattgatactgcagaacgtagacctaccaaat

SEQ ID NO: 3491 - DNA, 2106 bp, Artificial Sequence
  derived and/or modified sequence
atggcggctcctatgacacctgcggcgcggccggaagattacgaagctgctcttaacgccgcgttggcggatgttcctgaactagcaagacttcttgaaattgacccatatttgaagccatatgcggttgattttcagcgaaggtacaaacaattttctcaaatcctgaagaatatcggtgaaaatgaaggaggtattgataagttttctcgaggatatgaaagtttcggcgttcatcgctgcgcggatggcggactgtattgcaaagagtgggcccccggcgcggagggtgtgttcctgactggcgacttcaatggttggaatccattttcttatccatataaaaagcttgattatggcaagtgggaattatacattccgccgaagcagaacaaatcggtcctcgtgccgcacgggtcaaaactcaaagtcgtaattacatccaaatcgggggagatcttatatcgaatctcaccttgggcaaaatatgtagttcgtgaaggggataatgtcaattatgattggattcattgggacccggaacatagctatgaatttaaacactcgcggccaaagaaaccgagatccttacgcatttatgagtcgcatgttggaatctcttcccatgaaggaaaagtggcctcctataaacatttcacatgcaacgtgctgccgcgaatcaaaggcttaggctacaattgcattcaacttatggcaattatggagcatgcctactacgcttcttttggctaccagattacaagcttctttgccgctagctctagatacggcacaccagaagagttacaggaactggttgacactgctcacagcatgggcatcattgtgttacttgatgtcgtgcactcgcacgcaagtaaaaactctgcagatggcctgaacatgtttgacggaacggacagttgctactttcattcaggaccccgaggcacccacgatttgtgggattcacgtttatttgcttacagcagctgggaaattcttagatttctcttatcgaacatcaggtggtggttggaagagtaccgctttgacggattcaggttcgacggagttactagcatgctctaccatcaccatggagtcggtcagggttttagcggcgattattcagaatattttggccttcaggtggatgaggacgctcttacatatctgatgctggcaaaccatttggtacatacgttatgtccagattcgattactattgcagaagacgttagcggtatgcctgcattatgtagcccgatttcgcagggcggcggaggtttcgattaccgcctcgcgatggcgattcccgataaatggattcagttacttaaagagtttaaggacgaagattggaacatgggcgacatcgtatacacattaacgaatagaagatatctggaaaagtgcatagcgtatgcagagtcccacgaccaggctttggttggagacaaaagcctggctttttggcttatggatgcagagatgtacacaaacatgagcgtgcttacgccgtttacaccggtaatcgatcgcgggattcagttgcataagatgatccgcttaatcacacatggccttggcggggagggttacctaaactttatggggaatgaattcggtcacccggaatggcttgactttccgcgcaaggggaacaatgagagctaccattatgcccggcgccagtttcaccttaccgatgatgaccttttaagatacaaatttttgaacaatttcgaccgtgacatgaatcggctggaagagcgctatggatggcttgctgctcctcaggcctacgtttccgaaaaacatgaaggtaacaaaataattgcgtttgaaagagcaggccttcttttcatctttaatttccatccatctaaatcatacacggattaccgtgtcggcaccgcgttgcccggcaaattcaaaatcgtgctggacagtgacgcagccgaatacggcggacatcaacgcttggaccatagcacagattttttttctgaggcgttcgaacacaatggccgtccgtatagtctccttgtttatattccttccagagtagcgcttatccttcagaacgtggatctgccgaat

SEQ ID NO: 3492 - DNA, 2106 bp, Artificial Sequence
  derived and/or modified sequence
atggccgcccccatgactccagcggccagaccggaggattatgaagctgccctcaacgctgccctggctgacgtcccagaactggcaaggcttctggaaattgacccctatctgaaaccctacgcagtggactttcaaagaagatacaagcaattttctcagattcttaaaaacatcggagaaaatgagggaggcatagacaagttcagcagaggctacgaatcattcggcgtacataggtgcgccgacggcggattgtattgtaaggagtgggctcccggtgctgagggagtgttcttgacgggagatttcaacggctggaacccgttctcttacccctataagaagctggactacggcaagtgggaactgtatattccccccaagcaaaataaatcagtgctggtgccccacggttccaagcttaaggtcgtgatcacgtccaagtcaggcgaaatcctctacagaatcagcccctgggccaagtatgtagtccgcgaaggcgacaacgtcaattatgattggattcattgggaccctgagcattcctatgaattcaagcacagcaggccaaagaagcctaggtctctccgcatctacgagtctcacgttggcatcagcagccacgagggcaaagtcgctagttacaaacactttacgtgcaacgtgttgcctcgcattaagggcctgggctacaactgtatacagcttatggccattatggagcacgcctactacgcatcattcggatatcaaatcaccagcttttttgcggcatcatctaggtacggcactccagaggagttgcaagagctcgtcgataccgcgcactctatgggaatcattgttctccttgacgtggtgcatagccacgcaagcaaaaactctgccgacggtctcaacatgttcgacggtactgactcctgctactttcactccggcccccgcggaacacacgatttgtgggatagcagactgttcgcttactccagctgggagatcttgaggttcctcctcagtaacattcgctggtggcttgaagagtacagattcgacggctttaggttcgatggcgttacctctatgctgtatcatcatcacggcgtaggtcaaggattcagtggcgactatagtgagtactttggattgcaagtggacgaagatgcgctgacatacttgatgctggctaatcatctggttcataccctctgtcctgattcaatcaccattgcagaggatgtatccggaatgccagctttgtgcagcccaatctctcagggcggaggtggctttgactatagactggcgatggccattccagataaatggatccagctgcttaaggaatttaaggacgaggattggaacatgggagatatcgtgtacactcttacaaataggaggtacctggaaaaatgtatcgcttacgctgaatctcacgaccaggccttggtaggagacaagtcactcgccttctggctcatggacgccgaaatgtataccaacatgagtgtgttgactccctttacaccggtgatcgacaggggaattcagctccacaagatgatcaggctgataacccatggcctcggtggagaaggataccttaacttcatgggaaatgagttcggccacccggagtggctcgatttccctcgcaagggtaacaatgaatcctaccattacgcgcgccgccaatttcacctgactgacgacgatctgctgcgctacaagtttctcaacaactttgacagagatatgaacaggctcgaagagcgctacggctggctcgccgcaccccaggcatacgtgagcgagaagcacgagggcaacaaaattattgctttcgaacgcgctggcctccttttcatcttcaatttccatccgtccaaatcatataccgattaccgcgtaggcacggcgctcccaggcaagttcaagatcgtgctcgactctgacgcggccgagtatggaggccatcagagactcgatcatagcacagacttcttctccgaggccttcgagcacaacggcagaccctatagtctcttggtgtatatcccctctagagttgctctcatactgcaaaacgtggaccttcctaac

SEQ ID NO: 3493 - DNA, 2106 bp, Artificial Sequence
  derived and/or modified sequence
atggcagcgccaatgactccggctgctcgccctgaagattacgaggcggccctgaacgccgctcttgccgatgttcccgaactagctcgcctcctcgagatcgacccctacctgaaaccgtatgccgtggactttcagaggcgttataaacagttcagccagattctaaagaacatcggcgagaacgagggcggtatcgataagttcagccgaggctacgaatcctttggagtgcaccgctgcgctgatggagggctatattgcaaggagtgggcgccaggtgccgagggcgtgtttcttaccggtgacttcaatgggtggaatcccttcagttatccttataaaaagttggactacggtaagtgggaactgtatatcccccctaaacaaaataagtccgtgctagtgccccacggcagtaagttgaaggtggtcattacttctaaatcaggcgaaatcctgtacagaatatccccatgggccaagtacgtcgttcgagaaggcgataacgtaaattatgattggatccactgggaccccgaacattcttacgaattcaagcatagcagaccaaagaagccccgttctctccggatctacgagtcacacgtgggaatatcctcacatgaggggaaggtcgccagttacaagcacttcacctgcaatgttctgcccaggataaaggggctggggtataactgcatccagctcatggcaataatggagcacgcctactacgccagcttcggctaccagatcacttcgttcttcgctgcctcttccaggtatggtactcccgaggaactgcaggaactggtggatacggctcattcgatgggcattattgtgttgctggacgtggtgcattctcatgccagcaagaactccgctgatgggcttaacatgttcgacggcacagattcctgttattttcacagcggcccacgaggcactcacgacctatgggacagccgactgttcgcttattcgagctgggagatcctgcgatttctgcttagtaacatccgttggtggctcgaggaataccgctttgacggtttccgctttgacggcgtgacctcgatgctataccaccatcacggcgtggggcagggcttctccggagattactccgagtacttcggtctgcaagtggacgaggatgcattgacctacctgatgttagcaaaccacctcgtccacacgttatgccctgactcaattaccatcgctgaggatgtctcagggatgccagccctgtgttctcccatcagccagggaggaggaggttttgattacagactggccatggccattcccgataaatggattcaactcctcaaggagttcaaagacgaggattggaacatgggtgatattgtgtacactctgactaaccgcagatacttagagaaatgcattgcatatgcagaaagccatgatcaggctttagttggggacaaatctctggccttttggctcatggacgcggaaatgtacactaacatgtccgtactgactccattcacccccgtgatcgatcggggtatccagcttcacaagatgatcagactgatcacacacgggcttggtggcgaggggtacctgaatttcatgggaaacgagttcgggcatccagagtggctcgattttcctcgaaaagggaataatgaatcttatcattacgccagaagacaattccatttgacagacgacgatctgctaaggtataagtttctgaacaactttgaccgggatatgaatcgcctcgaggagaggtacgggtggctggctgctccccaggcttatgtaagtgagaagcatgagggcaataaaataatcgcctttgaaagggccgggcttcttttcatctttaacttccatccatctaaatcctacacggactacagggtgggcacggcattgccagggaagttcaagatcgtcctggattcagacgcagccgaatacggagggcatcaaaggctggaccactccacagacttcttttccgaagccttcgaacacaacgggcggccatacagtctgctggtttacattccttcgcgggtggcactgatcttgcagaatgtcgacctgccaaac

SEQ ID NO: 3494 - DNA, 2106 bp, Artificial Sequence
  derived and/or modified sequence
atggccgcccctatgactcccgccgcccgccctgaggattatgaggccgctctcaacgctgccctcgcagatgtgcctgaacttgcaaggctgctggaaattgacccctatctaaaaccttatgctgtggatttccagcggcggtataaacaattctctcaaatcctcaaaaatattggggaaaatgaaggagggatagacaaattctcacgcgggtatgaaagtttcggagttcatagatgcgctgacgggggactgtattgtaaagagtgggcccctggagcagaaggagtctttttgacaggggatttcaacgggtggaaccccttctcttacccctataaaaaactagattacgggaagtgggaactctatatcccgcccaaacagaacaagtccgttcttgtaccccacgggtcaaagctgaaagtcgtcattacatctaaaagtggagaaatcctttatcgcatatcaccctgggcaaaatacgttgtcagggaaggagataacgttaattatgattggatccactgggatcccgagcattcctacgaattcaaacattctcgccctaaaaaacctaggtcccttagaatctacgagagtcatgttgggatatctagtcatgaaggaaaagtagcttcctataaacactttacttgtaatgttctccctagaatcaaaggactcggatataactgtatccagttaatggccataatggaacatgcttactatgcttccttcgggtatcagatcacttccttctttgcagcctcaagtcggtatgggactcccgaagaactccaggaactggttgatacagcacatagtatgggaataattgtactcctcgatgtggtacattctcacgcaagtaaaaacagtgccgacgggcttaacatgtttgacggaacagattcttgttattttcactctgggccccgcgggactcatgatctgtgggattcacgcctcttcgcctactcttcatgggaaatattacgattcctactgtctaatatcaggtggtggctggaagaatacagattcgatggatttaggttcgatggagtaacatctatgttgtatcatcaccatggggtgggacagggattctcaggggattactccgaatacttcggactgcaggtcgatgaagatgcattaacatatctgatgctcgcaaatcatctggtgcacacactttgtccagattccatcactatagctgaagatgtgtctggaatgcccgcactgtgctctcccatttcgcaaggaggaggggggtttgactaccggcttgcaatggctataccagataaatggattcagctcctgaaagaatttaaagacgaagactggaatatgggggatatcgtttacacattgactaatcggagatatctggaaaagtgcatagcatacgctgagtctcatgatcaggcgctggtgggagataaatcactcgcattttggcttatggatgccgaaatgtacactaatatgtcggtgcttacaccctttactcccgtaatcgacagagggatacagttacataaaatgattcgcttaatcacacatgggctgggaggagaagggtatcttaatttcatggggaacgaatttgggcaccctgaatggctcgacttcccaagaaaagggaataatgaatcttatcattatgcacggagacagttccacctgacagatgatgacctgcttcggtacaagtttctcaataatttcgatcgagatatgaatcgactcgaagaacgttatgggtggctagcagctcctcaggcatacgtgtctgaaaaacacgaaggaaataaaatcatcgcttttgaacgggccgggctactcttcatattcaacttccatccctccaaatcttatactgattacagagtcggaacagctctaccgggaaaattcaaaatcgtgctagatagtgatgcagctgaatatggggggcatcagagactggaccacagtactgatttcttttcggaagcttttgaacacaacggaaggccatactcattgctcgtgtatatcccctcaagggtggcattaatcctgcagaacgtcgacctcccaaat

SEQ ID NO: 3495 - DNA, 2106 bp, Artificial Sequence
  derived and/or modified sequence
atggccgcccctatgaccccagctgcacgcccggaagactacgaagctgccttgaacgcagccctcgcggacgtacccgagctggcacggcttctggagattgatccttacctgaaaccgtatgccgtagactttcagcgccggtataagcagttttcccagatacttaagaacatcggagagaatgaggggggtatcgataaattctcaagagggtatgagtcattcggggtgcaccgctgtgccgacggggggctgtattgtaaggagtgggcgccaggcgcggaaggagtgtttctgacaggagatttcaatggatggaaccctttctcttatccgtacaagaagttggattatggcaagtgggagctgtatatcccccccaagcaaaacaaatctgtcttggtgccacatggatctaagcttaaggtggtgattacctccaaatcaggcgaaatcctctacagaataagtccttgggccaaatacgttgtgcgggagggggataatgtcaactacgattggatccattgggaccccgaacacagctatgagtttaaacacagcaggcctaagaaaccgcgctctttgcggatctacgagagtcatgtcggcatctcctcacacgagggcaaagtggcatcatacaagcattttacgtgtaatgtgctccctagaatcaagggcctgggttataactgcatccagttgatggcgatcatggagcatgcttattacgcttcattcggctaccagattaccagttttttcgcagcctcctcacggtacggaacacccgaggagcttcaggaactggtcgatacggctcacagtatgggcattatcgtgctgctggatgtagtccacagtcacgccagcaagaacagcgccgacggcctcaatatgttcgatggtactgacagctgttactttcatagtggcccacgcggaacccatgatttgtgggactcccgcctgttcgcatatagcagctgggaaatcctgagattcctgttgagtaacattaggtggtggctggaagagtaccgattcgacggattcaggtttgacggagtcaccagcatgctgtaccatcaccacggggtgggacagggtttctccggggactattctgaatattttgggctgcaggtcgatgaagatgccctgacttatctcatgctcgccaatcatttggtgcacacactctgccctgattcaattacaatcgccgaggacgtgtcaggcatgcccgccctgtgtagccccatcagtcagggcggtggaggatttgactaccgcctggcaatggctattcccgataaatggattcagttgctgaaagagttcaaagacgaggattggaatatgggcgatatcgtatatactctgacaaacagacgatatctggaaaagtgcatcgcgtacgccgaaagtcacgaccaggcgttggtaggcgataagagccttgcattttggctcatggatgccgaaatgtacactaacatgagtgtgttgactccatttactcctgtcatagataggggcattcagctgcataaaatgatccggctcatcacccacggcctgggaggcgagggttaccttaacttcatgggtaatgagttcgggcaccccgaatggttggacttcccacgcaaaggtaacaacgagtcatatcactacgcccggagacagtttcacctgaccgacgatgacttgcttagatataagtttctgaacaattttgaccgggatatgaacagattggaagagaggtacggttggctggcggccccccaggcttatgtgagcgagaaacatgagggaaataagatcatcgcatttgagagagctgggttgctctttatcttcaactttcatccatctaaatcttacaccgactatcgcgtggggacagcacttcctgggaagtttaagatcgtcctggacagtgatgccgcagagtacggaggccatcagcggttggaccactccacagatttctttagcgaagctttcgagcacaacggcaggccatatagcctgctcgtgtatattccgtctagggtggctctcatacttcagaacgtggacctccccaac

SEQ ID NO: 3496 - DNA, 2106 bp, Artificial Sequence
  derived and/or modified sequence
atggcagctccgatgacaccagccgcacgacctgaagactacgaggccgccctgaacgcagcgttagctgacgtgcccgagctggcacgtctgctcgagattgatccctatctcaaaccttacgcagtcgattttcagcgcagatataaacaattctcccagattctgaaaaatataggcgaaaatgaaggtggaatcgataagtttagcagagggtatgagtcttttggcgttcatcggtgtgcggatggtggcctctattgtaaagaatgggcccccggggcggaaggcgtatttctgaccggcgattttaacggttggaaccctttttcctacccatataaaaaattggattacgggaaatgggagctgtatattccaccaaaacaaaacaaaagtgttttggtgccacacggatctaagttgaaagtggtgataacttcaaaatcaggcgagatcctgtacagaataagtccatgggccaagtacgtggttcgcgagggggacaatgtcaattatgactggatccattgggatccagagcactcctatgaatttaagcacagcaggcccaagaagccacggagcctcagaatttatgagagtcacgttgggatctcttcgcatgaaggcaaggtcgcatcttacaaacacttcacgtgcaatgtgttgcctcgaattaagggcctgggctacaattgcatccagcttatggccataatggagcacgcttactacgcctctttcggataccagattaccagttttttcgctgcgagttcacggtacggcactcccgaagaacttcaggagctggtggacaccgcccattcaatgggcatcatcgtgctgttggatgtggtgcactcgcacgcttctaaaaactccgctgatggcctgaatatgttcgatggaaccgattcttgctactttcatagtgggccgagggggacccacgacctgtgggatagcaggctgtttgcctattctagctgggaaatcctgaggtttttgctttccaacattcggtggtggctcgaggagtatcggttcgatggcttcagatttgacggtgtcacgtccatgttgtatcaccaccacggggtggggcagggattcagtggcgattacagcgagtattttgggcttcaggtagacgaggatgccctgacatatctaatgctggctaatcatcttgtgcacacactttgcccagactccatcactatcgccgaagacgtgtcgggaatgcctgccctgtgctccccgatcagccagggcgggggcggttttgactacaggctggctatggcaatcccagacaagtggatacagctgctgaaagagttcaaggacgaggactggaatatgggtgatatcgtatatactctgactaatcgacgctatctggaaaagtgcattgcttacgcagagtcacacgatcaggctctcgtaggtgataaatctctggccttctggctcatggacgctgagatgtatactaatatgtccgtccttacgccattcacccccgtaatcgaccgtgggatccagttacataagatgatcagactcatcacccatggtctggggggcgagggctatctgaatttcatggggaatgagttcggccacccagagtggttggatttccccagaaaggggaacaacgagagttaccactacgcccgtcggcagttccacctcaccgatgatgatcttttaaggtataagtttcttaataattttgatagagacatgaatcggttggaggagcgctatggctggctggctgcaccccaggcgtacgtatcagagaaacacgagggaaacaaaatcatcgcctttgagcgcgctggcttgctgttcattttcaactttcacccctcgaagagctataccgactacagagtgggcactgccttacctggcaagtttaaaatcgttcttgatagtgatgccgccgagtacggtggccatcagcggctcgaccatagtactgacttcttttctgaggcctttgagcacaatggtagaccttactcactgttagtgtacattccatccagggtggcattgattctccaaaacgttgatctgccgaac

SEQ ID NO: 3497 - DNA, 2106 bp, Artificial Sequence
  derived and/or modified sequence
atggccgcacccatgactccggctgctcgacctgaggactacgaggccgccctgaacgctgccctggctgatgttccagagctggcccgcctgcttgagattgatccctacctgaagccttacgctgtggactttcagagacgctacaaacaattttctcagatcttgaagaatatcggagagaatgagggaggaatcgacaagttcagccgcggatacgagtctttcggtgtgcacaggtgtgcagatggcgggctgtactgcaaggagtgggccccgggtgctgagggtgtatttctgactggcgattttaacggatggaatcccttcagttacccatacaagaaactggattacggaaagtgggaactctatattccgcccaagcagaacaagtctgtgttggtgccacacggaagtaaattgaaggtggtgatcacatctaagagtggggaaatcctgtatcgcattagcccctgggctaagtacgtggtacgagaaggggacaacgtgaattacgattggatccattgggatccagaacacagctacgagttcaaacacagtcggcccaaaaagccccgctcactgcggatctacgaaagccatgtggggatctcaagtcatgaggggaaagtcgccagttacaaacattttacttgtaacgtactgccccggatcaaaggcttgggatacaattgcatccagttgatggctatcatggagcatgcctattacgcttcctttggctatcagattactagtttcttcgccgctagttccaggtacgggacccctgaggagctgcaagagttggtggatacggcccactctatgggaattatagtgctgctggatgtggtgcatagccacgcgtccaagaattcagccgacgggcttaacatgtttgatggcaccgatagctgctattttcatagcggcccgcgcgggacacatgatctctgggattctagactgtttgcctacagtagttgggagatcctcagatttctcctgagcaacattagatggtggctggaggagtacagatttgacggattcaggttcgatggggttacatccatgctttatcaccaccacggagtcggacaagggttctccggcgattacagcgagtattttgggctccaggtggacgaagacgctttgacatacctcatgctggctaaccacctggtccatactctttgtccagattccatcaccattgccgaagatgtgtccggcatgcccgctctctgttcacccatttcccagggcgggggcggctttgattacagactcgcaatggctattcctgacaaatggattcagctgctcaaggagtttaaagatgaagattggaatatgggagatattgtgtataccctgacaaacagacggtatctggagaagtgcatagcatatgccgagagccatgatcaggccttggtgggtgataagtccctggccttctggctcatggacgcagagatgtatacgaatatgagtgtgctgacacctttcacaccagtcatcgatagggggatccagctgcacaagatgataaggcttattacgcatggcttgggcggcgaggggtatttgaatttcatgggcaacgaattcgggcaccctgagtggctcgattttccccgaaagggaaataatgagtcataccactacgcccgcagacaattccatctgacagatgacgatctcctgcgatataagttccttaataatttcgaccgcgacatgaacaggctcgaggagcgctatggatggctggccgctccacaggcttatgtgtctgagaagcacgaaggcaacaagatcattgcatttgagagggcgggacttctttttatcttcaactttcatccgtcaaaatcttacactgattatagagtcggaaccgctcttccaggcaagtttaagatcgttcttgattccgatgcagccgagtatggcggacaccagcgactcgaccactctaccgatttcttcagcgaagccttcgagcacaacggacggccttactcactcttggtgtacattccttccagggtggctctcatcctgcaaaacgtggatctccccaat

SEQ ID NO: 3498 - DNA, 2106 bp, Artificial Sequence
  derived and/or modified sequence
atggccgcccctatgactccagccgccagacctgaagactacgaggcggccctgaatgcagctcttgccgacgtgccagagctcgcgcggctcctagaaattgatccatacctaaaaccctatgccgtggacttccaacgcagatacaaacagttctcccagatcctcaaaaatattggagagaatgagggcggaatagacaaattctccagagggtatgaatctttcggcgtgcatcgctgcgccgacggcgggctgtattgcaaggagtgggcacctggcgctgaaggagtgtttctgactggcgatttcaatggatggaatcctttttcctatccatacaagaaactggattatggaaaatgggagctgtatatcccaccaaaacagaataagtcagtgcttgtcccgcacggctccaagctgaaggtagtaataacaagtaaatcaggggagattttatatcgtatttcgccctgggctaaatacgtggtccgggagggcgataatgtaaattatgactggatacactgggatccagaacactcttacgaattcaaacactccagaccaaaaaagccacgatctttaaggatctacgagtcccatgtgggtattagctcgcacgaagggaaggtggcctcctataaacacttcacctgcaatgtgttaccccgcattaaaggactgggatataactgtatccagctgatggctatcatggaacacgcgtattatgcttcattcggataccagattacatctttctttgctgcttcaagcagatatgggacccctgaagaactgcaggagctggttgacactgcacactccatgggcattattgtgttgctcgacgtggtgcacagccatgcatccaagaactccgccgatgggctgaatatgtttgacgggaccgatagctgttactttcactccggaccacgcgggacacatgatctctgggattctcgtcttttcgcctactctagctgggagatcctgcggtttctgctcagcaacatacggtggtggctggaagagtaccggttcgatgggttccgctttgatggagtaacatcgatgctgtaccatcatcatggtgtgggacaaggtttcagcggcgactactcagaatatttcggactgcaggtggacgaggacgcacttacctaccttatgctggcaaatcatctcgtgcatacactgtgccctgattccatcacaattgctgaagacgtgtcgggtatgccagccctgtgcagtccaatatcccaaggcggtggcggttttgattaccgcctggccatggctattcctgacaaatggatccaactcttgaaggagttcaaagatgaagattggaacatgggcgatatcgtctacacgcttacaaacaggcggtacctagagaaatgtatagcttacgccgagtcccatgaccaggcccttgttggcgataaatcgctggcattctggctgatggacgccgaaatgtacacaaacatgagcgtcttgactccttttaccccagttattgatagaggcattcagcttcataagatgatcagactgatcactcatgggcttggcggggagggttacctgaatttcatgggaaacgaattcgggcacccagaatggctggactttccacggaagggtaacaacgagagctatcactatgccaggcggcagtttcatctgacagacgacgatcttctgaggtataaatttctcaacaacttcgatcgggacatgaatagacttgaagaacgatatgggtggctcgcagcgccccaagcatatgtaagcgagaagcacgaaggcaataaaatcattgcatttgaaagggccggattactatttatcttcaattttcacccctctaaatcctacacagattaccgcgtcggtactgcgctccctggaaagtttaagattgtgctcgatagcgacgctgccgagtacgggggtcatcagcgtctcgaccatagcacggacttcttctccgaggcttttgagcataatgggcggccctacagtttgttagtttacattccatcgcgagttgccctcatcctgcagaacgttgatttacccaat

SEQ ID NO: 3499 - DNA, 2106 bp, Artificial Sequence
  derived and/or modified sequence
atggccgcacctatgactccagccgcccggcctgaagattatgaggcagccctgaatgccgctctagcagacgttccagagttggctcgcttgcttgagatcgacccgtatttgaagccatacgccgtggacttccagcgccgatacaagcaattcagccagatcctgaagaacatcggcgagaatgaaggcggcatagataaattctcccgcggatatgaatcctttggagtccacaggtgtgctgacggtggcctgtactgtaaggagtgggccccaggagcggagggggtctttctgaccggcgattttaacggatggaatccctttagctacccctataaaaagttggattatggaaagtgggagctgtacattccccctaaacagaacaagtccgtcctggtgccacatggctctaagctgaaggtagtgattacatcaaagtctggagagattctttatcgcatttccccctgggctaaatacgtcgtgcgggaaggcgataacgtgaattatgactggatccattgggaccccgaacactcctacgaattcaagcatagcagacctaagaaaccccgcagcttgcgaatttacgaatcgcacgtgggcatttccagccacgaagggaaggtggccagttacaagcacttcacctgcaacgttcttcctcgcattaaagggttgggttacaactgcattcagctgatggccatcatggagcatgcctactacgcatcatttggctatcagattacctccttcttcgctgcaagctcccggtatggcacccctgaggaactgcaggaactggtggacaccgcccactcaatgggcattatcgtcctgctggacgtagtccactctcatgctagcaaaaacagcgcggacggcctcaacatgttcgatggcactgacagctgctactttcattcaggtccccggggcacgcacgacctgtgggattctagactgtttgcctatagctcatgggagattctgcggtttctgctatccaacatccgctggtggctggaagaataccgattcgatgggtttaggttcgacggggtgacttccatgctgtatcatcatcatggggtaggtcaagggttctccggtgactatagcgagtacttcggcttgcaagtggacgaagacgccctcacatacctgatgcttgccaaccacctggtgcataccctgtgtcctgactccattacgatagccgaggatgtgagtggaatgccagcactctgcagtccaatttctcagggcggaggcggctttgactatcggctcgccatggcaatccctgacaagtggatacagttgctcaaggaattcaaggacgaagattggaacatgggcgatatagtgtacaccttaaccaatcgcagatacttagaaaaatgcattgcctacgccgagagccatgatcaagctctcgttggggataagtctctggccttttggttaatggacgctgaaatgtataccaatatgagcgtacttacgcccttcacccccgtcatagatcgggggatccagcttcacaaaatgatcagactgataacccacggtttgggcggcgagggataccttaattttatgggtaacgagttcggtcacccggaatggcttgacttcccccggaaggggaataacgaaagttatcactacgcccgcaggcagtttcatctgaccgatgacgacctcctgcgctataagtttctcaataattttgatcgggatatgaaccggcttgaggagaggtacgggtggctggctgcaccgcaggcctacgtgagtgagaaacacgaaggcaataagatcattgcttttgaacgtgccggcttgctgtttattttcaatttccatccttccaaatcttataccgattacagagttggcactgctttacctggtaaatttaaaatcgtgctggacagtgacgccgcagagtacgggggacaccagaggttggaccactctacggatttcttctctgaggccttcgaacataacggcaggccctattcactacttgtgtatatccccagcagagttgccctcatactacagaatgtggatcttccaaac

SEQ ID NO: 3500 - DNA, 2106 bp, Artificial Sequence
  derived and/or modified sequence
atggccgctcccatgacccccgctgcaagaccggaagattatgaggcagccctgaacgctgccctcgctgacgtgcctgagttggcccgactgctcgagatcgatccctacctgaagccttatgcagtagactttcagaggcgctacaagcagttttcccagattttaaagaatatcggggaaaatgaaggaggaattgataaattttctcggggctacgaaagctttggtgtgcaccgttgcgctgacggaggcctctactgtaaggagtgggctccaggcgcagagggtgtgttccttaccggcgatttcaacggatggaatcccttctcttacccttacaagaagctggactacggcaagtgggaactttacatcccccctaaacagaacaaatcagtgttggtcccgcacggatccaaactgaaagtggtgattaccagcaaatcgggagagattctttacaggatctcgccttgggccaaatacgtcgtccgggagggggataacgtgaattatgactggatccactgggatcctgagcattcctacgaattcaagcatagccgccccaagaagccacggtccctgcggatctatgagagtcacgtagggatctcatcccacgagggcaaagtggctagctacaagcattttacctgcaacgtactgccccgaataaagggcttgggatacaattgtatccagctcatggcaattatggagcacgcctactacgcgagtttcggctatcagatcacgagcttttttgccgctagctcccgatatggcacccccgaagagttgcaggaattggttgataccgctcacagcatgggcattattgtgctactcgatgtcgtgcattctcatgcctctaaaaactctgcggacggactgaatatgttcgacggcactgatagctgttatttccattctggcccgagaggtacgcatgacctatgggacagcaggctctttgcctacagctcgtgggaaatattgcgttttcttctttctaacataaggtggtggctggaggaatataggtttgacggcttccgatttgatggggtgacttccatgctgtaccaccatcacggtgtgggtcaaggattctctggcgactatagcgagtatttcggcctacaggtcgatgaagatgcgttgacttatctcatgttggctaaccaccttgtccatactttatgtcccgacagcattacaatcgcagaggacgtgagcggaatgccggcgctttgttctccaatttcacaaggaggaggaggattcgactaccggctggccatggcaatcccagacaagtggatccagctgcttaaagaattcaaggacgaagattggaatatgggagatatagtatacacactgacgaacagaaggtaccttgaaaagtgtatagcttatgcagaatcccatgaccaggccttagttggcgataagagtctcgctttttggctcatggacgccgaaatgtataccaacatgtcggttttaactccctttactcccgttatcgatcgcggaatccagcttcacaaaatgatccggttaattactcatgggctgggcggtgagggttatctgaacttcatgggaaacgaattcgggcaccctgagtggcttgacttccctagaaaaggaaacaacgaaagctaccattatgctcggagacagtttcatttgactgacgatgacttgctgcggtataagttcctgaacaacttcgaccgcgatatgaacaggctggaggagaggtatgggtggctggccgcaccccaggcgtatgtcagcgagaagcatgagggcaacaagattattgcgtttgagcgtgccggcctgctgtttattttcaatttccacccttcgaagtcctacacagactaccgggttggcactgcgctgcctgggaagtttaagattgtcttagactccgatgcagcggagtatggagggcatcagcgcttggaccatagcactgatttcttctctgaggcctttgaacacaacggaaggccttacagcctgctggtgtatatccctagccgagtcgcactaattctccaaaatgtcgatttgcctaac

SEQ ID NO: 3501 - DNA, 2106 bp, Artificial Sequence
  derived and/or modified sequence
atggcggccccaatgactcctgccgcccgtcctgaggattacgaagctgcccttaacgccgcacttgccgacgttcccgagctggcaaggttgcttgagatcgatccttatttgaagccttatgccgtagatttccagagaagatataagcagttttcccagattctaaagaacattggagaaaatgagggaggcattgacaaattcagcagaggctatgagtcattcggtgtgcacaggtgtgccgatggcgggctctactgtaaagaatgggcgccaggagcagagggtgtattcttgaccggcgatttcaacggctggaaccctttctcgtatccatacaaaaagctggattacggtaagtgggaactttatattccacccaagcagaataagtccgtcctcgttcctcacgggagcaaattgaaagtcgtcattacttctaaaagcggcgagatactttatcgaataagtccatgggccaagtacgttgtccgagagggcgacaatgtcaattatgattggatacactgggaccctgaacattcttatgaatttaagcactcacgccccaaaaagccccgaagtctgaggatctacgagtcccatgtcggaatttcatcccacgaagggaaagtcgcctcttacaaacactttacctgcaacgttttaccaaggattaagggcctcggatataattgtatacagctcatggctatcatggagcacgcctactacgctagctttgggtaccaaataaccagtttctttgccgctagctctcgatacggcacacccgaagagctgcaagagctcgtggatacggcgcacagcatggggattatcgtgctgcttgacgtcgtgcatagccatgcttcgaaaaattcggcggatgggctgaacatgtttgacggcacagattcatgctattttcatagtggtcctaggggcactcatgatctgtgggactcaaggctttttgcatacagttcttgggaaatcctgcgttttctgctgtcaaacattagatggtggctcgaggagtataggtttgacggcttccgatttgatggcgtgaccagcatgctgtaccaccatcacggcgtcggccaaggatttagcggagactattccgaatacttcgggttacaagtagatgaggacgccctcacttatctcatgctggcgaaccacttagtgcacacattatgtcctgattcaataacaatcgctgaggacgtctctggtatgccagccctgtgctccccaataagccagggagggggcggttttgactacaggctggcaatggccatccctgacaagtggatacagcttctaaaagaatttaaggacgaagactggaatatgggagatattgtgtatacactgacaaaccgacgatatctggagaaatgcatagcttatgccgaaagccacgatcaggcgttagtaggcgacaagtctctggcattttggctgatggacgccgagatgtacacaaacatgtcagttcttactccattcacaccggtaattgatcgaggcatccaactgcacaagatgatccgactgattacccatggattggggggggagggctatctgaacttcatgggtaatgagttcgggcaccccgagtggctcgacttcccccgaaaagggaacaatgaatcataccactacgcacgaagacagttccacctgactgacgatgacctccttcgatataaatttctcaataactttgaccgagatatgaatcgtttagaagagaggtatggttggctggcggccccacaggcatacgtgtccgaaaagcatgaaggcaacaagatcatagccttcgagagagctggtttactatttatatttaattttcatccctccaaaagctacactgactaccgagtaggaacagcattgcctggaaagttcaaaatagtccttgattctgacgccgcagagtatggaggtcatcagcgactggatcatagcacagacttcttcagtgaagcatttgaacataacggccgcccttactctttgctggtttatatcccttctcgagttgccctcatcctgcagaacgtggatttaccgaac

SEQ ID NO: 3502 - DNA, 2106 bp, Artificial Sequence
  derived and/or modified sequence
atggcggcgccgatgacgccggcggcgcgaccggaagattatgaagcggcgttaaatgcggcgctagcggatgtaccggaattagcgcgattattagaaatagatccgtatttaaaaccgtatgcggtagattttcaacgacgttataaacaattttcgcaaatactaaaaaatataggtgaaaatgaaggtggtatagataaattttcgcgtggttatgaatcgtttggtgtacatcgttgtgcggatggtggtttatattgtaaagaatgggcgccgggtgcggaaggtgtatttttaacgggtgattttaatggttggaatccgttttcgtatccgtataaaaaactagattatggtaaatgggaactatatataccgccgaaacaaaataaatcggtattagttccgcatggttcgaaactaaaagtagtaataacgtcgaaatcgggtgaaatactatatcgtatatcgccgtgggcgaaatatgttgtacgagaaggtgataatgtaaattatgattggatacattgggatccggaacattcgtatgaatttaaacattcgcgaccgaaaaaaccgcgatcgttacgaatatatgaatcgcatgtaggtatatcgtcgcatgaaggtaaagttgcgtcgtataaacattttacgtgtaatgtactaccgcgaataaaaggtttaggttataattgtatacaactaatggcgataatggaacatgcgtattatgcgtcgtttggttatcaaataacgtcgttttttgcggcgtcgtcgcgttatggtacgccggaagaactacaagaactagttgatacggcgcattcgatgggtataatagtactattagatgtagtacattcgcatgcgtcgaaaaattcggcggatggtttaaatatgtttgatggtacggattcgtgttattttcattcgggtccgcgaggtacgcatgatctatgggattcgcgtctatttgcgtattcgtcgtgggaaatactacgttttctattatcgaatatacgttggtggttagaagaatatcgttttgatggttttcgatttgatggtgtaacgtcgatgctatatcatcatcatggtgtaggtcaaggtttttcgggtgattattcggaatattttggtttacaagttgatgaagatgcgttaacgtatctaatgctagcgaatcatctagtacatacgttatgtccggattcgataacgatagcggaagatgtttcgggtatgccggcgttatgttcgccgatatcgcaaggtggtggtggttttgattatcgactagcgatggcgataccggataaatggatacaactattaaaagaatttaaagatgaagattggaatatgggtgatatagtttatacgttaacgaatcgacgttatttagaaaaatgtatagcgtatgcggaatcgcatgatcaagcgttagtaggtgataaatcgttagcgttttggctaatggatgcggaaatgtatacgaatatgtcggttttaacgccgtttacgccggttatagatcgtggtatacaactacataaaatgatacgattaataacgcatggtctaggtggtgaaggttatctaaattttatgggtaatgaatttggtcatccggaatggctagattttccgcgaaaaggtaataatgaatcgtatcattatgcgcgtcgacaatttcatttaacggatgatgatctactacgttataaatttttaaataattttgatcgtgatatgaatcgactagaagaacgatatggttggctagcggcgccgcaagcgtatgtatcggaaaaacatgaaggtaataaaataatagcgtttgaacgtgcgggtttactatttatatttaattttcatccgtcgaaatcgtatacggattatcgtgttggtacggcgctaccgggtaaatttaaaatagttttagattcggatgcggcggaatatggtggtcatcaacgactagatcattcgacggattttttttcggaagcgtttgaacataatggtcgaccgtattcgctattagtatatataccgtcgcgtgtagcgttaatactacaaaatgtagatctaccgaat

SEQ ID NO: 3503 - DNA, 2106 bp, Artificial Sequence
  derived and/or modified sequence
atggccgccccaatgacccctgcagcccgccctgaggattatgaagccgccctaaacgcagccctggcagatgtccctgagctggcacgacttctagagattgacccatacctgaagccgtacgccgtggactttcagaggaggtacaaacagttctcccagattctgaagaacattggtgaaaatgagggaggaatcgacaagttcagtcgagggtatgaatcgttcggggtgcacaggtgtgctgacggcgggttgtattgtaaggaatgggcacctggcgccgagggagtgtttctgactggcgacttcaacgggtggaaccctttctcatacccgtataaaaagctcgactacgggaaatgggaactctacatcccccctaagcagaacaaatccgtgctcgtgccacacggctcgaagctcaaagtggtaatcacttccaaatcgggcgagattttgtatagaattagcccctgggctaaatatgtcgtacgtgagggtgataacgtgaactatgactggattcattgggatccagagcacagttacgaattcaaacattccagacctaaaaagccgaggtctctgcggatttacgagtctcacgtgggcatcagcagccacgagggcaaggtggcgagctataaacactttacttgtaacgtcttaccacgaatcaaaggcctcggatataactgcatccagcttatggccatcatggaacacgcatactacgctagcttcggataccagataacgagcttctttgccgccagctcccgctatggcaccccagaggagttgcaggagcttgtggatacagcacacagcatgggaatcatcgttctgctggatgtggtgcatagccatgcctctaaaaactctgcagatgggctgaacatgtttgatggcaccgactcatgctacttccactccggccctcgaggcactcacgacctgtgggatagccgactttttgcgtactcttcttgggaaattcttcgcttcctgctctcaaatatcagatggtggttggaagagtaccggttcgatggcttcagattcgatggagtcacctcgatgctttaccaccaccacggagtcggccaaggattctccggagactactccgagtacttcggcctccaagtagatgaggatgccctgacatacctgatgctagcaaatcacctcgtgcatactctctgtccagattcaattaccattgccgaggatgtgtcaggtatgccggctctttgctcccctatcagccagggtggtggaggttttgactatcgactcgcgatggccatcccagacaagtggattcagctgttgaaggaattcaaagacgaagattggaatatgggcgatatagtttacacattgacaaatcgcagatacctggagaaatgtatcgcttatgctgaatcccatgaccaggctctggtaggcgacaaatcactggccttttggttaatggacgccgaaatgtatacaaacatgtcggtcctgaccccctttaccccggtcatcgacagaggaatccagctgcacaaaatgatcaggttaataactcacggcctgggcggcgaaggctaccttaatttcatgggcaacgaattcggccatccggaatggctcgacttccccaggaaggggaataacgagagctaccactacgcccggagacagtttcatctcaccgatgacgatctgcttcgctataagttcctgaacaattttgacagggatatgaaccgcctggaagagagatatgggtggttggccgccccgcaggcttatgtgagcgagaagcacgaaggaaataagattattgcctttgagcgggcggggctgctgttcatctttaactttcatccctccaaaagttacacagactatagagtcggtacggccctgccaggaaagtttaaaattgtgttggactccgatgcagccgaatacggtgggcaccagaggctggaccatagcactgacttcttttcagaggcctttgagcacaatggccgaccctatagcctattggtgtacattccctctagagtcgcgcttatcctccaaaatgtggacttacccaat

SEQ ID NO: 3504 - DNA, 2106 bp, Artificial Sequence
  derived and/or modified sequence
atggcagcccctatgacccctgccgctcgcccagaggattatgaagccgccctaaacgcggctcttgccgacgtccccgaactggcaaggctcctggagattgatccctatctgaaaccttacgccgtggactttcaaaggaggtacaaacagttttctcaaattctaaaaaacatcggcgagaatgagggcggtatagacaaattttcacggggctatgagtccttcggtgtccataggtgcgccgatggcggcctgtactgtaaagaatgggcgcctggggcagagggcgtctttctgacaggggacttcaacggctggaatcccttttcatatccctacaagaaattagactacggtaagtgggagctgtatatacctcctaaacagaacaaaagtgtgctggtccctcatgggtccaagctaaaagtcgtgatcacgtctaagtcaggggaaatcctttataggatctctccttgggccaagtatgtcgtcagagagggagacaatgttaactacgattggatccactgggaccccgaacactcctacgagttcaaacattctcgtcccaagaaacccaggtcgttgagaatttatgaatcccacgtgggaatctcctctcacgagggaaaggttgctagctacaagcacttcacctgtaatgttctcccaaggatcaaaggccttggttataactgcattcagctgatggcgatcatggaacacgcttattatgcatcttttggataccagattacttcattcttcgcagcaagctctcgttacggaacacccgaagagttgcaggaactggtggataccgcgcattcaatgggtatcatcgtgctgctagacgtagtccattcgcatgcgtccaagaactctgctgacggactgaatatgttcgatgggacagactcctgctactttcattctggccccagagggacccatgatctgtgggatagcagactgttcgcctactcctcctgggagattcttaggtttttgctgagcaacattaggtggtggcttgaagaataccgttttgatgggtttaggtttgatggtgtgaccagcatgctttaccatcatcatggagtggggcaaggcttcagtggtgactattctgagtactttggcctgcaggtggatgaggatgccctgacgtatctcatgctggccaatcatctggtgcatacgctttgtcccgattcaattaccatagcagaagatgtgagtggcatgcctgccctctgcagtccaatcagccaggggggagggggctttgactaccgcctggccatggccatcccagataaatggatccaactcttgaaagagttcaaagacgaggattggaatatgggagatatcgtttataccctcactaatagaagatacctggaaaagtgtattgcgtacgctgaatcacatgaccaggcactggtaggagataagtcactagctttttggcttatggatgctgaaatgtacaccaacatgtctgtgctgacccctttcacgccagtcatcgaccgcggcatccaattgcataaaatgatccgccttatcacccacgggctaggcggcgaagggtacctcaactttatgggcaatgaatttggtcaccctgaatggctagactttcccaggaaggggaacaacgaaagttaccactacgccaggcggcagtttcatctgacagatgatgatttgttgcgttacaagtttctaaacaactttgatagggatatgaaccggctggaggagagatacggctggctcgccgcccctcaggcatacgtttcagagaaacacgagggcaacaagataatagcatttgagcgggctggactactgttcatcttcaatttccaccctagcaaatcatacacagattatcgagttgggaccgcacttcccggcaagttcaagatagttctggactccgacgcagctgaatacggtggccatcaacggctcgaccactcaacagacttcttctccgaggcatttgagcataatggacgcccctactccctgctggtgtatataccatcacgcgtcgctttgatactgcagaatgtagatttacccaac

SEQ ID NO: 3505 - DNA, 2106 bp, Artificial Sequence
  derived and/or modified sequence
atggcagcgcccatgacccccgctgcccgccctgaggactacgaggcagctcttaacgctgccttggcagatgtcccggaattagctagactattagagattgatccctatctgaagccctacgcggtggacttccagagacgctacaagcagttctcccagatactcaagaacatcggcgaaaatgagggaggcatagataagttctccagagggtatgaatcttttggcgttcatagatgcgcggatggcgggctgtattgcaaagagtgggctcccggagctgaaggcgtgtttctgacgggtgatttcaacggttggaatcccttcagctacccgtataagaagctggattatggtaagtgggaattgtatattccaccaaagcagaataagtcggtgctggtcccccacggcagcaagcttaaggtggtcattacatcaaaatccggagaaatcttgtatcggatcagtccatgggcaaaatatgtggtccgagaaggggacaacgtcaactacgactggattcactgggatcctgaacactcttacgaattcaagcactcacgccccaagaagccaagatcgctccgcatctacgagtcacatgtcgggatttcttcccacgaggggaaggtggcatcatacaaacactttacatgtaatgtgctccccagaatcaaaggactaggatataactgcatccaacttatggcgattatggagcacgcttattacgcatcattcgggtaccaaattacaagtttttttgccgcaagctcacgctacggcactcccgaagaactgcaggagttagtcgacacagcccattctatgggaatcatcgtgttacttgatgtggtccactctcacgcgagcaaaaatagtgccgatggactaaacatgtttgacgggacggactcctgctacttccatagtggtccacgcggaactcacgacttgtgggactctcggctcttcgcatactcaagttgggaaatcctcaggtttcttctctctaacatccgctggtggttggaggaatacaggttcgacggcttccgattcgacggggtcacctccatgctgtatcaccaccacggagttggacaggggttcagcggggactacagtgaatacttcggcctgcaggtcgatgaagacgccctcacctacttgatgcttgctaaccacctggtgcacactttatgccctgattctatcacgattgccgaggacgtttcgggtatgccagctctgtgtagtccgatttcccagggaggcggcggttttgactatcgtctagccatggccatccctgacaagtggattcagctgctgaaagaattcaaagatgaggattggaatatgggagacatcgtgtatacacttactaatagacgctatctggaaaaatgcatcgcctatgccgagagccacgaccaggccctcgttggagacaagagtcttgcattttggctgatggatgcagagatgtacacgaatatgagcgtcttgaccccattcacaccagttatcgataggggcatccagctgcataagatgatccgccttattactcatggcttaggcggagagggctaccttaacttcatgggcaatgagttcggacaccccgaatggttagatttcccacgaaagggaaacaacgagtcctatcattatgcacggagacagtttcacttaaccgatgacgacctcctgcgttacaaattcctcaacaacttcgacagagatatgaacaggttggaggagaggtacggctggctggctgctcctcaggcctacgtgtcagagaagcacgagggtaataaaattatcgccttcgaaagggctggtctgttgttcattttcaatttccatccctccaaatcttacacggattaccgtgttggcacggccttgcctggcaaatttaagatcgtgctcgacagtgacgccgctgaatacggagggcatcaaagactcgatcacagtacagacttcttttccgaggcattcgaacataatggcaggccctacagtctgctcgtttacataccctcccgggtagccctgattctgcagaatgtggacctccccaat

SEQ ID NO: 3506 - DNA, 2106 bp, Artificial Sequence
  derived and/or modified sequence
atggctgctccgatgactccggctgcaagacccgaggactacgaagcagcacttaatgccgccctggcagatgtgcccgagttggctcggttgctcgagatcgatccctacctgaagccatacgctgtggactttcagcgcagatacaagcaattcagtcaaatcctaaaaaacattggtgaaaacgaaggcggcatcgataagttttcccgtggctatgagagctttggcgtccaccggtgtgctgacggaggcttgtactgcaaggagtgggcacccggagctgagggcgtgttcctgactggtgatttcaacggctggaaccctttctcttacccttacaaaaagctggactatggcaagtgggaactttacatcccccctaagcaaaataagagtgtgttagtccctcacggaagtaagcttaaggtggtgatcacctcaaaaagcggggagatactatacaggatctctccgtgggctaagtacgtggtacgagagggggataatgtcaactacgactggatacactgggatcctgagcactcttacgaatttaagcacagccggccaaaaaaacctcggtcactgagaatctacgaatcccacgtagggatcagttctcacgaaggaaaagtggcttcatacaagcactttacctgcaacgttctgccacggatcaaaggcctggggtacaactgcattcagttaatggccatcatggaacacgcctattacgcctcttttggctaccaaataacttcattcttcgccgcaagttcccgatacggcacccctgaggagctgcaagagctcgtcgatactgcgcatagtatgggaatcattgttctgttggacgtagtgcactcccatgcatccaagaactctgcagacggcctcaatatgtttgacggcaccgactcctgttactttcacagcggtcctagaggtactcatgatctgtgggacagtcggctgtttgcttactcctcttgggagatcttgcgattcctgctgtctaatatcagatggtggcttgaggaatacaggttcgacggatttcgattcgatggcgtgactagtatgctctaccaccaccacggggtaggacaggggttttcgggcgactactctgaatactttggtttgcaggtggacgaagacgcactaacttacctgatgttagccaaccacctagtgcacacattatgcccagacagtattactatcgctgaggacgtgtccggaatgccggccctgtgttcccctatctcccagggtggcgggggctttgactatcgacttgccatggccatccccgataagtggatccaactgctgaaagagtttaaggatgaagactggaatatgggcgacatcgtctatacattgacaaatagaaggtaccttgaaaaatgcattgcttacgcggagagtcatgatcaggctctggtcggcgataagtctttagcattctggctgatggatgcagagatgtacactaatatgagcgtgcttacgccttttaccccagtgatagacagggggatacaactgcacaagatgattcgactgataactcatggtctaggcggagagggttatctaaatttcatgggcaacgagtttggccacccagaatggctagactttcctcgtaaaggaaacaatgagtcctaccactacgccaggcgacaatttcacctgacagacgacgatttgctgcggtataaatttctcaacaattttgaccgggatatgaatcgcctggaggagagatacggttggctggccgcaccgcaggcctacgtaagcgagaaacatgagggaaataagattatagccttcgagcgggcgggtctcctttttatcttcaactttcatcctagtaagagttacacagattacagggtgggcactgcgctcccaggcaagttcaagatcgtgctggacagtgacgccgccgaatacggcggacaccagagactggatcattctactgatttcttctccgaagcctttgagcataatggacgcccttatagtcttctggtatatatcccctcacgagtggccctcatactgcagaacgtggacctccctaac

SEQ ID NO: 3507 - DNA, 2106 bp, Artificial Sequence
  derived and/or modified sequence
atggctgcccctatgacccccgctgccagacccgaggattacgaggcagccctgaatgccgccctggccgatgtccccgagctggccaggctgcttgaaatcgatccgtacttgaaaccctatgcagtcgactttcaacggcgctacaagcagtttagccagatcctaaagaacatcggggaaaacgaagggggcattgacaagttctcacgcggatacgaaagttttggagttcatagatgcgccgatggtggactttattgcaaggagtgggcacctggcgcagaaggcgtatttctgacaggggattttaatggatggaatcccttctcatatccctataaaaagctggactatggcaaatgggaactgtatatcccccctaaacagaacaagtcagtgctcgtgccacacggctcaaaattaaaggtggtcatcacaagcaagtcgggagagatcctgtacagaatctcaccctgggcaaagtatgttgtccgggaaggagataacgtgaactatgattggatccactgggaccctgagcactcctacgagtttaagcacagcagacctaaaaagcctagaagtcttcggatctacgagtcacacgtgggaatctcgtctcatgagggaaaagtcgccagttacaaacatttcacttgtaacgtgcttccaaggataaaaggattaggttacaactgcatacagcttatggctatcatggaacacgcttattatgccagcttcgggtaccaaattacttccttttttgccgcctcttccaggtatgggactccagaggaactgcaggaattggttgacacagcccattccatgggcataatcgtgctgctcgacgttgtgcattcacacgcttccaaaaactccgcagacggacttaacatgttcgacgggactgacagctgttacttccactccggaccccgaggaacccatgacctgtgggactcccgcctctttgcttacagttcctgggaaattctccgattcttgctgtctaatatcagatggtggctggaggaatatcgctttgacggtttccgattcgacggggtgactagcatgctctatcaccaccacggcgtgggccagggtttcagcggagactactcggaatacttcgggcttcaggtcgatgaggacgccctgacctacctgatgttagccaaccacctggtgcacacactgtgtcctgacagtatcactatcgctgaggacgtctccggaatgcccgccctatgcagccccatctcccagggaggcggcgggtttgactaccgactggcaatggccatcccagacaagtggatccagctcctgaaggagtttaaagatgaggactggaatatgggagacatcgtgtatacactgaccaatcggcgctatctggagaagtgtatagcctatgccgaaagtcacgatcaggccctggtgggggacaaatctctggctttctggctgatggacgctgagatgtatacaaatatgagcgtcctgactcccttcacgcccgtaattgatcgagggatacagttgcacaagatgatacggctgattacccacgggttgggtggcgaaggctacctgaatttcatgggaaatgagttcggacatcctgaatggctggacttcccgagaaagggaaataatgaaagctaccactatgctcggagacaattccacctcacggacgatgatttacttaggtataaatttctaaacaacttcgacagagacatgaatagactggaggaacgatacggatggctggccgcaccacaggcgtatgtttcagagaagcacgaaggcaacaagatcattgccttcgagcgcgccggcctgcttttcatattcaacttccatccaagcaaatcttacacggactaccgggtgggcacagccctacctgggaagttcaagatcgtccttgactcagacgcagccgagtatggcggacaccagcgtctggaccattcgaccgatttcttttcagaggccttcgaacataacggacgcccttacagtctgcttgtctacattcctagtcgggtggccttaatcctgcaaaatgtggacctccctaac

SEQ ID NO: 3508 - DNA, 2106 bp, Artificial Sequence
  derived and/or modified sequence
atggccgcgcccatgacgccggctgccaggcctgaggactacgaggctgccctgaacgcagccttggctgatgtgcctgagctggcgcgtctgctggagatcgacccctatttgaagccctacgccgttgacttccagcgccggtacaagcagttcagccaaatcctcaagaacattggtgagaatgagggtggtattgataagttctcccggggctacgagtccttcggagtccaccgttgcgccgatggtggattgtactgtaaggagtgggccccaggtgctgagggtgtctttttgaccggtgactttaacggttggaaccccttctcgtatccttataagaaactcgactacggaaagtgggaactgtacattcctccgaagcagaataaaagcgtcttagtccctcacggatctaagctcaaggtcgtgataacctcaaaaagcggagagatcctctaccgcatttctccctgggcgaagtacgtggtacgcgaaggcgacaatgtgaactacgactggatccactgggacccagaacactcatatgagtttaagcattcccgacctaagaaaccgcgcagcctgagaatctacgagagccatgtcggtatctcctcccacgagggcaaggtcgccagttataagcacttcacctgcaacgtgcttccccggatcaaaggccttggatacaactgtattcagcttatggcgatcatggagcatgcgtactacgcttctttcggctaccagatcaccagcttcttcgctgcgtcaagccggtacggcacgcccgaggagttacaggagctcgtcgacacagctcacagtatggggatcattgtcctcctggatgttgttcactcccatgcctccaagaactccgccgacggcctgaacatgttcgatggcacggactcctgctatttccatagtggtccgcgcgggactcacgatctctgggattcccggctttttgcctacagttcctgggagatcctgcgtttcctgctgtccaatatccggtggtggttggaggagtacaggttcgacggcttccggtttgacggcgttacctctatgctctatcaccatcacggcgtgggtcagggtttctctggcgactattcggagtattttggacttcaggtggatgaggatgctctgacttacctcatgctggccaatcacctcgtccataccctgtgcccagatagcatcactatcgccgaggatgtttcaggcatgccggccctttgctccccgatcagccagggaggcggtggtttcgactaccgtcttgcgatggccattcccgacaagtggatccagctgctgaaggagttcaaggatgaggactggaacatgggtgacatcgtctacaccctcactaatagacgctatttggaaaagtgtatcgcttacgctgagtcccacgaccaggccctggtcggtgacaagtcccttgctttctggctgatggatgcagagatgtacaccaacatgtccgttctcactcctttcacccctgttattgatcgcggtattcagctgcataagatgatccgcctgatcacccacggccttggtggcgaaggttacctgaacttcatgggtaatgagttcggtcacccggaatggttggacttccctaggaagggtaacaacgaatcgtaccactacgctaggagacaattccaccttacggacgatgacttgttgcgttacaagtttctcaacaacttcgaccgcgacatgaaccgtctggaggaaaggtacggctggctcgccgccccccaggcctacgtgagcgaaaagcatgagggaaacaagatcatcgctttcgagcgagccggtttgctgttcattttcaacttccacccgtcgaagagttacacggattaccgcgtcgggaccgccttgcccggcaagttcaagatcgtcttggactccgacgccgccgagtatggtggacaccaacgcttggaccattccaccgacttcttcagtgaggctttcgaacataacggtcgcccgtactctttgttggtttatatcccctcgagagtggctctcattctccaaaacgtggacctacccaac

SEQ ID NO: 3509 - DNA, 2106 bp, Artificial Sequence
  derived and/or modified sequence
atggctgcacccatgactccagccgcccggcccgaggattacgaagctgctttgaatgcagctttggccgacgtgccggaactagcccggcttctcgagatcgacccatacctcaagccctacgccgttgattttcagcgccggtataagcagttctcccagattttgaaaaacattggagaaaacgagggaggaatagataaattcagtcgggggtacgaatccttcggtgtacatcgatgtgccgatggcgggctgtactgtaaggagtgggcgcctggcgcggagggagttttcctgacgggagacttcaacggttggaatccatttagctacccatacaaaaaactggattacggtaagtgggaactttacatcccccctaaacagaacaaaagtgtgttagttccacatgggagtaagcttaaggtggtcatcacatctaagtcaggcgagatcctatatcggatttctccatgggcgaaatacgtggttagagaaggcgacaacgttaactacgattggatccattgggacccagagcactcctatgagtttaagcattccagaccaaagaaacctcggtctctacggatatacgagtcccatgtggggattagctctcacgaaggaaaggtagcctcttacaagcattttacgtgtaacgtgcttccacgcatcaagggactcgggtacaattgtattcagttgatggctatcatggagcatgcctactacgccagttttgggtaccagatcacttctttctttgctgcgagcagtcgatacggaacacccgaagagctgcaggagctggtagacactgctcacagcatgggcatcatagtactcctcgatgttgttcacagtcacgcgagcaaaaatagcgccgatggcctcaacatgttcgatggcacagacagctgttattttcattcggggccgcgcgggacacacgatctctgggattcaaggctcttcgcctattcctcatgggagatccttagatttttactgagcaacattcgctggtggctcgaagagtaccgttttgatggctttagatttgatggtgtcacctctatgttgtatcaccatcacggcgtcggccaaggcttctcgggcgattattccgaatacttcggcttgcaggtcgacgaagacgctttgacctatttgatgttggcaaaccatcttgtgcacactttgtgtccagactcgattactatagcggaagatgtcagcgggatgcctgctctgtgttcgcctatatctcagggtgggggcggattcgattataggctggctatggctatccctgacaagtggatacagctgctaaaagagttcaaagacgaagactggaacatgggggacattgtgtacaccctgacgaataggcggtacctagagaagtgcattgcatatgcagaatcacatgatcaggctttagtgggggataagtccctggccttttggctgatggacgccgaaatgtatacgaatatgtcggtactgacacctttcactccagtgattgatcgtggcatacaactccacaagatgataaggttgattactcacgggctgggaggagaggggtatctgaatttcatggggaatgagttcggacatccagaatggctcgactttccgcggaaagggaataatgagtcctaccattacgctcgtagacagttccacctaactgacgatgatctgttgcgctacaaattcctcaacaactttgaccgtgatatgaatcgcctggaggagcggtatggatggctggcagccccccaggcatacgtgtcagagaaacacgaggggaataagataattgcattcgagcgtgccggtctgctcttcatttttaattttcatcccagcaagagttataccgactaccgcgtgggaaccgcactgcccggcaagtttaagatcgtccttgactcagacgccgctgaatacggagggcaccaacggctggatcactctactgattttttttccgaggcgttcgagcacaatgggaggccgtactctttgctcgtttatattccaagtcgcgtggctttaattctgcagaacgtcgatctgccaaac

SEQ ID NO: 3510 - DNA, 2106 bp, Artificial Sequence
  derived and/or modified sequence
atggccgcccctatgacccctgccgcccgccccgaggattatgaagctgcacttaatgctgctctggcagatgtccctgaactggctagactgctggagatcgacccctacctcaaaccttacgcagtggactttcagaggagatataagcagttttcacaaatactaaagaacataggggagaatgaagggggcatcgataaatttagcagggggtatgaatccttcggggtgcataggtgtgctgatggtggcctgtactgcaaggagtgggctccaggagccgagggggtatttctgaccggagacttcaacgggtggaaccctttctcctacccttataaaaaactggactatggcaagtgggaactctacattccacccaagcaaaacaaatcagttcttgtgccacacgggagcaagctcaaagtggtgatcacctccaaatctggcgaaatcttatataggatatcaccgtgggccaagtatgtcgtacgcgaaggagataacgtaaactacgactggatccactgggacccagaacatagctatgaattcaagcattcccgcccaaaaaagcccaggtcactgcggatttacgagtcacatgtcggcatctcaagccatgagggaaaagtggcatcttacaaacattttacctgcaacgtgctgccccggatcaagggtcttgggtacaactgcatacagcttatggcgataatggaacatgcctattatgcttctttcggctatcagatcaccagtttctttgcggcttcatcccggtatgggacccctgaagaacttcaggaactggtggatactgctcacagtatgggcatcatcgtgctgctcgacgtcgttcactcccacgccagtaagaactctgctgatggcttgaacatgtttgacgggactgattcatgttactttcacagcgggccccggggcacccacgatttgtgggacagtaggctctttgcgtatagctcatgggagatactgaggtttctgctaagcaacatccgctggtggctggaggagtataggtttgacggatttaggtttgacggcgtcacgagtatgttgtaccaccaccatggcgtggggcaaggtttctcgggagactatagcgaatactttgggctgcaagtagacgaggacgccctgacctacctgatgctggccaatcacctagtgcatacactgtgtccagattcaattaccatagccgaggacgtgagcggcatgccagctttgtgcagtccgatttcacagggcggaggtggctttgattaccgactagccatggctattcccgacaaatggatccagctcctcaaggagtttaaagacgaggactggaacatgggcgatattgtctacacactgaccaacagaaggtaccttgagaagtgtatcgcctacgccgaaagtcacgatcaggccctggtgggagacaaaagtctcgccttctggcttatggacgccgaaatgtatacgaacatgtctgttttgactcccttcacccccgtgattgaccggggcatccaactacacaaaatgattaggttaattacacatggattggggggggagggctacctgaatttcatggggaatgaattcgggcatccagagtggctcgatttccctagaaagggaaataatgagagctatcactatgctcgtaggcaatttcatctgacggacgatgatttgctccggtacaagtttctgaataatttcgaccgagacatgaaccgactggaagaacggtatggatggctggctgctccgcaagcctatgtgagcgagaagcacgaggggaacaaaattattgccttcgagcgcgcagggctactgttcatctttaattttcacccgtccaaatcatacacggattaccgggttgggactgccttgccaggaaagttcaagatcgtgcttgactccgatgccgctgaatacggcggccaccagcgattagaccattccacagattttttctccgaggctttcgaacataatggcagaccttatagtctacttgtatatattccttccagagtggcgcttatcttacaaaacgtggatttgcctaac

SEQ ID NO: 3511 - DNA, 2106 bp, Artificial Sequence
  derived and/or modified sequence
atggctgcgccaatgacacccgctgcccgacctgaggattatgaggctgccctcaacgctgcactcgccgacgtccccgaactggctagactgctagagatcgacccttaccttaagccatatgccgtcgatttccaacggagatacaagcagttcagtcagattctgaaaaacattggcgagaatgagggaggcatcgacaaattttcccggggttatgaatcttttggagtccatagatgtgcagatggcggactctactgtaaggagtgggcacccggcgcggagggcgtgttcctcactggggactttaatggatggaaccctttcagctatccttataaaaagctggattacgggaagtgggaactctatatcccaccaaagcaaaacaaatctgtacttgtgcctcatggctcaaagcttaaggttgtgattacgtccaagagcggtgaaattctgtatcgaatttccccttgggcgaagtatgtagtgcgagaaggggacaacgttaattatgactggatccactgggaccccgagcattcctacgaattcaaacattcacgcccaaagaaacctcggtcactccgaatctacgagagccacgtaggcatttcttcacacgagggtaaggtcgcaagctacaaacattttacttgtaacgtgctacctagaataaaaggactcggatacaattgcattcagttaatggctattatggagcacgcctattacgcttcctttggctaccagataacatctttcttcgccgcatcctcacggtatgggaccccagaagagctgcaggaactggtggatacagcccacagcatgggaatcatcgttctgttagatgtggtacactcacacgcttctaaaaattctgccgacggtctaaatatgttcgacgggaccgatagttgctattttcacagcggtccccgaggtacacacgacctgtgggactcaaggctatttgcctattcctcctgggagatactgcgattcctcctaagcaacatacggtggtggctcgaggaatatcgttttgatggcttccgttttgacggcgtcacaagcatgctatatcaccaccatggagttgggcagggcttcagtggagactactctgagtatttcgggctccaggtggatgaggacgccctgacctatctgatgctggccaaccacctcgtgcacaccctgtgtcccgacagcattaccatcgccgaggacgtctccggtatgcccgccctatgttccccgatctctcagggggggggtgggtttgattaccggctggcgatggccattccggataagtggattcaacttttaaaggaatttaaggatgaggactggaacatgggcgacatagtttataccctgaccaatcgaaggtatcttgagaagtgcattgcctatgctgagagccatgatcaggcattggtgggagataagagtttggccttctggcttatggatgcagaaatgtacacaaatatgtcagtccttactcccttcacgccggtcattgacaggggcatccagctgcacaagatgattcgcctcattactcacgggttaggaggagaaggttacctcaacttcatgggcaatgagtttggccatcctgagtggctcgattttccgagaaaaggaaataacgaaagttatcattatgcgaggaggcagttccatctgaccgacgacgacttgctccggtataagttcctcaataactttgaccgggatatgaataggctggaggagaggtacgggtggctcgctgcgccccaggcgtatgtgtcagagaagcatgaggggaataaaattatcgcatttgaacgggcaggcctgctgtttatttttaacttccacccaagcaagagctacactgattaccgggttgggactgcactgcccggtaagttcaagatagtcctcgactctgatgctgcagagtatggaggccatcagagactggaccatagcacggattttttttccgaggcctttgagcacaacgggagaccatactccctacttgtctacatcccttcacgggttgcgctcattttgcaaaacgttgatttacccaat

SEQ ID NO: 3512 - DNA, 2106 bp, Artificial Sequence
  derived and/or modified sequence
atggcagcaccgatgactcctgccgcgagacctgaagactacgaagcagcgctgaacgccgccctggcagatgtgcctgagctggcccggttgttggaaatagacccatatttgaagccctacgcagtcgattttcagagacgatacaaacagttctcccaaatcctgaagaacatcggggaaaacgaaggtggcatagataaattctctaggggttatgaaagcttcggcgtccatcgttgcgccgacggtggattgtactgcaaggaatgggctcctggagccgagggcgtgttcctgaccggggatttcaacggctggaatcccttcagctacccctacaagaaactggattatggtaagtgggagctatatattccacccaaacagaacaagagtgtgctcgtgcctcatggttctaagctcaaagtagtcatcactagcaagtcaggggaaatcctgtatcgtatcagcccctgggcgaaatacgtggttagggaaggcgataatgtcaattacgattggatccactgggaccccgagcatagctacgagtttaagcactctaggccgaagaagcctaggtccctccgcatttacgaatcacatgtgggcatttctagccacgaaggcaaggtcgcgtcatataaacatttcacatgcaatgttctgccacgaataaagggtctagggtacaactgtatccagttgatggccatcatggaacatgcttactatgcgtctttcgggtatcaaatcacaagcttctttgcggcatccagcagatacggaacgccagaagagctgcaggaacttgtcgacactgctcactcgatggggattatagtattacttgacgttgtgcactcacacgccagtaaaaacagtgcagatggcctgaatatgttcgatggtactgattcctgttacttccatagcggtcccagggggacccacgacctgtgggatagccgtctgtttgcttatagctcttgggagattctgagatttctgttaagtaacatccgctggtggctagaggagtacagatttgatggtttccgtttcgacggggtgacgagtatgctttatcaccatcatggggtgggccagggcttcagcggagactatagcgagtattttggacttcaggttgatgaagacgccctcacttatctcatgcttgccaaccatcttgtgcacactctgtgtccagattccattactatcgcagaggatgtctctggaatgcccgcactatgcagccccattagtcagggggggggtgggttcgactatagactggctatggccatacccgacaaatggatccagctgctgaaggaattcaaagatgaagactggaatatgggcgatatcgtatacacgctgacaaatagacgctatctggagaagtgcatcgcctacgcggaaagccatgatcaggcgctggtgggggacaaatctctggccttttggctgatggacgcagaaatgtatacaaacatgagtgtcctcacacccttcactcccgtcatagatagaggaattcagctgcacaaaatgattagattgatcacgcatggtttaggtggcgagggctacctgaatttcatgggcaacgagtttggccacccagagtggctggacttcccacgtaaagggaataacgaatcataccactacgccaggagacagttccatcttacagatgatgacctgctgagatataagttcctgaacaattttgatcgcgacatgaatcggctcgaggagagatacggttggctggcggctccccaagcttacgtgtcggagaaacacgaaggcaacaaaattatagcatttgagcgagccgggcttctgttcatcttcaacttccatcccagtaaaagctacacagattacagggtaggaactgctctgcccggaaagttcaaaatcgtcctagatagtgatgcagctgaatatgggggtcatcaaaggctggatcattccacagatttcttctcagaggcgtttgaacacaatgggaggccctacagcctccttgtttatatcccttctagagtggcacttatcctgcaaaatgtggatttgccaaac

SEQ ID NO: 3513 - DNA, 2106 bp, Artificial Sequence
  derived and/or modified sequence
atggcagctccaatgaccccagccgcccgccccgaggactatgaagcggccctcaacgctgctcttgcagatgtcccagaattggcccggcttttggaaattgatccttacctcaagccctatgccgttgactttcagagaagatataaacagtttagccagattctgaagaatatcggtgaaaatgagggcggcattgacaagttttctcgtggctacgagtcttttggagttcaccgctgtgcagacggcggcttgtattgcaaagaatgggcacccggggctgaaggcgtcttcctcacaggcgactttaatggctggaacccatttagctatccatataaaaagcttgactacgggaagtgggaactatacatcccacctaagcaaaacaagagcgtcctggtgccccacgggagtaaattgaaggtggtaatcacatcaaagtctggggagatcctttaccggatcagtccttgggccaagtacgtcgttcgagagggagacaacgtgaactacgattggatccactgggaccccgaacactcatacgaattcaaacacagcagaccaaaaaagccacggtctctgcggatttatgagtcccacgtgggaattagtagccacgaagggaaggtggcttcctataagcacttcacctgtaatgtcctaccacgcatcaaggggctcggatacaattgtatccagctcatggcaataatggagcacgcttactacgcctcatttggttaccagataactagtttctttgctgcttcttccaggtatggcacaccagaggaactccaggaactggtggatactgcccatagcatgggtatcattgttctgctggacgtcgtccacagccacgcatcaaagaactccgcagacgggctgaatatgttcgatggcactgattcatgctattttcatagcggtccacgaggtacccacgatctctgggatagccgattgttcgcatatagctcttgggagatactgaggtttttattgtccaatatccgttggtggctggaagagtatcgtttcgacggcttccgctttgatggagtgaccagcatgttgtatcatcatcatggcgtcggccagggctttagtggagattatagcgagtatttcgggctccaagtggatgaagacgccttgacctatctgatgttggccaatcacctcgtacacactctgtgtccggacagcattaccattgctgaggatgtaagcggtatgccagctctgtgttcccctatcagccagggggggggaggatttgactacaggctcgcaatggctatccccgataagtggatccaactactaaaagaattcaaggatgaagactggaacatgggtgatattgtgtacactctgactaacaggcggtatttggagaagtgtatcgcttacgcggagtcccatgaccaggcgttggttggagataaatcgctcgccttctggctgatggacgccgaaatgtacaccaatatgtccgtgcttacaccctttactcccgtgatcgatagaggaatccagctgcataaaatgatcaggctgataactcatgggttgggcggcgagggttacctgaacttcatgggaaatgagttcggacatccagagtggctcgacttcccccggaagggcaacaatgaatcctatcactatgcccggagacaattccacttgacggacgatgacctcttgcgctataaatttctgaataacttcgatcgggatatgaatcgactcgaggagcgatatggttggctagcagctccgcaggcgtatgtttcggagaagcatgaagggaataagataattgcatttgagcgggccggtctgctgtttatattcaatttccacccatcaaaatcgtacacagactacagggttggcaccgccttaccaggcaaatttaagatcgtgctggattctgacgctgccgagtatgggggccaccaaagactcgaccattccactgattttttctcggaggcgttcgagcataatggcaggccatatagcttgttggtgtatattcctagccgggtcgctctaatcctgcagaacgtggacctgccaaac

SEQ ID NO: 3514 - DNA, 2106 bp, Artificial Sequence
  derived and/or modified sequence
atggctgctcccatgacaccagcagccaggcctgaggattatgaagcggccttgaatgcggcactggctgacgttcctgaactcgcccggctacttgagatcgacccgtacctgaaaccgtacgctgtggactttcagaggagatataagcagttctcccagatcttaaagaacatcggagaaaacgagggtggaattgacaagttttcacgcggctacgagtcctttggggtccatcggtgtgctgacggcggtctgtactgcaaagaatgggccccaggcgctgagggtgtgtttctgacgggcgattttaacgggtggaacccattctcatatccatataagaaactcgactacggcaaatgggaactgtacatacctcctaaacagaacaagagtgtgttggttccacatggttctaagcttaaagtggtgattacatccaagtctggagagatcttgtaccgcatttcgccttgggccaagtacgtcgtccgtgaaggcgataacgtgaactacgactggatccactgggacccggaacattcttacgaattcaagcattctagaccgaagaaacctagatccctgcgcatatacgagtctcacgtgggtatcagtagccacgagggcaaagtggctagttacaagcacttcacctgtaacgtgctccctcgcatcaaaggcctgggctacaattgtatccaactcatggctatcatggagcatgcctactatgcctccttcggctatcaaatcaccagctttttcgctgcgtcaagtcgctatggtaccccggaagagctacaagagcttgtagacacagcacacagtatgggcatcattgtccttcttgacgttgtgcattcgcatgcatctaaaaactcagcggatggactgaacatgttcgatggaaccgattcctgttactttcactccggtccgcgcggaacgcatgacctctgggatagtcgcctcttcgcctacagttcttgggagatcttgcgcttccttctgtcaaatattcgctggtggcttgaggaataccgatttgacgggtttaggtttgatggcgttaccagcatgctttatcaccaccacggcgtggggcagggctttagcggcgattacagtgagtacttcggactccaggtggatgaggacgccctaacttacctgatgctagccaaccatcttgtgcacaccttgtgcccagactccataactattgctgaggatgtaagtggcatgccagccctatgcagccccatctcccagggaggcggcggattcgactaccgcttggctatggctatccccgacaaatggattcagttattgaaggagttcaaagatgaggattggaatatgggagacatcgtgtacacactgaccaatcggcggtatctggagaagtgcattgcatatgcagaatcccacgaccaggcattggtgggcgacaagtcgttggcattttggttgatggatgccgagatgtataccaacatgtccgtcctcacgcccttcacacctgtcatcgataggggcatccagctgcataagatgatcaggctcatcacccacggtttgggtggcgaaggttatctcaattttatggggaatgaatttgggcatcctgagtggctggactttcctcggaagggcaataacgaatcataccactacgcccggcgacagtttcatttgactgatgacgacttgctcagatataaatttcttaacaactttgaccgggatatgaatagactggaggagcgatatggctggttagcagcgcctcaggcctatgtctccgagaaacatgaaggtaacaaaattatagccttcgagcgcgctggcttgttgtttatctttaacttccacccgtccaagtcgtacaccgactaccgagtcggtaccgcactacctggaaagtttaaaatagtcctggactcggacgccgccgaatacgggggacaccagcgactggatcattcaaccgatttctttagtgaggcatttgaacacaacgggagaccctactctctactggtctatattcccagtagggtcgccctaattttacaaaatgtggatctgcccaac

SEQ ID NO: 3515 - DNA, 2106 bp, Artificial Sequence
  derived and/or modified sequence
atggctgctccaatgacacctgcagcaagaccagaagattatgaagctgctcttaatgctgcccttgctgatgtaccagaattagctagacttcttgaaattgatccttatttaaaaccatatgctgtagactttcaaagaagatataaacaattttctcaaattttaaaaaatataggagaaaatgaaggtggaatagataaattctcaagaggttatgaaagtttcggagtacacagatgtgcagatggaggtttatattgtaaagaatgggcacctggtgctgaaggagtttttttaacaggagattttaatggatggaatccattttcatatccatataaaaagcttgattatggaaaatgggaattatacattccaccaaagcaaaacaaatcagttttggttccacatgggtctaaattaaaggtagtaataacttctaaatcaggtgaaatattatatcgtattagtccttgggcaaaatatgttgtaagagaaggagataatgttaattatgattggattcattgggatccagaacatagttatgaatttaaacattcaagacctaaaaagccaagatctcttagaatatatgaaagtcacgttggaattagttctcatgaaggaaaagttgcttcatataagcatttcacatgtaatgttttaccaagaattaaaggtcttggatataattgtatacaattaatggccattatggaacatgcttattatgcttcttttggatatcaaattactagtttttttgcagcttcatcaagatatggaactccagaagaacttcaagaattggttgatacggctcactcaatgggaatcattgttttattagatgttgtccattcacatgcaagtaaaaattcggcagatggattaaatatgtttgatggaacagactcttgttatttccatagtggacctagagggactcatgatttgtgggactcaagacttttcgcttatagtagttgggaaattcttagatttcttctttctaatattagatggtggttagaagaatatagatttgatggatttagatttgatggagtaacttctatgctttatcaccatcatggagttggacaaggattttcaggagattattccgaatattttgggttacaagttgacgaagacgcattaacatatttgatgttggctaatcatttagttcatactttatgtcctgactctataacaattgctgaagacgtatcagggatgcctgcattatgttcaccaatttcacaaggagggggtggatttgattatagattagcaatggccattccagataaatggattcaattgttaaaggaatttaaggatgaagattggaatatgggagatattgtatatacattgactaatagaagatatttagaaaaatgtatagcatatgcagaaagtcatgatcaagctcttgttggagataaatcattagcattttggcttatggatgctgaaatgtacactaatatgagtgttcttacaccatttacaccagttattgatagaggaattcaattacataaaatgattagacttattactcatggattgggtggagaaggatatcttaatttcatgggaaatgaattcggacatcctgaatggttggatttcccacgaaaaggaaataatgaatcatatcattatgctagaagacaatttcatttaactgatgacgatttattaagatataaattcttaaataacttcgatagagatatgaatagattagaagaaagatatggatggttagctgctcctcaagcttatgtatctgaaaaacatgaaggaaataagattattgctttcgaacgtgcaggattattatttatattcaattttcatccaagtaaatcatacacagattatagagttggaacagcattaccaggaaaatttaagatagttctagattctgatgcagcagaatatggaggacatcaaagacttgatcattcaacagattttttttctgaagcatttgaacacaatggtagaccatattcacttttagtttatattccaagtcgtgtcgctcttatacttcaaaatgtagacttaccaaat

SEQ ID NO: 3516 - DNA, 2106 bp, Artificial Sequence
  derived and/or modified sequence
atggctgctcccatgacaccggcggctagacccgaggactatgaggcggccttaaatgctgcactggctgacgtgcctgaacttgcccgtttgctggaaatagatccttatcttaagccttacgctgttgacttccaacgccgatacaagcagttctctcaaattctgaagaacattggagagaacgagggcggtatagacaagttttctagaggatatgagtcatttggggtacacaggtgcgcagacggaggcctgtattgcaaagagtgggcacccggcgccgagggggtgttcttgaccggcgatttcaatggttggaacccattttcctacccctataagaaattggattatggaaagtgggaattgtacatccctccaaaacagaataagtccgttcttgtcccacatggatcaaagttaaaggtggtgatcacaagtaaaagtggggagatactgtatcggatcagtccatgggctaaatacgtggtacgagaaggcgacaatgtaaattacgactggattcactgggatcctgagcatagctacgaattcaagcattcgaggcccaagaaacccaggtctctccggatctacgagagtcacgtgggtatcagcagccacgaaggcaaggtagcctcttacaaacacttcacttgcaacgtgctaccacgtataaagggcctcgggtacaactgcatccagctgatggctattatggaacatgcctactatgccagctttgggtaccagatcactagctttttcgccgccagttcccgctacggaactccggaggaacttcaggagttagtcgacactgcacactccatgggcatcattgtcctcctggacgtagttcactctcacgcctctaagaatagtgccgatggtctgaacatgttcgacgggacagactcttgctattttcatagtggtcctagaggcacgcatgatctttgggactcccgtttgtttgcttattcttcatgggaaatattacgttttctactaagtaacatacgctggtggctggaggagtacagattcgatggattcaggtttgatggcgtcacatcgatgctgtatcaccaccacggtgtcggccaaggattttccggagattattccgagtacttcgggctgcaggtagacgaggatgcacttacctacctgatgctggctaaccatctcgtacatacactttgcccggatagtatcactattgcagaggacgtgtcaggtatgcctgctctatgttcgcctatcagtcagggaggagggggcttcgactatcgcttagccatggccattcctgacaaatggatccagctgctcaaagagtttaaagatgaagattggaatatgggtgacatcgtgtacactctgacaaaccgacggtacctagagaagtgtatcgcatacgcggaatcccacgaccaagctctggtgggcgacaaatcgctggcattttggctgatggatgcggagatgtacaccaatatgtcggtgctcaccccatttacccctgtcatcgatagggggatccagctgcataaaatgatccgcttgatcacccacggcctgggaggggaggggtatttaaattttatgggcaacgaattcgggcatcctgaatggcttgacttccctcgcaagggaaataacgaaagctaccattacgcgaggcgacaattccatcttactgacgatgacttgctgcgctacaagttccttaacaattttgatcgcgacatgaatcgtctggaggaaagatatgggtggttagctgcgccacaggcttatgtgagtgagaaacacgaggggaataagatcatcgctttcgagagagctggtttgctgtttatcttcaatttccacccatccaagagctacacagactacagggttggcaccgccctaccaggcaaatttaaaatcgtccttgacagcgatgcagccgaatatgggggacatcaaaggctggaccactcaacggacttttttagcgaggcgttcgagcacaatggccgcccatacagccttcttgtgtacattcctagccgggtagcccttattctgcaaaacgtcgatctcccaaac

SEQ ID NO: 3517 - DNA, 2106 bp, Artificial Sequence
  derived and/or modified sequence
atggccgcccccatgactcccgcagcccgaccagaagactacgaagccgcacttaacgccgctcttgccgatgtccccgaattggctcgcctcctagaaatagacccatatctaaaaccttatgccgtggatttccagcggaggtacaagcagttctcccagatactaaaaaacattggagagaacgaaggggggatcgataaattttcgagagggtatgaatcattcggggtgcatagatgtgcggatggaggattgtactgtaaggagtgggctcccggagccgagggggtatttctgactggggatttcaacgggtggaatccattctcttatccttataaaaaactagattatgggaaatgggaactatatataccacccaagcagaacaaatcagtcctcgtacctcatggatcaaaactcaaggtggttataacaagtaaatctggagagattctctatcgaatctccccatgggcaaagtatgttgtcagggagggagataacgtaaactatgattggattcattgggatcccgaacactcctatgagttcaaacactcgagacccaaaaaaccacggtccctcaggatctatgaatcacatgtgggaatttcctcccatgaaggaaaagtggcatcttacaaacattttacatgtaatgttctgccccggatcaaagggctcggatataattgcatccagttgatggcaattatggaacatgcatattatgcttctttcgggtatcagatcacatctttctttgctgcctcctctcggtatgggactcccgaggaacttcaggagctggtagatactgcccattctatggggatcattgttctgctcgacgttgtgcactcacatgcctctaaaaattccgccgacggactcaatatgttcgatgggacagattcatgctacttccactcggggccaaggggaacgcacgatctgtgggattctcggctttttgcctattcatcttgggagatcctccggttcctgctctctaatatcaggtggtggctcgaagagtatcgattcgatgggtttcggttcgatggggtaactagtatgttataccaccatcacggggtggggcaggggttcagtggagactattcggaatactttggattgcaagtagacgaggatgctctcacatatctgatgttagcaaatcacctagtacatacactctgtccagattctatcacaatagcggaagatgtgtccggaatgccagctctatgttcccccatttctcagggagggggagggtttgattataggctggctatggccataccagataaatggattcagctactaaaagaattcaaagacgaagattggaatatgggggatatcgtttatactctcacaaaccggaggtatttggaaaaatgtatagcctatgctgagtcccacgatcaggcactggtgggggataagtccctggctttctggttaatggacgccgaaatgtatactaatatgtcagtgcttactccgttcacacccgtaattgataggggaatccagttacacaaaatgataaggctgataacacacgggctaggaggagaaggatatctcaacttcatgggaaacgaatttggacaccccgaatggctcgatttcccccggaaagggaacaatgaatcctatcattatgcacggcgacagtttcatctcacggatgatgatctacttcgatataaattcctgaataatttcgatcgggatatgaacaggcttgaagagagatacgggtggttggctgcccctcaggcttatgtctctgaaaaacatgaagggaacaaaatcatcgccttcgaaagagccgggctactctttatctttaacttccatcccagtaaatcatatacagactatagggtggggactgcactgcccgggaaattcaagatagtgctcgattctgacgccgcggagtacggaggacaccagagactggatcattctactgatttcttctccgaagcttttgaacacaacggacgaccctatagtttgctggtgtatatcccttctagggtagctctcatcctgcaaaacgtagatctccccaat

SEQ ID NO: 3518 - DNA, 2106 bp, Artificial Sequence
  derived and/or modified sequence
atggcagcacctatgacaccagccgcaagaccggaagattacgaagctgctcttaatgctgctttggctgatgtgccagagcttgcacgtcttcttgaaattgatccttatcttaaaccgtatgccgtcgacttccaacggcgttataaacaattttcgcagatcttgaaaaacataggagaaaacgagggaggcatagataaattctcgcgtggatatgagtcattcggagtccatagatgtgcggatggaggattatattgcaaagaatgggcacctggagctgagggggtgttcttaactggcgacttcaatggatggaatcctttctcatatccatacaaaaagttggattacgggaaatgggaattgtatattcctccaaagcaaaacaaatctgtcctcgtcccacatggatctaagttgaaagttgtgattacctcaaaaagcggagagatattgtacagaatctctccctgggcaaagtatgttgttagggagggtgataatgttaattatgattggattcactgggaccctgagcattcatatgagttcaagcattctcgaccaaagaaaccaagaagtttgcgaatctatgaaagtcatgtcggaatctcttctcacgaggggaaagtagcctcatataaacattttacttgcaacgttttgccgagaattaaaggattaggatataattgcatccaactaatggctataatggaacacgcgtactacgcatctttcggatatcaaattacaagttttttcgcagctagctcgagatatggaaccccagaagagttgcaagaattagttgatacggcacatagtatgggaattatcgtacttctcgatgtggtgcatagccatgcatctaagaatagcgccgacggacttaacatgttcgacggtaccgattcgtgttacttccatagcggaccaagaggtactcacgatctttgggattctcgtttgtttgcttactcgtcatgggagattcttcgatttctgctgtcgaacattcgatggtggctcgaggagtatagattcgatggatttagattcgacggagttacttcaatgctctatcaccaccatggtgtcggacaaggattctctggtgactacagtgaatactttggtttgcaagttgatgaagatgctttaacatacctgatgttggctaatcacttggttcacacactttgcccagatagtattaccatagccgaagatgtttcaggaatgccggctttatgcagtcctataagccaaggaggaggtggttttgattacagacttgctatggctatcccagataaatggattcaattgttgaaagaatttaaagatgaggattggaatatgggagacattgtatacacactcacgaaccggcgttacttggaaaaatgcattgcatatgccgagtctcacgatcaagctttggtaggagataaatcattagcattctggttgatggatgcagagatgtataccaacatgtcggttttgactccgttcacaccggttatcgatagagggattcagctccataaaatgatccgactcatcacacacggtcttggaggagaaggatatctcaatttcatgggaaacgaatttggacatccagaatggctagattttccacgaaagggaaataatgaatcctaccattacgcccgtcgacaattccaccttaccgatgatgatcttttacgatataaattccttaataacttcgatcgggatatgaacaggctggaggaacgatatggatggctcgcggctccacaagcgtatgtatccgagaaacacgaaggaaacaaaatcatcgcatttgaacgcgcaggccttctcttcatattcaactttcacccatcaaagtcatacacggactaccgcgttggtactgcactgccaggcaaatttaagattgtattggattccgatgcagcagagtatggaggacatcagcgacttgatcattccacggatttctttagcgaggcttttgagcataatggccgaccatatagtttgcttgtatacatcccgtctcgtgttgctcttatactgcagaacgtagatcttcctaat

SEQ ID NO: 3519 - DNA, 2106 bp, Artificial Sequence
  derived and/or modified sequence
atggccgcccccatgacccccgccgcccgccccgaggactacgaggccgccctgaacgccgccctggccgacgtgcccgagctggcccgcctgctggagatcgacccctacctgaagccctacgccgtggacttccagcgccgctacaagcagttcagccagatcctgaagaacatcggcgagaacgagggcggcatcgacaagttcagccgcggctacgagagcttcggcgtgcaccgctgcgccgacggcggcctgtactgcaaggagtgggcccccggcgccgagggcgtgttcctgaccggcgacttcaacggctggaaccccttcagctacccctacaagaagctggactacggcaagtgggagctgtacatcccccccaagcagaacaagagcgtgctggtgccccacggcagcaagctgaaggtggtgatcaccagcaagagcggcgagatcctgtaccgcatcagcccctgggccaagtacgtggtgcgcgagggcgacaacgtgaactacgactggatccactgggaccccgagcacagctacgagttcaagcacagccgccccaagaagccccgcagcctgcgcatctacgagagccacgtgggcatcagcagccacgagggcaaggtggccagctacaagcacttcacctgcaacgtgctgccccgcatcaagggcctgggctacaactgcatccagctgatggccatcatggagcacgcctactacgccagcttcggctaccagatcaccagcttcttcgccgccagcagccgctacggcacccccgaggagctgcaggagctggtggacaccgcccacagcatgggcatcatcgtgctgctggacgtggtgcacagccacgccagcaagaacagcgccgacggcctgaacatgttcgacggcaccgacagctgctacttccacagcggcccccgcggcacccacgacctgtgggacagccgcctgttcgcctacagcagctgggagatcctgcgcttcctgctgagcaacatccgctggtggctggaggagtaccgcttcgacggcttccgcttcgacggcgtgaccagcatgctgtaccaccaccacggcgtgggccagggcttcagcggcgactacagcgagtacttcggcctgcaggtggacgaggacgccctgacctacctgatgctggccaaccacctggtgcacaccctgtgccccgacagcatcaccatcgccgaggacgtgagcggcatgcccgccctgtgcagccccatcagccagggcggcggcggcttcgactaccgcctggccatggccatccccgacaagtggatccagctgctgaaggagttcaaggacgaggactggaacatgggcgacatcgtgtacaccctgaccaaccgccgctacctggagaagtgcatcgcctacgccgagagccacgaccaggccctggtgggcgacaagagcctggccttctggctgatggacgccgagatgtacaccaacatgagcgtgctgacccccttcacccccgtgatcgaccgcggcatccagctgcacaagatgatccgcctgatcacccacggcctgggcggcgagggctacctgaacttcatgggcaacgagttcggccaccccgagtggctggacttcccccgcaagggcaacaacgagagctaccactacgcccgccgccagttccacctgaccgacgacgacctgctgcgctacaagttcctgaacaacttcgaccgcgacatgaaccgcctggaggagcgctacggctggctggccgccccccaggcctacgtgagcgagaagcacgagggcaacaagatcatcgccttcgagcgcgccggcctgctgttcatcttcaacttccaccccagcaagagctacaccgactaccgcgtgggcaccgccctgcccggcaagttcaagatcgtgctggacagcgacgccgccgagtacggcggccaccagcgcctggaccacagcaccgacttcttcagcgaggccttcgagcacaacggccgcccctacagcctgctggtgtacatccccagccgcgtggccctgatcctgcagaacgtggacctgcccaac

SEQ ID NO: 3520 - DNA, 2262 bp, Artificial Sequence
  derived and/or modified sequence
agagcccccgacagaagaggcagccccagactggccagcaccagactgggcgccctgagactgagacccagcagaagagtgcccgccagagcccccgcccccgcccaggcccccctgcccctgggccccagactgctgggcctgagaagaaacatggccgcccccatgacccccgccgccagacccgaggactacgaggccgccctgaacgccgccctggccgacgtgcccgagctggccagactgctggagatcgacccctacctgaagccctacgccgtggacttccagagaagatacaagcagttcagccagatcctgaagaacatcggcgagaacgagggcggcatcgacaagttcagcagaggctacgagagcttcggcgtgcacagatgcgccgacggcggcctgtactgcaaggagtgggcccccggcgccgagggcgtgttcctgaccggcgacttcaacggctggaaccccttcagctacccctacaagaagctggactacggcaagtgggagctgtacatcccccccaagcagaacaagagcgtgctggtgccccacggcagcaagctgaaggtggtgatcaccagcaagagcggcgagatcctgtacagaatcagcccctgggccaagtacgtggtgagagagggcgacaacgtgaactacgactggatccactgggaccccgagcacagctacgagttcaagcacagcagacccaagaagcccagaagcctgagaatctacgagagccacgtgggcatcagcagccacgagggcaaggtggccagctacaagcacttcacctgcaacgtgctgcccagaatcaagggcctgggctacaactgcatccagctgatggccatcatggagcacgcctactacgccagcttcggctaccagatcaccagcttcttcgccgccagcagcagatacggcacccccgaggagctgcaggagctggtggacaccgcccacagcatgggcatcatcgtgctgctggacgtggtgcacagccacgccagcaagaacagcgccgacggcctgaacatgttcgacggcaccgacagctgctacttccacagcggccccagaggcacccacgacctgtgggacagcagactgttcgcctacagcagctgggagatcctgagattcctgctgagcaacatcagatggtggctggaggagtacagattcgacggcttcagattcgacggcgtgaccagcatgctgtaccaccaccacggcgtgggccagggcttcagcggcgactacagcgagtacttcggcctgcaggtggacgaggacgccctgacctacctgatgctggccaaccacctggtgcacaccctgtgccccgacagcatcaccatcgccgaggacgtgagcggcatgcccgccctgtgcagccccatcagccagggcggcggcggcttcgactacagactggccatggccatccccgacaagtggatccagctgctgaaggagttcaaggacgaggactggaacatgggcgacatcgtgtacaccctgaccaacagaagatacctggagaagtgcatcgcctacgccgagagccacgaccaggccctggtgggcgacaagagcctggccttctggctgatggacgccgagatgtacaccaacatgagcgtgctgacccccttcacccccgtgatcgacagaggcatccagctgcacaagatgatcagactgatcacccacggcctgggcggcgagggctacctgaacttcatgggcaacgagttcggccaccccgagtggctggacttccccagaaagggcaacaacgagagctaccactacgccagaagacagttccacctgaccgacgacgacctgctgagatacaagttcctgaacaacttcgacagagacatgaacagactggaggagagatacggctggctggccgccccccaggcctacgtgagcgagaagcacgagggcaacaagatcatcgccttcgagagagccggcctgctgttcatcttcaacttccaccccagcaagagctacaccgactacagagtgggcaccgccctgcccggcaagttcaagatcgtgctggacagcgacgccgccgagtacggcggccaccagagactggaccacagcaccgacttcttcagcgaggccttcgagcacaacggcagaccctacagcctgctggtgtacatccccagcagagtggccctgatcctgcagaacgtggacctgcccaactag

SEQ ID NO: 3521 - DNA, 2109 bp, Artificial Sequence
  derived and/or modified sequence
atggccgcccccatgacccccgccgccagacccgaggactacgaggccgccctgaacgccgccctggccgacgtgcccgagctggccagactgctggagatcgacccctacctgaagccctacgccgtggacttccagagaagatacaagcagttcagccagatcctgaagaacatcggcgagaacgagggcggcatcgacaagttcagcagaggctacgagagcttcggcgtgcacagatgcgccgacggcggcctgtactgcaaggagtgggcccccggcgccgagggcgtgttcctgaccggcgacttcaacggctggaaccccttcagctacccctacaagaagctggactacggcaagtgggagctgtacatcccccccaagcagaacaagagcgtgctggtgccccacggcagcaagctgaaggtggtgatcaccagcaagagcggcgagatcctgtacagaatcagcccctgggccaagtacgtggtgagagagggcgacaacgtgaactacgactggatccactgggaccccgagcacagctacgagttcaagcacagcagacccaagaagcccagaagcctgagaatctacgagagccacgtgggcatcagcagccacgagggcaaggtggccagctacaagcacttcacctgcaacgtgctgcccagaatcaagggcctgggctacaactgcatccagctgatggccatcatggagcacgcctactacgccagcttcggctaccagatcaccagcttcttcgccgccagcagcagatacggcacccccgaggagctgcaggagctggtggacaccgcccacagcatgggcatcatcgtgctgctggacgtggtgcacagccacgccagcaagaacagcgccgacggcctgaacatgttcgacggcaccgacagctgctacttccacagcggccccagaggcacccacgacctgtgggacagcagactgttcgcctacagcagctgggagatcctgagattcctgctgagcaacatcagatggtggctggaggagtacagattcgacggcttcagattcgacggcgtgaccagcatgctgtaccaccaccacggcgtgggccagggcttcagcggcgactacagcgagtacttcggcctgcaggtggacgaggacgccctgacctacctgatgctggccaaccacctggtgcacaccctgtgccccgacagcatcaccatcgccgaggacgtgagcggcatgcccgccctgtgcagccccatcagccagggcggcggcggcttcgactacagactggccatggccatccccgacaagtggatccagctgctgaaggagttcaaggacgaggactggaacatgggcgacatcgtgtacaccctgaccaacagaagatacctggagaagtgcatcgcctacgccgagagccacgaccaggccctggtgggcgacaagagcctggccttctggctgatggacgccgagatgtacaccaacatgagcgtgctgacccccttcacccccgtgatcgacagaggcatccagctgcacaagatgatcagactgatcacccacggcctgggcggcgagggctacctgaacttcatgggcaacgagttcggccaccccgagtggctggacttccccagaaagggcaacaacgagagctaccactacgccagaagacagttccacctgaccgacgacgacctgctgagatacaagttcctgaacaacttcgacagagacatgaacagactggaggagagatacggctggctggccgccccccaggcctacgtgagcgagaagcacgagggcaacaagatcatcgccttcgagagagccggcctgctgttcatcttcaacttccaccccagcaagagctacaccgactacagagtgggcaccgccctgcccggcaagttcaagatcgtgctggacagcgacgccgccgagtacggcggccaccagagactggaccacagcaccgacttcttcagcgaggccttcgagcacaacggcagaccctacagcctgctggtgtacatccccagcagagtggccctgatcctgcagaacgtggacctgcccaactag

SEQ ID NO: 3522 - DNA, 1398 bp, Artificial Sequence
  derived and/or modified sequence
atggccatcatggagcacgcctactacgccagcttcggctaccagatcaccagcttcttcgccgccagcagcagatacggcacccccgaggagctgcaggagctggtggacaccgcccacagcatgggcatcatcgtgctgctggacgtggtgcacagccacgccagcaagaacagcgccgacggcctgaacatgttcgacggcaccgacagctgctacttccacagcggccccagaggcacccacgacctgtgggacagcagactgttcgcctacagcagctgggagatcctgagattcctgctgagcaacatcagatggtggctggaggagtacagattcgacggcttcagattcgacggcgtgaccagcatgctgtaccaccaccacggcgtgggccagggcttcagcggcgactacagcgagtacttcggcctgcaggtggacgaggacgccctgacctacctgatgctggccaaccacctggtgcacaccctgtgccccgacagcatcaccatcgccgaggacgtgagcggcatgcccgccctgtgcagccccatcagccagggcggcggcggcttcgactacagactggccatggccatccccgacaagtggatccagctgctgaaggagttcaaggacgaggactggaacatgggcgacatcgtgtacaccctgaccaacagaagatacctggagaagtgcatcgcctacgccgagagccacgaccaggccctggtgggcgacaagagcctggccttctggctgatggacgccgagatgtacaccaacatgagcgtgctgacccccttcacccccgtgatcgacagaggcatccagctgcacaagatgatcagactgatcacccacggcctgggcggcgagggctacctgaacttcatgggcaacgagttcggccaccccgagtggctggacttccccagaaagggcaacaacgagagctaccactacgccagaagacagttccacctgaccgacgacgacctgctgagatacaagttcctgaacaacttcgacagagacatgaacagactggaggagagatacggctggctggccgccccccaggcctacgtgagcgagaagcacgagggcaacaagatcatcgccttcgagagagccggcctgctgttcatcttcaacttccaccccagcaagagctacaccgactacagagtgggcaccgccctgcccggcaagttcaagatcgtgctggacagcgacgccgccgagtacggcggccaccagagactggaccacagcaccgacttcttcagcgaggccttcgagcacaacggcagaccctacagcctgctggtgtacatccccagcagagtggccctgatcctgcagaacgtggacctgcccaactag

SEQ ID NO: 3523 - DNA, 2252 bp, Artificial Sequence
  derived and/or modified sequence
gggaaataagagagaaaagaagagtaagaagaaatataagagccaccatggctgcgcccatgactcccgcagcaagaccggaggactacgaggcagcattgaatgccgccctcgcagacgtgcccgagcttgcaaggttgctggaaattgatccctatctcaagccctacgccgtcgattttcagcgccggtacaagcagttctcccaaattctcaagaacattggcgagaacgaaggaggtatcgacaagttttcacggggttatgagtcgttcggggtccaccggtgcgccgacggagggctgtattgtaaggagtgggcgcctggggcggaaggggtgtttcttacgggagatttcaatggatggaatcccttctcatacccgtacaagaaattggactacggaaagtgggagttgtatattccaccgaagcagaacaaatcagtgcttgtgcctcatggatccaaacttaaagtcgtgattacatcgaaaagcggggagatcctctaccgcatctcaccgtgggcgaaatatgtagtcagggaaggggataacgtcaactacgattggatccactgggaccccgagcattcatacgaattcaaacactcaaggccgaagaagccccgatcgctccggatctacgaaagccacgtgggaatttcctcacatgaaggaaaggtggcctcgtacaaacactttacgtgcaatgtccttcctcgaatcaaaggtctgggatacaattgcatccagcttatggcgattatggagcatgcctattatgcgtcctttggctaccagatcacctcgttcttcgcggcgagctcacgatatggaactccagaggagttgcaagaattggtagacaccgcccactcaatgggtatcattgtccttcttgacgtggtgcacagccatgccagcaagaactcggcggatggcctcaacatgttcgacgggacagactcatgctacttccacagcgggcctaggggtactcatgatctctgggactcgcgcctttttgcgtactcgagctgggaaatcctccgctttctgctgtcgaatatcaggtggtggctggaggagtatcggttcgatggtttccgctttgatggagtcacgagcatgctttaccatcatcacggggtgggccagggattctcgggcgactattcggaatacttcgggcttcaagtagacgaggatgcgttgacctacctcatgctcgccaatcacttggtccacacgttgtgtcctgattcgatcacaatcgccgaggacgtgtcggggatgccagcgctctgttccccgatctcgcaaggtggaggcgggttcgattatcgcctggcgatggcaattcccgacaagtggattcaacttctcaaagagtttaaggatgaggattggaatatgggagacattgtgtacacgctgacgaatcgccggtatcttgagaaatgcatcgcgtatgctgagtcgcacgaccaggcgttggtcggggataagtccctcgcattttggctcatggacgcagaaatgtatacaaatatgtcggtattgactcccttcacacccgtgatcgatcgagggattcagctccacaaaatgatcagattgattacgcacggtttgggcggagaggggtatttgaacttcatgggaaacgaatttggtcatccagagtggctcgacttcccgcgcaaaggaaataacgagtcctaccactacgcaaggaggcagtttcatcttacggatgatgaccttctgagatataagtttcttaacaactttgacagggacatgaaccgcctcgaagagagatacggttggttggctgctcctcaagcatacgtatccgaaaagcacgaagggaataagatcatcgcattcgaacgggcaggactcctgtttatcttcaactttcacccgtcgaaatcatatacggactatcgagtcggaacagcgctgccgggcaaattcaagattgtactggattcagatgcggctgagtacggaggccatcagagacttgaccactccaccgacttcttctcggaagcgttcgagcacaacggaaggccgtactcacttctggtctatatcccctcgcgggtagcactcatcttgcaaaatgtagatctcccgaattgataagctgccttctgcggggcttgccttctggccatgcccttcttctctcccttgcacctgtacctcttggtctttgaataaagcctgagtaggaag

SEQ ID NO: 3524 - DNA, 2262 bp, Artificial Sequence
  derived and/or modified sequence
cgggcacccgaccgccggggaagcccacgcttggcatcgacccgactgggggcactacgcctgaggcccagtaggcgggtacctgctagagccccggcccctgctcaggctcccctgcccctaggaccgcggttattaggcctgcgaaggaacatggccgcccctatgacgccagccgcccggccagaggattacgaggccgccttaaatgcagctcttgcggacgtcccggaattggctcgcctgttggagattgacccttatctgaaaccctatgctgttgacttccagcgccggtataaacagttcagtcagattcttaaaaatattggcgagaacgaaggtgggatcgacaagttttctcgaggatatgagagcttcggtgttcaccgttgcgcagacggcgggctgtattgcaaggagtgggcaccaggagctgagggtgtttttctgactggggattttaacggatggaatccatttagttatccatataaaaaactggactacgggaagtgggaactgtacatacctcccaaacagaataaaagcgtgctggtgccacacggatccaagttaaaagtcgtgataacttctaagtcgggggaaattttgtacagaatttccccttgggcaaaatacgtggtgcgcgagggagacaacgtgaactatgattggatccactgggatcctgagcactcctacgagtttaaacacagccggcctaagaagccaagatccctgcggatctacgaatcgcacgtgggtatctcttcacatgaagggaaagtagcctcttacaagcattttacatgcaatgtcctcccacggataaagggcctgggatataattgtatccagctgatggccataatggagcatgcatattacgcttcattcggctatcagattactagtttctttgcagccagctcccgctacggaacccccgaagaactgcaggagttggttgacactgctcattccatgggtattatagtcctcctcgacgtggtgcacagccatgcttctaagaacagcgccgacggtctcaatatgttcgacgggactgactcttgctattttcatagcgggccccgaggtactcacgatctatgggactcacgtttgttcgcgtactcatcatgggagatcctgcgttttttgctgtctaacatccggtggtggctggaagagtaccgcttcgatggcttccggttcgatggcgtcacctctatgctttaccaccatcacggggtgggccagggcttctcaggcgattactcagagtattttggtctccaagtggatgaggatgctcttacatacttaatgcttgccaatcatttggtccacacactgtgtcccgatagcataacaattgcagaggacgttagtgggatgcctgccttgtgctcaccaattagtcagggcggcggaggctttgactatcggttagcgatggcgatccctgataaatggattcagctgctcaaggaatttaaggatgaagattggaacatgggcgacatcgtttacacgctcacaaaccggcgatatctcgaaaagtgcattgcctacgcagagtcacatgatcaggctttagtgggcgacaaaagcctcgccttctggctgatggatgcagaaatgtacaccaatatgagtgtactgaccccgttcacacccgtgatcgatcgcggaattcagctccataagatgataaggctgatcacccacggcttgggcggggagggctacctgaattttatgggaaacgagtttgggcatcccgaatggttagattttccacgaaagggaaacaatgagtcgtatcattacgcgcggcgccagttccatctcaccgatgatgatctattacgttacaagttccttaataacttcgaccgcgacatgaacaggctggaagaaaggtatgggtggctggcagctccacaagcttatgtctctgagaaacacgagggcaacaagattatagcattcgagcgagcaggcttgctattcatttttaactttcatccgtcgaagtcatatacagactatcgagtcggaaccgccctccccggcaagttcaaaatcgtgctggatagtgacgctgccgagtatggcggacatcaaaggctcgaccacagtaccgacttcttctccgaggccttcgaacataacggcagaccctatagcctcctcgtgtatatcccaagccgcgtcgcgttgattctgcagaatgttgacttgccaaattag

SEQ ID NO: 3525 - DNA, 2109 bp, Artificial Sequence
  derived and/or modified sequence
atggctgcccccatgacaccagctgcaagaccagaagattacgaggccgctctcaacgccgccctggcagacgtgcctgagctcgcacgactcctcgaaatcgatccctacctgaagccgtacgcagtcgacttccagcgaaggtacaaacagttttcacagatcctcaagaatattggcgagaatgaaggaggtatcgacaaattcagcagaggctatgagagcttcggcgtgcacagatgtgccgacggcggcctttactgcaaagaatgggcacctggtgcagagggcgtgttcctgactggggactttaacggatggaatcctttctcatacccgtataaaaagttggattatggcaaatgggagctgtacatccccccaaagcagaacaagtctgtgctcgtgccccatggatccaaacttaaagtagtgatcacatccaagagcggcgagattctgtatcgcattagcccttgggccaaatacgtggttcgtgagggtgacaatgtcaactatgattggatacactgggaccctgagcactcctatgagtttaaacactccagaccgaaaaagccacgatccctccggatttacgagagccacgtaggaatctcctcccatgagggcaaggtagcctcctacaaacacttcacatgcaatgtgctgcctcgtataaaggggcttggttacaattgcatacagttgatggcaataatggagcacgcatattacgccagtttcgggtatcagatcactagcttcttcgctgctagctctcgctatggcactcctgaagaactgcaggagctcgtggatactgctcacagtatgggtattatagtgttgctggacgtggttcacagtcacgccagcaaaaattctgccgatggtctgaacatgtttgatggaacggactcgtgctactttcattcaggcccacggggcacccacgatctgtgggattcacgactgtttgcctattccagctgggagatacttcgatttctgctcagtaatataagatggtggctggaagagtatagattcgacggcttcagatttgacggcgtaaccagcatgctctaccaccaccacggcgtggggcagggttttagcggggactattccgagtattttggtctgcaggtggacgaggacgccttaacgtatctgatgttggcgaatcaccttgtgcacacgctgtgcccagacagtatcaccattgcagaagatgtgtccgggatgcctgccttgtgttcccctatcagtcagggtgggggaggcttcgactacagactcgccatggccattcccgataagtggatccagttgctgaaggaattcaaggatgaagactggaacatgggcgacatcgtttatactttgaccaatcgtcgttatttggagaaatgcatagcctatgctgaatcacatgaccaagcactcgtcggcgacaaatcgttggcattctggctcatggatgccgaaatgtatacgaatatgagcgtccttaccccctttaccccagtgatcgaccgtggcattcaactccacaaaatgattcggcttatcacacatgggctcgggggagaaggctacctgaattttatgggaaacgagttcggacatcccgagtggctggattttcctaggaaggggaacaacgaaagttaccactatgcccgccggcagtttcacctgaccgacgatgatctgctgaggtataaattcctcaacaactttgaccgcgatatgaacagattagaggagcggtacggttggttggctgctccacaggcctacgtatctgagaagcacgagggcaacaagattatcgccttcgagcgcgccggcctcttattcatcttcaactttcatccatctaagagctatacggattaccgcgtcggtacggccctccccggtaagtttaagatcgtgttagatagtgacgcagccgagtatggggggcatcagcgtcttgaccattcgaccgatttcttttcagaagccttcgaacacaatggccgcccgtactccctcctcgtgtatataccatcccgcgtggcattgatcctgcagaacgttgacctgcccaattag

SEQ ID NO: 3526 - DNA, 1398 bp, Artificial Sequence
  derived and/or modified sequence
atggcgattatggagcatgcttattacgcatcatttgggtaccaaatcactagtttcttcgccgcgtcaagccgctacggcaccccggaggaacttcaggagttagtcgacactgctcattcaatgggcatcattgtacttttggatgtggtgcactcacacgcatcaaagaatagcgccgatgggttaaatatgttcgacggtacagatagttgttactttcattctggcccaagagggactcatgatctgtgggactctcggttgttcgcctattcctcatgggagattctacgcttccttctttccaacattagatggtggctggaagaatatcgtttcgacgggttcaggttcgacggggttacttctatgttataccaccaccacggagtcggacaaggctttagcggcgactactctgagtactttggccttcaggtagacgaagacgctctgacatacctcatgctggccaaccatctagtgcacactctgtgccccgatagcattaccatcgccgaagacgtgtccggcatgccagcactctgtagtcctatttcacagggcggcggcggctttgattacaggctggcaatggccattcctgataaatggatccagcttctgaaggaattcaaggacgaggattggaacatgggcgatatagtatacacactcactaaccgtcggtatctggagaagtgcattgcgtatgcggagtcacatgatcaagctctggtcggggacaagagcctggccttctggctcatggacgcagagatgtataccaacatgtctgttctaaccccctttactccagtgattgacaggggtatccagttacacaagatgatccggctgattacacacggtctcgggggcgaagggtacctgaactttatgggcaatgaattcggacatccggaatggctggattttccacgcaagggaaacaacgaatcctatcattatgccagacgccagttccatcttaccgacgacgatctgctgcggtacaagtttcttaacaacttcgaccgggatatgaatagattggaggaacgatacggttggctggcggcccctcaagcttacgtgagtgaaaagcacgaaggaaataagataattgcattcgaacgggcagggctcctgttcatctttaattttcatccaagtaagagctatactgactatcgggtcggcacggccctgcctggtaagtttaagattgtcctagacagcgatgcggccgaatacggagggcaccagaggctggaccatagtactgactttttttccgaagccttcgagcataatggacggccgtacagcttgttggtctacataccctccagggtggccttgattctccagaatgtcgacttaccaaactag

SEQ ID NO: 3527 - DNA, 2262 bp, Artificial Sequence
  derived and/or modified sequence
cgggccccagacagaagaggcagcccccggctggccagcacccggctgggcgccctgcggctgcggcccagcagaagagtgcctgcccgggccccagccccagcccaggcccccctgcccctgggcccccggctgctgggcctgcggaggaacatggccgcccccatgaccccagctgcccggccagaagattatgaagctgccctgaatgctgccctggctgatgtgcctgagctggcccggctgctggagattgacccctacctgaagccctatgctgtggacttccagaggcgctacaagcagttcagccagatcctgaagaacatcggggagaatgaaggaggcatcgacaagttcagccggggctatgagagctttggagtgcaccgctgtgctgatggcggcctgtactgcaaggagtgggcccctggagctgagggcgtcttcctgaccggggacttcaacggctggaaccccttctcctacccctacaagaagctggactatggcaagtgggagctgtacatcccccccaagcagaacaagtctgtgctggtgccccacggcagcaagctgaaggtggtgatcaccagcaagtctggagagatcctgtaccgcatcagcccctgggccaagtatgtggtgcgggagggggacaacgtgaactatgactggatccactgggaccctgagcacagctatgagttcaagcacagccggcccaagaagcccaggagcctgcgcatctatgagagccacgtgggcatcagcagccatgagggcaaggtggccagctacaagcacttcacctgcaatgtgctgccccgcatcaagggcctgggctacaactgcatccagctgatggccatcatggagcacgcctactatgccagctttggctaccagatcaccagcttctttgctgccagcagccgctatggcaccccagaggagctgcaggagctggtggacacagcccacagcatgggcatcatcgtgctgctggatgtggtgcacagccacgccagcaagaacagcgcagatggcctgaacatgtttgatggaacagacagctgctacttccacagcggcccccggggcacccatgacctgtgggacagccggctgtttgcctacagctcctgggagatcctgcgcttcctgctgagcaacatccgctggtggctggaggagtacagatttgatggcttccgctttgatggagtgacctccatgctgtaccaccaccacggcgtgggccagggcttcagcggggactacagcgagtacttcggcctgcaggtggatgaagatgccctgacctacctgatgctggccaaccacctggtgcacaccctgtgcccagacagcatcaccatcgcagaagatgtgtctggcatgcctgccctgtgcagccccatcagccagggcggcggcggctttgactaccgcctggccatggccatcccagacaagtggatccagctgctgaaggagttcaaggatgaggactggaacatgggagacatcgtgtacaccctgaccaacagacgctacctggagaagtgcatcgcctatgcagagagccatgaccaggccctggtgggggacaagagcctggccttctggctgatggatgctgagatgtacaccaacatgtctgtgctgacccccttcacccctgtgattgaccggggcatccagctgcacaagatgatccgcctcatcacccacggcctgggcggggagggctacctgaacttcatgggaaatgaatttggccaccctgagtggctggacttccccaggaaaggaaataatgaaagctaccactacgcccggcggcagttccacctgacagatgatgacctgctgcgctacaagttcctgaacaactttgaccgggacatgaaccggctggaggagagatatggctggctggccgccccccaggcctacgtgtctgagaagcatgagggcaacaagatcatcgcctttgagcgggccggcctgctcttcatcttcaacttccaccccagcaagagctacacagactacagagtgggcacagccctgcccgggaagttcaagatcgtgctggacagtgatgctgctgaatatggaggccaccagaggctggaccacagcacagacttcttcagcgaggcctttgagcacaacggccggccctacagcctgctggtgtacatccccagccgggtggccctgatcctgcagaatgtggacctgcccaactag

SEQ ID NO: 3528 - DNA, 2109 bp, Artificial Sequence
  derived and/or modified sequence
atggccgcccccatgaccccagctgcccggcctgaggactatgaggccgccctgaatgctgccctggctgatgtgcctgagctggcccggctgctggagattgacccctacctgaagccctatgctgtggacttccagaggcgctacaagcagttcagccagatcctgaagaacattggagaaaatgaaggaggcatcgacaagttcagccggggctatgagagctttggagtgcaccgctgtgctgatggcggcctgtactgcaaggagtgggcccctggagctgagggcgtcttcctgactggagacttcaacggctggaaccccttctcctacccctacaagaagctggactatggcaagtgggagctgtacatcccccccaagcagaacaagtctgtgctggtgccccacggcagcaagctgaaggtggtgatcaccagcaagagcggggagatcctgtaccgcatcagcccctgggccaagtatgtggtgcgggagggggacaacgtgaactatgactggatccactgggaccctgagcacagctatgagttcaagcacagccggcccaagaagcccaggagcctgcgcatctatgagagccacgtgggcatcagcagccatgagggcaaggtggccagctacaagcacttcacctgcaatgtgctgccccgcatcaagggcctgggctacaactgcatccagctgatggccatcatggagcacgcctactatgccagctttggctaccagatcaccagcttctttgctgccagcagccgctatggcaccccagaggagctgcaggagctggtggacacagcccacagcatgggcatcatcgtgctgctggatgtggtgcacagccacgccagcaagaacagcgcagatggcctgaacatgtttgatggaacagacagctgctacttccacagcggcccccggggcacccatgacctgtgggacagccggctgtttgcctacagctcctgggagatcctgcgcttcctgctgagcaacatccgctggtggctggaggagtacagatttgatggcttccgctttgatggagtgacctccatgctgtaccaccaccacggcgtgggccagggcttcagcggggactacagcgagtacttcggcctgcaggtggatgaagatgccctgacctacctgatgctggccaaccacctggtgcacaccctgtgcccagacagcatcaccatcgccgaggatgtgtctggcatgcctgccctgtgcagccccatcagccagggcggcggcggctttgactaccgcctggccatggccatcccagacaagtggatccagctgctgaaggagttcaaggatgaggactggaacatgggagacatcgtgtacaccctgaccaacagacgctacctggagaagtgcatcgcctatgcagagagccatgaccaggccctggtgggggacaagagcctggccttctggctgatggatgctgagatgtacaccaacatgtctgtgctgacccccttcacccctgtgattgaccggggcatccagctgcacaagatgatccgcctcatcacccacggcctgggcggggagggctacctgaacttcatgggaaatgaatttggccaccctgagtggctggacttccccaggaagggcaacaatgaaagctaccactacgcccggcggcagttccacctgacagatgatgacctgctgcgctacaagttcctgaacaactttgaccgggacatgaaccggctggaggagagatatggctggctggccgccccccaggcctacgtgtctgagaagcatgagggcaacaagatcatcgcctttgaaagagctggcctgctcttcatcttcaacttccaccccagcaagagctacacagactacagagtgggcacagccctgcccgggaagttcaagatcgtgctggacagtgatgctgctgaatatggaggccaccagaggctggaccacagcacagacttcttcagcgaggcctttgagcacaacggccggccctacagcctgctggtgtacatccccagccgggtggccctgatcctgcagaatgtggacctgcccaactag

SEQ ID NO: 3529 - DNA, 1398 bp, Artificial Sequence
  derived and/or modified sequence
atggccatcatggagcacgcctactatgccagctttggctaccagatcaccagcttctttgctgccagcagccgctatggcaccccagaggagctgcaggagctggtggacacagcccacagcatgggcatcatcgtgctgctggatgtggtgcacagccacgccagcaagaacagcgcagatggcctgaacatgtttgatggaacagacagctgctacttccacagcggcccccggggcacccatgacctgtgggacagccggctgtttgcctacagctcctgggagatcctgcgcttcctgctgagcaacatccgctggtggctggaggagtacagatttgatggcttccgctttgatggagtgacctccatgctgtaccaccaccacggcgtgggccagggcttcagcggggactacagcgagtacttcggcctgcaggtggatgaagatgccctgacctacctgatgctggccaaccacctggtgcacaccctgtgcccagacagcatcaccatcgcagaagatgtgtctggcatgcctgccctgtgcagccccatcagccagggcggcggcggctttgactaccgcctggccatggccatcccagacaagtggatccagctgctgaaggagttcaaggatgaggactggaacatgggagacatcgtgtacaccctgaccaacagacgctacctggagaagtgcatcgcctatgcagagagccatgaccaggccctggtgggggacaagagcctggccttctggctgatggatgctgagatgtacaccaacatgtctgtgctgacccccttcacccctgtgattgaccggggcatccagctgcacaagatgatccgcctcatcacccacggcctgggcggggagggctacctgaacttcatgggaaatgaatttggccaccctgagtggctggacttccccaggaaaggaaataatgaaagctaccactacgcccggcggcagttccacctgacagatgatgacctgctgcgctacaagttcctgaacaactttgaccgggacatgaaccggctggaggagagatatggctggctggccgccccccaggcctacgtgtctgagaagcatgagggcaacaagatcatcgcctttgagcgggccggcctgctcttcatcttcaacttccaccccagcaagagctacacagactacagagtgggcacagccctgcccgggaagttcaagatcgtgctggacagtgatgctgctgaatatggaggccaccagaggctggaccacagcacagacttcttcagcgaggcctttgagcacaacggccggccctacagcctgctggtgtacatccccagccgggtggccctgatcctgcagaatgtggacctgcccaactag

SEQ ID NO: 3530 - DNA, 2262 bp, Artificial Sequence
  derived and/or modified sequence
cgggcccccgaccggcggggcagcccccggctggccagcacccggctgggcgccctgagactcagacccagccgccgggtgcctgcccgagctccagctcctgcgcaggcccccctcccattgggcccccgcttgttagggctgcgaaggaatatggctgcccctatgacgcccgctgctaggcctgaagattatgaagcggcattgaatgccgcgttagccgatgtgccagagctcgcccggttactggagatcgatccttacttgaagccatatgccgtggactttcagcgaaggtataagcaatttagccaaatccttaaaaatatcggcgagaatgagggaggtattgataaattttccaggggatacgaaagttttggcgtgcaccgttgtgccgacgggggcctctactgtaaggaatgggctcctggcgcagagggggtttttctgactggggatttcaacggatggaaccctttttcgtacccctataaaaagttagactatgggaagtgggagctgtatataccgccaaaacagaacaaaagcgtacttgtgccacatggcagcaaactcaaagttgtgatcacaagcaagtccggggagatcttgtaccggatctcgccatgggccaagtatgttgtgcgggaaggggataacgttaattatgactggattcattgggaccccgaacacagttatgagtttaagcactcacgtcctaagaagccgagatccctccgaatttacgagagccacgtcggcatctcctctcatgagggcaaagtcgcctcctacaagcactttacctgcaacgtcctcccccgtattaaagggctgggttataactgcatccaacttatggccattatggagcatgcatactatgctagtttcggataccagattacgagcttcttcgccgcctcttcccggtacggcacacctgaggagcttcaggaattggtggacaccgcgcacagcatggggattattgtacttctggatgtggtgcactctcatgcttcaaagaacagcgctgacgggctgaatatgttcgatggaacagattcatgctactttcattcaggtcctcgaggcactcacgatctgtgggacagcagactttttgcatattcatcttgggagattttaaggttcctgttatctaatattcggtggtggcttgaagaatacagatttgatggatttcgtttcgatggcgtgacgtctatgctttatcatcaccatggcgtgggtcaaggcttcagtggcgattacagcgagtatttcggcctgcaggtcgacgaggacgcccttacttacttgatgcttgccaatcacttggtgcacactttatgtccagactcgattactattgcggaggacgtgagtggcatgcccgcactgtgtagcccgatctcacaaggcggaggagggttcgactatcggctagccatggctatccctgataaatggattcagctgctgaaagagttcaaagatgaggattggaatatgggagacattgtgtatacactgaccaatcggcggtacctggaaaagtgtattgcctatgcggagtctcatgatcaagctctcgttggagacaaaagcctggcgttctggcttatggatgccgaaatgtatactaacatgagtgttctcacaccctttacaccagttatcgaccgcggaattcaacttcacaagatgatcagactgattactcacggactaggaggggagggatatcttaacttcatgggcaatgaattcggacatccagagtggctggacttccctcggaaaggaaacaatgagtcctatcattacgccagacgacaattccacttaactgatgacgatctgcttcgatacaagtttttaaacaatttcgatcgcgacatgaatcggctggaagagaggtatggttggctagcagcccctcaggcctacgtctctgaaaaacacgagggaaataaaattatagcatttgaaagggccggattattgtttatcttcaacttccatccttctaagagttataccgattatcgggtgggtactgcactgccgggcaaattcaaaatcgtccttgactccgatgcggccgagtacggcgggcaccaacggctggaccattctaccgacttttttagcgaggcattcgagcataacggccggccatactcgcttctggtctacatccctagcagggttgcacttatcttgcagaacgtcgatctcccgaactag

SEQ ID NO: 3531 - DNA, 2109 bp, Artificial Sequence
  derived and/or modified sequence
atggccgcccccatgacccccgccgcccggcccgaggactacgaggccgcattgaatgctgctttggcagacgtgcctgagcttgctagattgctcgagatcgatccctacctgaaaccttacgctgtggatttccagcgtcggtacaagcagttcagtcagattctcaagaatataggcgagaacgagggcggcattgataagttcagtcgtgggtacgagtcattcggagttcatcggtgcgccgacggcgggctctattgcaaagaatgggcccctggagcagagggagtcttcctaactggggatttcaacggatggaacccttttagctatccatataaaaaactggactacgggaagtgggaactgtatatcccgcccaaacagaataagagtgtgctcgtgcctcacggatcaaaattgaaagtggtgattacaagcaagtccggtgagattctttaccgcatttctccatgggcaaagtatgttgtccgcgagggagataacgtgaattatgattggatccactgggatccggagcactcatatgagttcaagcattctaggccgaaaaagcctcgatccctgagaatatatgagtctcacgttggcatatcatctcacgaggggaaggtggccagctacaaacatttcacttgcaacgtgttgccccgcattaaggggctgggctataactgtatccaattgatggctatcatggaacacgcttactacgcatcatttggctatcaaattacttctttctttgcagcttcgtctaggtacggaactcccgaggaactccaagagctggtcgacacagcccactcaatgggaattattgtcctgctcgacgtggtacactctcacgcctctaagaactccgctgacgggcttaatatgttcgacggtacagactcttgttactttcattctggtccaagaggcacacacgatctctgggacagcaggctgtttgcttattcttcatgggaaatcctgcgatttttactatcgaacattagatggtggctggaggagtatagatttgacgggttccgcttcgatggcgttacatccatgctgtatcaccatcacggggtgggacaggggttctcaggggactacagtgagtattttggcctgcaggttgatgaggacgcactaacatacctgatgctggcaaatcatttggtgcacacactgtgtcccgatagcattacaattgccgaggacgtatcaggaatgcctgcactctgttcaccaatttcacagggtggggggggctttgattacaggctcgcgatggcgattcccgataagtggatccaactcctcaaagagttcaaggacgaggactggaacatgggagatatagtatacacattaactaaccgcagatacctggagaaatgtatcgcctatgcagagtctcatgaccaggctctggtaggggataaaagcctggcattttggttaatggatgccgagatgtatacaaatatgagtgtcttgacccctttcaccccagtgattgatcgcggcatccagctacacaagatgattagactgataacccacggactcgggggagaaggctacctgaattttatgggcaatgaattcggccaccccgaatggcttgattttccgcggaagggcaacaatgaaagctaccactatgctaggcgtcagtttcaccttacggatgacgatcttttgcgctacaaatttttgaataactttgatcgagatatgaacagactggaggaaaggtacggctggttggctgctccacaagcttatgtgtcagagaaacacgaagggaacaagataatcgcatttgaacgtgccggactgctgtttatcttcaatttccatcctagtaaaagctacacagactacagagttggaactgccctccccgggaaatttaagattgtcctagatagtgatgccgccgagtacggtggacatcagcggctggatcatagcactgatttcttttccgaagcatttgaacataatggaaggccttattctttgctcgtttatatcccttcaagggtggccctcattctccagaatgtggacctacccaattag

SEQ ID NO: 3532 - DNA, 1398 bp, Artificial Sequence
  derived and/or modified sequence
atggccatcatggagcacgcctactacgccagcttcggctaccagattacctcattttttgcagcatccagcagatacggtacacccgaggaactccaggaactagtggacacggcccatagcatgggaataattgtgttattggatgtggttcattcacacgccagtaagaactccgccgatggacttaacatgttcgacggcacagactcctgttacttccatagcggtccaagagggacccacgatctgtgggattcaaggttattcgcttacagctcctgggaaatcctgagattcttgctcagtaacatcaggtggtggctggaggaatacaggttcgacggatttcgttttgacggcgtgactagtatgctgtaccaccaccatggagtggggcaagggttctcaggcgactacagtgagtacttcggactgcaagttgatgaggatgcgctcacctaccttatgttagcaaatcaccttgtgcataccctgtgcccagacagtatcactatcgccgaggatgtgtccgggatgccagcgctatgctcccctatctcacaaggaggtggcggatttgactacagacttgcaatggccatccctgacaaatggattcagttattgaaggaattcaaggatgaggactggaacatgggcgacattgtctacaccttgaccaataggcggtaccttgagaaatgtatcgcgtatgcagaaagccacgaccaggcactggtcggcgacaaaagcttagcgttctggctgatggacgcggagatgtacaccaatatgtctgtgctgacgcccttcacacccgtcatcgataggggcattcaactgcataagatgataaggttgattacacacgggctgggcggagaggggtatctgaactttatggggaatgaattcggtcaccccgaatggctggattttccccgcaaaggcaacaatgaatcttatcactacgccagacgccagttccacctgaccgacgacgatcttctgagatacaagttcctgaataacttcgacagagacatgaacagattggaggagagatatggatggctggccgcccctcaggcgtacgttagcgaaaagcatgaaggcaataaaataatcgccttcgaacgagctggcctgctgttcattttcaatttccacccttccaaaagctatactgactacagggtcgggaccgcgttgcccgggaagttcaaaattgtcctcgactctgatgcagctgaatatgggggacatcagcgactcgaccatagcaccgacttctttagcgaagcctttgaacacaacggccgtccctactcattgctggtttatattccaagcagggtggccctgattctccagaacgtggatctgccaaattag

SEQ ID NO: 3533 - DNA, 2968 bp, Artificial Sequence
  derived and/or modified sequence
agggccccggaccgccgcggctcgcctcggcttgcctcgacacgcctaggcgccctccggctccgccctagccgccgcgtcccagctagagctccagcgcccgctcaggccccactccctctcgggcctcggctacttggactgcggcggaatatggcggctccgatgactcccgcggctcggcccgaggactacgaggcggcgctcaatgccgccctggctgacgtgcccgaactggccagactcctggagatcgacccgtacttgaagccctacgccgtggacttccagcgcaggtataagcagtttagccaaattttgaagaacattggagaaaatgaaggtggtattgataagttttccagaggctatgaatcatttggcgtccacagatgtgctgatggtggtttatactgcaaagaatgggccccgggagcagaaggagtttttcttactggagattttaatggttggaatccattttcgtacccatacaaaaaactggattatggaaaatgggagctgtatatcccaccaaagcagaataaatctgtactcgtgcctcatggatccaaattaaaggtagttattactagtaaaagcggagagatcttgtatcgtatttcaccgtgggcaaagtatgtggttcgtgaaggtgataatgtgaattatgattggatacactgggatccagaacactcatatgagtttaagcattccagaccaaagaagccacggagtctaagaatttatgaatctcatgtgggaatttcttcccatgaaggaaaagtagcttcttataaacattttacatgcaatgtactaccaagaatcaaaggccttggatacaactgcattcagttgatggcaatcatggagcatgcttactatgccagctttggttaccaaatcacaagcttctttgcagcttccagccgttatggaacacctgaagagctacaagaactggtagacacagctcattccatgggtatcatagtcctcttagatgtggtacacagccatgcttcaaaaaattcagcagatggattgaatatgtttgatgggacagattcctgttattttcattctggacctagagggactcatgatctttgggatagcagattgtttgcctactccagctgggaaattttaagattccttctgtcaaacataagatggtggttggaagaatatcgctttgatggatttcgttttgatggtgttacgtccatgctttatcatcaccatggagtgggtcaaggtttctcaggtgattacagtgaatatttcggactacaagtagatgaagatgccttgacttacctcatgttggcaaatcatttggttcacacgctgtgtcccgattctataacaatagctgaggatgtatcaggaatgccagctctgtgctctccaatttcccagggagggggtggttttgactatcgactagccatggcaattccagataagtggattcagctacttaaagagtttaaagatgaagactggaacatgggcgatatagtatacacgctcacaaacaggcgctaccttgaaaagtgcattgcttatgcagagagccatgatcaggcattggttggggataagtcgctggcattttggttgatggatgccgaaatgtatacaaacatgagtgtcctgactccttttactccagttattgatcgtggaatacagcttcataaaatgattcgactcattacgcatgggcttggtggagaaggctatctcaatttcatgggtaatgaatttgggcatcctgaatggttagacttcccaagaaaaggaaataatgagagttaccattatgccaggcggcagtttcatttaactgacgacgaccttcttcgctacaagttcctaaataattttgacagggatatgaatagattggaagaaagatatggttggcttgcagctccacaggcctacgtgagtgaaaaacatgaaggcaataagatcattgcttttgaaagagcaggtcttcttttcattttcaacttccatccaagcaagagctacactgactaccgagttggaacagcattgccagggaaattcaaaattgtgctagattcagatgcagcggaatatggagggcatcagagactggaccacagcactgactttttttctgaggcttttgaacataatgggcgtccctattctcttttggtgtacattccaagcagagtggccctcatccttcagaatgtggatctgccgaattgaagaggcctgatttcagctccaccagatgcagatttgtgttttgttttcttgttatcactgtcacacagcttataacatgtatgcttttcagaatacagttgtctagccaagccatcaagtgtctgaaattcaatattggtttatgcaaatacagcaaacttttatttaagtagatgggagaatatgtttaaaatattaggaatcctagaccatattttcaagtcatcttagcagctaggattctcaaatggaagtgttatatataatatgttaaaaacattttgctttcctggctaattatttgatccttttaaattcaaatttgaatcatttgtcatgtatgattatttctgttaaatgtacacagtatttaagatggatatttggtggctctatttgttctgatatcttttggtctaaattatgaggtaccaagattgtttctttgtttctttttttcaaattgtgtttagaaatactgtaataaatatgcagtagtgatataaagaattatatccaaggtaatataaaagccattacgtatgaactcatccgtgtctcattttgtgttttattttgtgatctcttgtccactaagtatcttgttaaatgccagtatctcagtctttctgaagccctgaaatggtaattgtagcatttcagaaaatgtctttcatttcaatcaataaaaagcttttgtaaaatt

SEQ ID NO: 3534 - DNA, 3461 bp, Artificial Sequence
  derived and/or modified sequence
aaacttaggagagtcctggttgtaagaggtattaacattttcagcagtagtactctagctacacttgactgttcccctctctgtgaatttacatgatatgtttgaaatactgcccctcaaaagtctcagaactttgagaaatacggtcctttccaaaaaaaccccttatgtccaatttgaaggggtcgctgtcagtgggtgcttaagtgggtaaagaaaagccaagaatatgtcagggtgaggaaggccaaggctgagcgaggtcagcttgggacccacctcctagaatgacctccgccagcaggaaaaaaccgttaaggggaggaaagggcaggtccctgcggcctccaggtgccagccgcgtgagtgggcggagaggcctcggtgcctcctacccgctccggacgtgcgtcccggcatcaccccgggatccgctcctccccgctggcggggggagaaagggcaggaggccttccgtcccggctataaagggccccggaccgccgcggctcgcctcggcttgcctcgacacgcctaggcgccctccggctccgccctagccgccgcgtcccagctagagctccagcgcccgctcaggccccactcgacctctcgggcctcggctacttggactgcggcggaatatggcggctccgatgactcccgcggctcggcccgaggactacgaggcggcgctcaatgccgccctggctgacgtgcccgaactggccagactcctggagatcgacccgtacttgaagccctacgccgtggacttccagcgcaggtataagcagtttagccaaattttgaagaacattggagaaaatgaaggtggtattgataagttttccagaggctatgaatcatttggcgtccacagatgtgctgatggtggtttatactgcaaagaatgggccccgggagcagaaggagtttttcttactggagattttaatggttggaatccattttcgtacccatacaaaaaactggattatggaaaatgggagctgtatatcccaccaaagcagaataaatctgtactcgtgcctcatggatccaaattaaaggtagttattactagtaaaagcggagagatcttgtatcgtatttcaccgtgggcaaagtatgtggttcgtgaaggtgataatgtgaattatgattggatacactgggatccagaacactcatatgagtttaagcattccagaccaaagaagccacggagtctaagaatttatgaatctcatgtgggaatttcttcccatgaaggaaaagtagcttcttataaacattttacatgcaatgtactaccaagaatcaaaggccttggatacaactgcattcagttgatggcaatcatggagcatgcttactatgccagctttggttaccaaatcacaagcttctttgcagcttccagccgttatggaacacctgaagagctacaagaactggtagacacagctcattccatgggtatcatagtcctcttagatgtggtacacagccatgcttcaaaaaattcagcagatggattgaatatgtttgatgggacagattcctgttattttcattctggacctagagggactcatgatctttgggatagcagattgtttgcctactccagctgggaaattttaagattccttctgtcaaacataagatggtggttggaagaatatcgctttgatggatttcgttttgatggtgttacgtccatgctttatcatcaccatggagtgggtcaaggtttctcaggtgattacagtgaatatttcggactacaagtagatgaagatgccttgacttacctcatgttggcaaatcatttggttcacacgctgtgtcccgattctataacaatagctgaggatgtatcaggaatgccagctctgtgctctccaatttcccagggagggggtggttttgactatcgactagccatggcaattccagataagtggattcagctacttaaagagtttaaagatgaagactggaacatgggcgatatagtatacacgctcacaaacaggcgctaccttgaaaagtgcattgcttatgcagagagccatgatcaggcattggttggggataagtcgctggcattttggttgatggatgccgaaatgtatacaaacatgagtgtcctgactccttttactccagttattgatcgtggaatacagcttcataaaatgattcgactcattacgcatgggcttggtggagaaggctatctcaatttcatgggtaatgaatttgggcatcctgaatggttagacttcccaagaaaaggaaataatgagagttaccattatgccaggcggcagtttcatttaactgacgacgaccttcttcgctacaagttcctaaataattttgacagggatatgaatagattggaagaaagatatggttggcttgcagctccacaggcctacgtgagtgaaaaacatgaaggcaataagatcattgcttttgaaagagcaggtcttcttttcattttcaacttccatccaagcaagagctacactgactaccgagttggaacagcattgccagggaaattcaaaattgtgctagattcagatgcagcggaatatggagggcatcagagactggaccacagcactgactttttttctgaggcttttgaacataatgggcgtccctattctcttttggtgtacattccaagcagagtggccctcatccttcagaatgtggatctgccgaattgaagaggcctgatttcagctccaccagatgcagatttgtgttttgttttcttgttatcactgtcacacagcttataacatgtatgcttttcagaatacagttgtctagccaagccatcaagtgtctgaaattcaatattggtttatgcaaatacagcaaacttttatttaagtagatgggagaatatgtttaaaatattaggaatcctagaccatattttcaagtcatcttagcagctaggattctcaaatggaagtgttatatataatatgttaaaaacattttgctttcctggctaattatttgatccttttaaattcaaatttgaatcatttgtcatgtatgattatttctgttaaatgtacacagtatttaagatggatatttggtggctctatttgttctgatatcttttggtctaaattatgaggtaccaagattgtttctttgtttctttttttcaaattgtgtttagaaatactgtaataaatatgcagtagtgatataaagaattatatccaaggtaatataaaagccattacgtatgaactcatccgtgtctcattttgtgttttattttgtgatctcttgtccactaagtatcttgttaaatgccagtatctcagtctttctgaagccctgaaatggtaattgtagcatttcagaaaatgtctttcatttcaatcaataaaaagcttttgtaaaattgc

SEQ ID NO: 3535 - DNA, 2010 bp, Artificial Sequence
  derived and/or modified sequence
cgcggctcgcctcggcttgcctcgacacgcctaggcgccctccggctccgccctagccgccgcgtcccagctagagctccagcgcccgctcaggccccactcgacctctcgggcctcggctacttggactgcggcggaatatggcggctccgatgactcccgcggctcggcccgaggactacgaggcggcgctcaatgccgccctggctgacgtgcccgaactggccagactcctggagatcgacccgtacttgaagccctacgccgtggacttccagcgcaggtataagcagtttagccaaattttgaagaacattggagaaagtgggaatttcttcccatgaaggaaaagtagcttcttataaacattttacatgcaatgtactaccaagaatcaaaggccttggatacaactgcattcagttgatggcaatcatggagcatgcttactatgccagctttggttaccaaatcacaagcttctttgcagcttccagccgttatggaacacctgaagagctacaagaactggtagacacagctcattccatgggtatcatagtcctcttagatgtggtacacagccatgcttcaaaaaattcagcagatggattgaatatgtttgatgggacagattcctgttattttcattctggacctagagggactcatgatctttgggatagcagattgtttgcctactccagctgggaaattttaagattccttctgtcaaacataagatggtggttggaagaatatcgctttgatggatttcgttttgatggtgttacgtccatgctttatcatcaccatggagtgggtcaaggtttctcaggtgattacagtgaatatttcggactacaagtagatgaagatgccttgacttacctcatgttggcaaatcatttggttcacacgctgtgtcccgattctataacaatagctgaggatgtatcaggaatgccagctctgtgctctccaatttcccagggagggggtggttttgactatcgactagccatggcaattccagataagtggattcagctacttaaagagtttaaagatgaagactggaacatgggcgatatagtatacacgctcacaaacaggcgctaccttgaaaagtgcattgcttatgcagagagccatgatcaggcattggttggggataagtcgctggcattttggttgatggatgccgaaatgtatacaaacatgagtgtcctgactccttttactccagttattgatcgtggaatacagcttcataaaatgattcgactcattacgcatgggcttggtggagaaggctatctcaatttcatgggtaatgaatttgggcatcctgaatggttagacttcccaagaaaaggaaataatgagagttaccattatgccaggcggcagtttcatttaactgacgacgaccttcttcgctacaagttcctaaataattttgacagggatatgaatagattggaagaaagatatggttggcttgcagctccacaggcctacgtgagtgaaaaacatgaaggcaataagatcattgcttttgaaagagcaggtcttcttttcattttcaacttccatccaagcaagagctacactgactaccgagttggaacagcattgccagggaaattcaaaattgtgctagattcagatgcagcggaatatggagggcatcagagactggaccacagcactgactttttttctgaggcttttgaacataatgggcgtccctattctcttttggtgtacattccaagcagagtggccctcatccttcagaatgtggatctgccgaattgaagaggcctgatttcagctccaccagatgcagatttgtgttttgttttcttgttatcactgtcacacagcttataacatgtatgcttttcagaatacagttgtctagccaagccatcaagtgtctgaaattcaatattggtttatgcaaatacagcaaacttttatttaagtagatgggagaatatg

SEQ ID NO: 3536 - DNA, 2262 bp, Artificial Sequence
  derived and/or modified sequence
cgcgcacctgatcggagaggctctccaaggcttgcatccaccagactaggcgctcttaggctgcggccaagccgacgcgtgcccgctcgtgcgccagctcccgcacaagcccctctgccacttggacctaggttactggggttgcggaggaacatggctgcacccatgacccctgctgcacggcctgaagattatgaggctgcactgaatgcagccttagccgatgtccccgagctagcccgtctcttagagattgatccctacctgaagccctatgctgtggacttccagagacgttacaagcagttcagccaaatcctgaaaaacattggcgagaatgagggaggtattgacaagtttagcaggggctacgagtccttcggagtgcatcggtgtgccgacggaggcctgtactgcaaagaatgggcgccaggagccgagggcgtattcttaaccggggacttcaatggctggaaccccttctcatacccctacaagaagctagactacggcaaatgggagctgtatataccccctaaacagaataagtctgtgttagtgccacatggcagcaagctgaaagtggttatcacgtccaagagtggcgaaatcttgtaccgcataagtccttgggcgaagtacgtggtcagggagggggacaacgtgaattatgattggattcactgggatcccgaacactcgtatgaattcaagcatagtcggccaaagaagccacgtagtttacggatttatgaatcccacgtcgggatttcttctcatgaggggaaggtggccagctataagcacttcacatgcaacgtgcttccacgaatcaaaggacttgggtacaactgtatccagttaatggcgattatggagcacgcatactatgcttcattcggatatcagatcacctcattcttcgctgcgtcctcccggtatggcactcctgaagagctccaggagctagtcgatactgctcactcaatgggcatcattgtgctgttggacgtggtgcatagccacgcttctaaaaattcggctgatgggctcaatatgtttgatggaactgatagctgttatttccattccggcccaagagggactcatgatctgtgggatagccgacttttcgcttattcttcttgggaaatcttacgatttctgctgagcaatattagatggtggttggaggaatacaggtttgatggctttcggtttgacggagtgacttccatgctgtatcaccatcacggcgtgggccaagggttcagcggtgactatagcgaatatttcggactccaagtggatgaagacgcccttacttacctgatgctggccaaccatctggtgcataccctgtgtcccgatagcatcacgatagcggaggacgtgtctggtatgcctgccctatgcagcccgatctcacagggtggaggaggctttgactaccgcctcgctatggctattcctgataaatggatccaactgctaaaagagtttaaggacgaggattggaatatgggcgacatcgtctatacactgacgaaccgcaggtatctcgaaaagtgcatcgcctatgccgaaagccacgatcaagccctggtcggggataagagcctggcattttggctcatggacgctgaaatgtacacaaacatgtcagttctgactccgtttaccccagttatcgaccggggtattcaactccacaaaatgatcaggttgatcactcacgggctaggaggggaaggatatctgaactttatgggtaatgaatttgggcatcctgaatggctagacttcccacgcaaaggcaataacgaatcctatcactacgcccgtagacagtttcatctaacagatgatgaccttctgcgctacaaattcctcaataacttcgaccgagatatgaaccggctggaagagaggtatggttggctcgcggctccccaagcgtacgtgtcagaaaaacacgaaggcaacaagatcattgctttcgagcgggctgggcttctttttatattcaatttccatcccagcaaaagttataccgactaccgcgtgggcactgctctccccggaaaatttaagatcgtgctggattccgacgcggctgaatacgggggacaccaacgcctcgaccattccaccgacttcttcagcgaggcctttgaacataacggaagaccctatagcctgctggtgtacataccatcacgggttgcactcatcctccaaaacgtggacctgcccaattag

SEQ ID NO: 3537 - DNA, 2109 bp, Artificial Sequence
  derived and/or modified sequence
atggcagctccaatgacccctgccgctcgacccgaagattatgaggccgctctcaatgcagctttggctgacgtacctgaattggcccgattgctcgaaatagatccatatctgaaaccttacgccgtggactttcaacggagatataagcaattcagtcagatcctcaaaaatattggggagaatgaggggggtatagacaaattcagccgtgggtacgagagcttcggcgtccacagatgcgctgacggtgggttatattgcaaggagtgggcgccaggcgctgaaggcgtgtttttaaccggggacttcaacggatggaatccattcagttacccctacaaaaaactggactacgggaagtgggagctgtatattccgccaaagcagaataagtccgttctcgtccctcacggtagtaagctgaaagtggtcatcacttctaagagcggcgaaatcctctaccgaattagcccctgggccaagtacgttgtaagggagggcgacaacgtgaattacgactggattcactgggacccagaacactcctacgaattcaagcattcgcgccctaagaagccacggagtcttcggatttatgagagccacgtcgggatctccagtcacgaggggaaagtggcaagttacaagcattttacttgcaatgtgttacctcgcattaagggcctcggctataattgcatacagttgatggctatcatggagcatgcctactacgcttctttcggttaccagattacgagtttttttgctgcgagcagcagatatggcaccccagaagagctccaggaactggtagatacagctcactctatgggcattatcgtgctcttggatgttgtgcactcccacgcctctaagaacagcgcagacgggcttaatatgtttgacggtacagactcctgctatttccacagtggccctaggggtacccatgatctgtgggattctagactgttcgcctattcttcatgggagatccttagatttctcctcagtaatattcgctggtggctcgaagagtataggtttgacggattccgcttcgacggcgtgacctccatgttgtatcatcaccacggcgtcggacagggcttttcaggggattactctgaatactttggcctgcaggtggacgaagacgccctcacttatttgatgctggcaaatcacctggtgcacaccctgtgccccgattctattaccatcgccgaagatgttagcggaatgcccgcactctgctcccctatcagccaaggcggtgggggtttcgactacaggttggctatggctatcccggataagtggatccagctgctcaaagaattcaaagatgaggactggaacatgggggacatcgtctataccttgacaaatcgcaggtacctcgaaaaatgcatcgcgtacgccgaaagccacgaccaggccctggtcggcgacaaatccctcgccttttggttaatggatgcagagatgtacaccaacatgtccgtcctgacccccttcacaccagtgattgacagagggattcagctgcacaagatgatccggcttatcacccatggattgggtggggaagggtatttaaactttatgggaaatgaatttggccacccagaatggctagacttccctagaaagggaaacaatgagagttaccactacgcacggcgtcagttccatctgaccgatgatgatctcttgcgatacaaatttctcaataatttcgatcgcgacatgaatcggcttgaggagagatatggttggctcgcagcacctcaagcatatgtgtcagagaagcacgagggtaataagatcattgccttcgagagggccggactgcttttcattttcaactttcatccttcgaaaagctataccgactacagagtcggaactgcgctgccaggcaaatttaagatcgttttggactctgacgctgcggaatacggcggacatcaacgcttagaccacagcaccgattttttcagcgaggcgtttgagcacaacggcaggccctacagcttgctggtatacataccatcccgcgtggctctgatcctgcaaaatgtagacttaccaaactag

SEQ ID NO: 3538 - DNA, 1398 bp, Artificial Sequence
  derived and/or modified sequence
atggctatcatggagcacgcatattatgccagtttcggatatcagatcacaagcttctttgcggcaagcagccggtacggaacacctgaagaactgcaggagttagttgacaccgctcattcaatgggcatcatcgtgctcctggatgtagtccattcccacgcttctaaaaactccgcagatggtcttaatatgtttgacgggacagattcctgctactttcatagcggccctagggggacccatgacctctgggactctcgcttatttgcttactcatcctgggagattttacgattcctgctctcaaacatccgctggtggctggaggaatacagattcgacggatttcgtttcgacggggtgacaagtatgttgtaccatcaccacggagtaggccagggattttctggcgattattcagagtacttcggccttcaagtggacgaggatgctctgacataccttatgctggccaatcacctggtccataccttatgccccgactctattacgatcgcggaagacgtatcgggtatgcccgcactctgctcacccatttcgcaaggcggtgggggatttgattatagactggccatggcaatacccgacaagtggatccagttgctcaaggaattcaaggacgaagactggaacatgggagatattgtttataccctaacaaaccgaaggtatttagagaagtgtatagcatacgccgaaagtcacgatcaggcactggtgggagataagtctcttgccttctggcttatggacgccgaaatgtacaccaatatgtccgtccttacgcctttcactcctgtaatagatcgcggtattcagctccataagatgattaggttgatcactcatggattgggtggggaggggtatctgaattttatgggaaatgagtttggtcatcccgagtggctggacttcccaaggaagggtaacaatgaatcatatcactacgctcggaggcaatttcacctgacagacgatgacttgttgaggtacaagttccttaataatttcgatagagatatgaatcgcttggaggaaaggtacggctggctggccgcaccccaggcctacgtttctgaaaagcatgagggcaataaaatcatcgcatttgaacgcgctggactgctgtttatctttaatttccacccttccaaaagttacactgactaccgcgtggggacagccctacctggcaaattcaagattgttcttgattcagatgccgctgagtatggcggtcaccaacgcctggaccatagcaccgacttcttctcagaggcattcgagcataatgggaggccctattctctgcttgtttacatccccagcagggtcgcacttattcttcaaaacgtcgatctgccaaattag

SEQ ID NO: 3539 - RNA, 2252 nt, Artificial Sequence
  derived and/or modified sequence
gggaaauaagagagaaaagaagaguaagaagaaauauaagagccaccauggcugcgcccaugacucccgcagcaagaccggaggacuacgaggcagcauugaaugccgcccucgcagacgugcccgagcuugcaagguugcuggaaauugaucccuaucucaagcccuacgccgucgauuuucagcgccgguacaagcaguucucccaaauucucaagaacauuggcgagaacgaaggagguaucgacaaguuuucacgggguuaugagucguucgggguccaccggugcgccgacggagggcuguauuguaaggagugggcgccuggggcggaagggguguuucuuacgggagauuucaauggauggaaucccuucucauacccguacaagaaauuggacuacggaaagugggaguuguauauuccaccgaagcagaacaaaucagugcuugugccucauggauccaaacuuaaagucgugauuacaucgaaaagcggggagauccucuaccgcaucucaccgugggcgaaauauguagucagggaaggggauaacgucaacuacgauuggauccacugggaccccgagcauucauacgaauucaaacacucaaggccgaagaagccccgaucgcuccggaucuacgaaagccacgugggaauuuccucacaugaaggaaagguggccucguacaaacacuuuacgugcaauguccuuccucgaaucaaaggucugggauacaauugcauccagcuuauggcgauuauggagcaugccuauuaugcguccuuuggcuaccagaucaccucguucuucgcggcgagcucacgauauggaacuccagaggaguugcaagaauugguagacaccgcccacucaauggguaucauuguccuucuugacguggugcacagccaugccagcaagaacucggcggauggccucaacauguucgacgggacagacucaugcuacuuccacagcgggccuagggguacucaugaucucugggacucgcgccuuuuugcguacucgagcugggaaauccuccgcuuucugcugucgaauaucaggugguggcuggaggaguaucgguucgaugguuuccgcuuugauggagucacgagcaugcuuuaccaucaucacggggugggccagggauucucgggcgacuauucggaauacuucgggcuucaaguagacgaggaugcguugaccuaccucaugcucgccaaucacuugguccacacguuguguccugauucgaucacaaucgccgaggacgugucggggaugccagcgcucuguuccccgaucucgcaagguggaggcggguucgauuaucgccuggcgauggcaauucccgacaaguggauucaacuucucaaagaguuuaaggaugaggauuggaauaugggagacauuguguacacgcugacgaaucgccgguaucuugagaaaugcaucgcguaugcugagucgcacgaccaggcguuggucggggauaagucccucgcauuuuggcucauggacgcagaaauguauacaaauaugucgguauugacucccuucacacccgugaucgaucgagggauucagcuccacaaaaugaucagauugauuacgcacgguuugggcggagagggguauuugaacuucaugggaaacgaauuuggucauccagaguggcucgacuucccgcgcaaaggaaauaacgaguccuaccacuacgcaaggaggcaguuucaucuuacggaugaugaccuucugagauauaaguuucuuaacaacuuugacagggacaugaaccgccucgaagagagauacgguugguuggcugcuccucaagcauacguauccgaaaagcacgaagggaauaagaucaucgcauucgaacgggcaggacuccuguuuaucuucaacuuucacccgucgaaaucauauacggacuaucgagucggaacagcgcugccgggcaaauucaagauuguacuggauucagaugcggcugaguacggaggccaucagagacuugaccacuccaccgacuucuucucggaagcguucgagcacaacggaaggccguacucacuucuggucuauauccccucgcggguagcacucaucuugcaaaauguagaucucccgaauugauaagcugccuucugcggggcuugccuucuggccaugcccuucuucucucccuugcaccuguaccucuuggucuuugaauaaagccugaguaggaag

SEQ ID NO: 3540 - protein, 438 aa, Artificial Sequence
  derived and/or modified sequence
MALRGVSVRLLSRGPGLHVLRTWVSSAAQTEKGGRTQSQLAKSSRPEFDWQDPLVLEEQLTTDEILIRDTFRTYCQERLMPRILLANRNEVFHREIISEMGELGVLGPTIKGYGCAGVSSVAYGLLARELERVDSGYRSAMSVQSSLVMHPIYAYGSEEQRQKYLPQLAKGELLGCFGLTEPNSGSDPSSMETRAHYNSSNKSYTLNGTKTWITNSPMADLFVVWARCEDGCIRGFLLEKGMRGLSAPRIQGKFSLRASATGMIIMDGVEVPEENVLPGASSLGGPFGCLNNARYGIAWGVLGASEFCLHTARQYALDRMQFGVPLARNQLIQKKLADMLTEITLGLHACLQLGRLKDQDKAAPEMVSLLKRNNCGKALDIARQARDMLGGNGISDEYHVIRHAMNLEAVNTYEGTHDIHALILGRAITGIQAFTASK

SEQ ID NO: 3541 - protein, 328 aa, Artificial Sequence
  derived and/or modified sequence
MALRGVSVRLLSRGPGLHVLRTWVSSAAQTASRPEFDWQDPLVLEEQLTTDEILIRDTFRTYCQERLMPRILLANRNEGYGCAGVSSVAYGLLARELERVDSGYRSAMSVQSSLVMHPIYAYGSEEQRQKYLPQLAKGELLGCFGLTEPNSGSDPSSMETRAHYNSSNKSYTLNGTKTWITNSPMADLFVVWARCEDGCIRGFLLEKGMRGLSAPRIQGKFSLRASATGMIIMDGVEVPEENVLPGASSLGGPFGCLNNARYGIAWGVLGASEFCLHTARQYALDRMQFGVPLARNQLIQKKLADMLTEITLGLHACLQLGRLKDQDK

SEQ ID NO: 3542 - protein, 394 aa, Artificial Sequence
  derived and/or modified sequence
MRSSSGTPSAPTARRDSCLASCWPIATKSLALLPRLECSGTILAHCKFCLPGSSDSPASTPLVAGITGYGCAGVSSVAYGLLARELERVDSGYRSAMSVQSSLVMHPIYAYGSEEQRQKYLPQLAKGELLGCFGLTEPNSGSDPSSMETRAHYNSSNKSYTLNGTKTWITNSPMADLFVVWARCEDGCIRGFLLEKGMRGLSAPRIQGKFSLRASATGMIIMDGVEVPEENVLPGASSLGGPFGCLNNARYGIAWGVLGASEFCLHTARQYALDRMQFGVPLARNQLIQKKLADMLTEITLGLHACLQLGRLKDQDKAAPEMVSLLKRNNCGKALDIARQARDMLGGNGISDEYHVIRHAMNLEAVNTYEGTHDIHALILGRAITGIQAFTASK

SEQ ID NO: 3543 - DNA, 1317 bp, Artificial Sequence
  derived and/or modified sequence
atggcgttaaggggcgtcagcgtgcggctcctgagccgggggcctggactgcacgtgttacgaacttgggtcagctccgctgcccaaacggagaaagggggtaggacgcagagccaactggctaaaagttcacgtccggaattcgattggcaggatcctcttgttctggaagaacaactgacaaccgatgagatcttgatccgggacacatttaggacctactgtcaggaaaggttaatgccgcggattttgcttgccaacaggaacgaagtgtttcacagagagatcatttcggagatgggggaactaggagtgcttggtcctacgatcaaaggatatggatgtgccggagtgtcatccgtggcctacggactgctggcacgggaactcgagagagtggattcaggctacagatccgcaatgagtgttcagtccagtctggttatgcaccctatctatgcgtatggctctgaggagcagcggcagaaatacctgccgcagctggcaaaaggcgagttactcggctgcttcgggttgactgagcccaactccgggtccgatccctcgagtatggagacgagggctcattataactccagcaacaagtcgtatactttgaatggcactaagacttggatcactaatagtccgatggccgacctgtttgtagtttgggctcgctgcgaagacggatgcattcggggctttttgcttgagaaaggcatgagaggtttgtccgctcctcgcatccagggtaagttttctttgagagcctcagcaaccggcatgatcatcatggatggcgtagaggtgcctgaagaaaacgtgttaccaggcgcttcttcgctgggcggtccatttggatgtctaaacaacgcccgatacggcattgcctggggagtcctcggcgcgtccgaattctgcctgcacactgcccgacagtacgctttagaccgaatgcagtttggggtgccacttgccagaaatcagctgatacaaaagaaactggccgacatgctgacagaaattactttgggcctacacgcctgcctgcagttgggacgccttaaagatcaggataaggctgcacccgagatggtatcactgttgaaacgaaacaattgcggcaaagctctggacattgcacgccaggcccgcgacatgctggggggtaacggcatctcagatgagtaccacgttatccggcatgccatgaacttagaagccgttaacacgtacgagggcacgcacgacatacacgcccttatcctgggcagggcaatcactggcattcaagctttcaccgcttctaagtag

SEQ ID NO: 3544 - DNA, 1185 bp, Artificial Sequence
  derived and/or modified sequence
atgagatctagcagcgggaccccctctgccccgactgcccgccgcgactcatgcctggctagctgttggcccatcgcgactaagagcctcgcactgttgccgcggttggaatgctcaggtaccattttagcccactgcaagttttgtctgccaggatcgtcagactccccagcttcaacccccctcgttgccggaatcactggatacgggtgcgccggagtgagtagtgtggcctatggtctgcttgcaagggagctagagagagtagactccggttaccgcagcgccatgtccgtacaatctagtctggtgatgcatcctatatacgcctatgggtcagaggagcagcggcagaagtatctcccgcagctggctaaaggagaactcctgggatgtttcggtctgacggaacctaacagcgggtctgatcctagttccatggagacacgggcacattataacagctctaacaaatcatacacactgaacggtacaaagacatggataacgaactctcctatggccgatcttttcgtagtgtgggcacggtgtgaggacggctgcattcgagggttccttctcgagaaaggaatgaggggattgtctgcccccaggattcaaggtaaattctcactgagggcgagcgcgaccgggatgataatcatggatggtgtggaagtgcccgaggagaacgtcctcccaggcgcttcttctctaggcggtcccttcggttgtctgaataatgcccggtacggtatagcttggggtgtcttaggcgcttccgagttctgtctgcacacggctaggcagtatgccttggaccgcatgcagttcggcgtgcccctagcacggaatcagttgatccagaaaaagttagccgacatgctgactgagattaccttgggcctgcacgcctgtctgcagctggggcggctgaaggaccaagacaaagcagcacccgaaatggtcagcctgctcaagcgcaacaattgcggaaaagcactcgacatcgctagacaggcgagagacatgctgggcggaaatgggattagtgacgagtatcatgttattcgccatgcgatgaacctcgaggcagtcaatacatacgaaggaacacatgacatacacgctctgattctgggcagggctattacaggcatccaggcattcacggcttctaagtag

SEQ ID NO: 3545 - DNA, 1821 bp, Artificial Sequence
  derived and/or modified sequence
agttgcactgtagcctcggcagtgaaccgggaggtactaccaggtcgccgtcgttgctccgctcgctctgagagagcatggccctgagaggcgtctccgtgcggctgctgagccgcggacccggcctgcacgtccttcgcacgtgggtctcgtcggcggcgcagaccgagaaaggcgggagaacacagagccaactggctaagtcctcgcgtcccgagtttgactggcaggacccgctggtgctggaggagcagctgaccacagatgagatcctcatcagggacaccttccgcacctactgccaggagagactcatgcctcgcatcctgttggccaatcgcaacgaagtttttcatcgggagatcatttcggagatgggggagttgggtgtgctgggccccaccatcaaaggatatggctgtgctggggtttcgtctgtggcctatgggctcctggcccgagagctggagcgggtggacagtggctacaggtcggcgatgagtgtccagtcctccctcgtcatgcaccctatctatgcctatggcagcgaggaacagcggcagaagtacctgccccagctggccaagggggagctcctgggctgcttcgggctcacagagcccaacagcggaagtgaccccagcagcatggagaccagagcccactacaactcatccaacaagagctacaccctcaatgggaccaagacctggatcacgaactcgcctatggccgatctgtttgtagtgtgggctcggtgtgaagatggctgcattcggggcttcctgctggagaaggggatgcggggtctctcggcccccaggatccagggcaagttctcgctgcgggcctcagccacaggcatgatcatcatggacggtgtggaggtgccagaggagaatgtgctccctggtgcatccagcctggggggtcccttcggctgcctgaacaacgcccggtacggcatcgcgtggggcgtgcttggagcttcggagttctgcttgcacacagcccggcagtacgccctcgacaggatgcagtttggtgtcccactggccaggaaccagctgattcagaagaagctggcagacatgctcactgagattaccctgggccttcacgcctgcctgcagctcggccgcttgaaggaccaggacaaggctgcccccgagatggtttctctgctgaagaggaataactgtgggaaagccctggacatcgcccgccaggcccgagacatgctgggggggaatgggatttctgacgagtatcacgtgatccggcacgccatgaacctggaggccgtgaacacctacgaaggtacacatgacattcacgccctgatccttgggagagctatcacgggaatccaggcgttcacggccagcaagtgagccgctccatcaggggcccgaaactctcaagcccctttctggagagatgcctggctggaccgtaggagcgctgtgctctgagcttagaaagggaggtggcggatggagtgggaagtgagagacactgatttttaaatatcaaaatttcccttctgaagtcgttcagatgtgttccttaaaaagaagatggaattctctgtagagcgtctcaatccacttttaaccatggatgagagcagactccatttaccctgaaatagcagcttctcttgagaggagagtgacatggaagcaactccgtctgctgcagctgaccccctcacactgagttcacagtgcgccctccctccctcccatctgggggtagtgccttatgctgggtgttggagcagagtgagggagaggaaaataaagacctgcacatctg

SEQ ID NO: 3546 - DNA, 1871 bp, Artificial Sequence
  derived and/or modified sequence
actgtagcctcggcagtgaaccgggaggtactaccaggtcgccgtcgttgctccgctcgctctgagagagcatggccctgagaggcgtctccgtgcggctgctgagccgcggacccggcctgcacgtccttcgcacgtgggtctcgtcggcggcgcagaccgagaaaggcgggagaacacagagccaactggctaagtcctcgcgtcccgagtttgactggcaggacccgctggtgctggaggagcagctgaccacagatgagatcctcatcagggacaccttccgcacctactgccaggagagactcatgcctcgcatcctgttggccaatcgcaacgaagagtctggctctgttgcccaggctggagtgcagtggcacgatcttggctcactgcaaattctgcctcccaggctcaagcgattctcctgcctccacccctctagtagctgggattacaggatatggctgtgctggggtttcgtctgtggcctatgggctcctggcccgagagctggagcgggtggacagtggctacaggtcggcgatgagtgtccagtcctccctcgtcatgcaccctatctatgcctatggcagcgaggaacagcggcagaagtacctgccccagctggccaagggggagctcctgggctgcttcgggctcacagagcccaacagcggaagtgaccccagcagcatggagaccagagcccactacaactcatccaacaagagctacaccctcaatgggaccaagacctggatcacgaactcgcctatggccgatctgtttgtagtgtgggctcggtgtgaagatggctgcattcggggcttcctgctggagaaggggatgcggggtctctcggcccccaggatccagggcaagttctcgctgcgggcctcagccacaggcatgatcatcatggacggtgtggaggtgccagaggagaatgtgctccctggtgcatccagcctggggggtcccttcggctgcctgaacaacgcccggtacggcatcgcgtggggcgtgcttggagcttcggagttctgcttgcacacagcccggcagtacgccctcgacaggatgcagtttggtgtcccactggccaggaaccagctgattcagaagaagctggcagacatgctcactgagattaccctgggccttcacgcctgcctgcagctcggccgcttgaaggaccaggacaaggctgcccccgagatggtttctctgctgaagaggaataactgtgggaaagccctggacatcgcccgccaggcccgagacatgctgggggggaatgggatttctgacgagtatcacgtgatccggcacgccatgaacctggaggccgtgaacacctacgaaggtacacatgacattcacgccctgatccttgggagagctatcacgggaatccaggcgttcacggccagcaagtgagccgctccatcaggggcccgaaactctcaagcccctttctggagagatgcctggctggaccgtaggagcgctgtgctctgagcttagaaagggaggtggcggatggagtgggaagtgagagacactgatttttaaatatcaaaatttcccttctgaagtcgttcagatgtgttccttaaaaagaagatggaattctctgtagagcgtctcaatccacttttaaccatggatgagagcagactccatttaccctgaaatagcagcttctcttgagaggagagtgacatggaagcaactccgtctgctgcagctgaccccctcacactgagttcacagtgcgccctccctccctcccatctgggggtagtgccttatgctgggtgttggagcagagtgagggagaggaaaataaagacctgcacatctga

SEQ ID NO: 3547 - DNA, 1317 bp, Artificial Sequence
  derived and/or modified sequence
atggccctgcggggcgtgtctgtgcggctgctgagccggggccctggcctgcacgtgctgcggacctgggtgagcagcgctgcccagacagagaagggcggccgcacccagagccagctggccaagagcagcaggcctgagtttgactggcaggaccccctggtgctggaggagcagctgaccacagatgagatcctgatccgggacaccttccgcacctactgccaggagcggctgatgccccgcatcctgctggccaacagaaatgaggtgttccaccgggagatcatcagcgagatgggagagctgggcgtgctgggccccaccatcaagggctacggctgtgccggcgtgtcctctgtggcctacggcctgctggcccgggagctggagcgggtggacagcggctacagaagtgccatgtctgtgcagagcagcctggtgatgcaccccatctatgcctacggcagcgaggagcagaggcagaagtacctgccccagctggccaagggggagctgctgggctgcttcggcctgacagagcccaacagcggcagtgaccccagctccatggagacccgggcccactacaacagcagcaacaagagctacaccctgaatggcaccaagacctggatcaccaacagccccatggctgacctgtttgtggtgtgggcccgctgtgaagatggctgcatccggggcttcctgctggagaagggcatgaggggcctgagcgccccccgcatccagggcaagttcagcctgcgggccagcgccaccggcatgatcatcatggatggagtggaggtgcctgaggagaatgtgctgcccggggccagcagcctgggcggccccttcggctgcctgaacaatgcccgctatggaattgcctggggcgtgctgggcgccagcgagttctgcctgcacacagcccggcagtatgccctggacaggatgcagtttggagtgcccctggccaggaaccagctgatccagaagaagctggccgacatgctgacagagatcaccctgggcctgcacgcctgcctgcagctgggccgcctgaaggaccaggacaaggccgcccctgagatggtgtccctgctgaagaggaacaactgtgggaaggccctggacatcgcccggcaggcccgggacatgctgggcggcaatggcatcagtgatgagtaccacgtgatcagacatgccatgaacctggaggccgtgaacacctatgagggcacccatgacatccacgccctgatcctgggccgggccatcaccggcatccaggccttcaccgccagcaagtag

SEQ ID NO: 3548 - DNA, 1185 bp, Artificial Sequence
  derived and/or modified sequence
atgaggagcagcagcggcaccccatctgcccccacagcccggcgggacagctgcctggccagctgctggcccatcgccaccaagagcctggccctgctgccccggctggagtgcagcggcaccatcctggcccactgcaagttctgcctgcccggcagcagtgacagccctgccagcacccccctggtggccggcatcaccggctacggctgtgccggcgtgtcctctgtggcctacggcctgctggcccgggagctggagcgggtggacagcggctacagaagtgccatgtctgtgcagagcagcctggtgatgcaccccatctatgcctacggcagcgaggagcagaggcagaagtacctgccccagctggccaagggggagctgctgggctgcttcggcctgacagagcccaacagcggcagtgaccccagctccatggagacccgggcccactacaacagcagcaacaagagctacaccctgaatggcaccaagacctggatcaccaacagccccatggctgacctgtttgtggtgtgggcccgctgtgaagatggctgcatccggggcttcctgctggagaagggcatgaggggcctgagcgccccccgcatccagggcaagttcagcctgcgggccagcgccaccggcatgatcatcatggatggagtggaggtgcctgaggagaatgtgctgcccggggccagcagcctgggcggccccttcggctgcctgaacaatgcccgctatggaattgcctggggcgtgctgggcgccagcgagttctgcctgcacacagcccggcagtatgccctggacaggatgcagtttggagtgcccctggccaggaaccagctgatccagaagaagctggccgacatgctgacagagatcaccctgggcctgcacgcctgcctgcagctgggccgcctgaaggaccaggacaaggccgcccctgagatggtgtccctgctgaagaggaacaactgtgggaaggccctggacatcgcccggcaggcccgggacatgctgggcggcaatggcatcagtgatgagtaccacgtgatcagacatgccatgaacctggaggccgtgaacacctatgagggcacccatgacatccacgccctgatcctgggccgggccatcaccggcatccaggccttcaccgccagcaagtag

SEQ ID NO: 3549 - DNA, 1317 bp, Artificial Sequence
  derived and/or modified sequence
atggccctgcggggcgtgagcgtgcggctgctgagccggggccccggtttacacgtccttcgaacatgggtcagctctgccgcccagactgagaagggcggtcggacccaaagccagctcgctaaaagttccaggccagagttcgactggcaagatcctcttgtccttgaagagcagctaactaccgacgaaatcttgatccgagacactttcaggacttactgccaagagcgcctcatgccaaggatcttgctggctaatcggaatgaagtgttccaccgagagattatttccgagatgggcgaacttggcgtgttaggaccaacaattaagggttacggatgtgccggcgtcagttccgtcgcctacggactactggctcgtgaactagagagagtagattctgggtataggtccgctatgtcagtgcagtccagcttggttatgcaccccatatatgcatacggcagtgaggaacagcgccaaaaatatctgccccagcttgcaaagggcgaactcctaggatgtttcggcctgactgagccaaattccggttctgaccccagttctatggagactcgcgctcactataacagctccaataaatcttacaccttgaatggtacaaagacgtggataacaaatagcccaatggcagacctgtttgttgtatgggcgcggtgcgaagatggatgcattagaggcttcttactggaaaagggtatgagaggattgagcgccccacgaattcaggggaagttttctctcagggctagcgccaccgggatgattatcatggacggagtggaagtgcccgaggagaacgtgctccccggcgccagctccctgggcggaccttttggatgtctgaacaatgctagatacggaatcgcttggggggttttgggtgcctctgagttctgcctacatacggctaggcaatacgcccttgatcgaatgcaattcggagtgcccctggcacgcaaccagctgatccagaagaaactggctgacatgttgaccgagattacacttgggttgcacgcctgcctacaactcgggcggttgaaggaccaggacaaggctgcccctgagatggtcagcctactgaagcgtaacaactgcggcaaggccctggatattgctagacaagcaagagatatgctcggaggaaacggaatcagcgacgagtaccacgtaataagacatgccatgaatctcgaggccgtgaatacgtacgagggaactcatgatattcatgccctcatactcgggagagccattacaggaatccaggcctttacagcatctaagtag

SEQ ID NO: 3550 - DNA, 1185 bp, Artificial Sequence
  derived and/or modified sequence
atgcggagcagcagcggcacccccagcgcccccaccgcccggcgggatagctgtctcgcctcttgctggccaattgctaccaaaagcctcgccctgttacctcgccttgagtgcagcgggacgattcttgcacactgcaagttctgcctgccaggttcatccgattcgccggcaagcactcctctggtggctggtattacaggctatggctgcgcaggagtttcaagtgtggcctatggactgcttgcacgagaacttgagagggtggactctggatataggagcgccatgtctgtacaatcctccctggtaatgcaccctatttacgcgtacgggagcgaggagcaacggcagaagtatctgccccaactggccaaaggcgagctgcttggctgttttggcctgaccgagccaaactcaggctctgatccatcttcaatggaaacccgagcacactataactccagtaataaaagctatacactaaatggaaccaagacgtggattactaacagcccaatggctgatctcttcgtggtgtgggcccgctgtgaagacgggtgcatcaggggctttcttctggagaagggtatgagaggtctgtccgccccacggatccagggcaaattcagcctgcgggcctccgccactggaatgattattatggatggcgtagaggttcctgaagaaaacgttctccccggcgcgagcagcctcgggggaccgttcgggtgcttgaacaatgctaggtatggaatcgcctggggagttttgggagcgtctgaattttgtctccacaccgcaagacagtacgcgttggatagaatgcagtttggagtgcccctggctaggaatcagttaatccagaagaaactggccgatatgctgacggagattacccttggattacatgcctgcttgcagctgggaagactgaaagatcaagacaaagccgcacccgaaatggtcagtctcctgaaacggaacaattgtggtaaagccctcgacatcgcacggcaggcacgggacatgctcggaggtaacggcatttcagacgaataccacgtgatccggcatgctatgaacttggaggcggtcaacacctacgagggaactcacgatatccacgcacttatcctggggagggcgattacggggattcaagctttcaccgcctcaaaatag

SEQ ID NO: 3551 - DNA, 1317 bp, Artificial Sequence
  derived and/or modified sequence
atggctcttagaggggtgtcagtcaggctgctgtctcgaggcccagggctgcatgttctcagaacttgggtcagctccgctgctcagactgaaaaaggcggtcgcacgcagagccagctcgccaaatcttcaagaccagagtttgactggcaagacccgctggtcctggaggaacagctgaccactgacgagatcctgatccgggatacatttcggacttattgccaagagagattgatgccccgaatcctgctggcaaatcgaaatgaagttttccaccgggagatcattagcgaaatgggtgaattgggagtgcttggccctacaattaaagggtatggatgcgccggagtctcttctgtagcttacggtctgctggccagggagctcgagagggtcgacagcggctatcggtcagctatgtctgtgcagagctctctggtcatgcacccaatttatgcctatggctctgaagaacagaggcagaagtacttgccccaactcgccaaaggggagctgctcggttgttttggcctaacagaacccaactctggcagtgatccgtcttcaatggagactcgcgctcactacaacagttccaataaatcctataccctgaatggcaccaaaacatggatcaccaacagccctatggctgatttatttgtggtgtgggctcggtgcgaggatgggtgcatccgtggattcctcctggagaagggaatgagaggactgagtgctcctaggatccaaggcaaattttctttgagagcttctgctaccggcatgataatcatggacggtgtcgaagttccagaagagaatgttttgccaggtgcttccagcctgggcggaccattcggctgcctgaacaatgcacgctatggtattgcctggggcgtcttgggagcatccgagttttgtctccacacggctcgacaatacgctctggaccgcatgcagttcggagtccccctcgctaggaaccagctcatccagaaaaagctggcggatatgctgaccgagattaccctgggcctgcacgcgtgcctccaactgggaagattaaaagaccaggataaggcggctcctgaaatggtctcactgttgaaaaggaataattgcggaaaggcccttgacatcgccaggcaagcaagggatatgctgggaggcaatggaatttctgacgagtaccatgtgattcgccacgctatgaatctcgaagcagtcaacacctatgaaggaacccatgacatccacgcccttatactggggagggccataactgggatacaggcattcaccgcctccaaatag

SEQ ID NO: 3552 - DNA, 1185 bp, Artificial Sequence
  derived and/or modified sequence
atgagaagcagcagcggaacgccctcggcacccaccgctcggagagacagttgcttggcctcctgttggcctatcgctaccaaatctctggcactactgccacgtctggagtgcagtggcactattctcgcccactgtaaattctgcctccctggctcctctgatagtccagcctcaacaccgttggttgcaggaatcacaggttatggttgtgctggagtgtcctccgttgcctacggactgctggcgagagagctagagagagtggattccggctacaggagtgccatgtccgtacagtccagcctcgtgatgcacccaatctatgcatatggctctgaggaacagagacagaagtatttgcctcagttggcaaagggcgaactgctgggatgcttcggactgactgagcctaattctggatcggatcctagttcgatggaaacacgggctcattataactcatctaacaaaagctacactctcaatggaactaagacctggattacgaattcccccatggcagatttattcgtagtctgggcgcgatgcgaggacggctgtattcgcggtttcctcctcgaaaagggcatgcgtggactctctgcccctcgtattcaggggaaattcagtttacgtgcaagtgctacgggcatgatcataatggacggagtggaggtgcctgaagagaatgttctgccaggggctagtagtctgggcggaccgttcggctgtctgaacaacgctaggtacggaatagcctggggcgtgcttggcgcaagcgagttttgcctgcacacagccaggcagtatgctttagaccgtatgcaatttggtgtgcccctagcccgaaatcagctgattcagaagaagctggcagacatgctgaccgagatcacactgggattacacgcctgcctgcagctgggtcggcttaaggatcaagataaggctgcccctgagatggtctcgctcctgaagcgcaacaattgtgggaaagcccttgatattgccagacaagctcgtgacatgttaggcggaaatggcatcagcgacgagtaccacgttatcagacatgccatgaacctcgaggccgtcaatacctatgagggtacccacgacatccatgcactcatcctgggcagggcaattactggcatccaggcgttcaccgcctctaagtag

SEQ ID NO: 3553 - DNA, 1317 bp, Artificial Sequence
  derived and/or modified sequence
atggccctgagaggcgtgagcgtgagactgctgagcagaggccccggcctgcacgtgctgagaacctgggtgagcagcgccgcccagaccgagaagggcggcagaacccagagccagctggccaagagcagcagacccgagttcgactggcaggaccccctggtgctggaggagcagctgaccaccgacgagatcctgatcagagacaccttcagaacctactgccaggagagactgatgcccagaatcctgctggccaacagaaacgaggtgttccacagagagatcatcagcgagatgggcgagctgggcgtgctgggccccaccatcaagggctacggctgcgccggcgtgagcagcgtggcctacggcctgctggccagagagctggagagagtggacagcggctacagaagcgccatgagcgtgcagagcagcctggtgatgcaccccatctacgcctacggcagcgaggagcagagacagaagtacctgccccagctggccaagggcgagctgctgggctgcttcggcctgaccgagcccaacagcggcagcgaccccagcagcatggagaccagagcccactacaacagcagcaacaagagctacaccctgaacggcaccaagacctggatcaccaacagccccatggccgacctgttcgtggtgtgggccagatgcgaggacggctgcatcagaggcttcctgctggagaagggcatgagaggcctgagcgcccccagaatccagggcaagttcagcctgagagccagcgccaccggcatgatcatcatggacggcgtggaggtgcccgaggagaacgtgctgcccggcgccagcagcctgggcggccccttcggctgcctgaacaacgccagatacggcatcgcctggggcgtgctgggcgccagcgagttctgcctgcacaccgccagacagtacgccctggacagaatgcagttcggcgtgcccctggccagaaaccagctgatccagaagaagctggccgacatgctgaccgagatcaccctgggcctgcacgcctgcctgcagctgggcagactgaaggaccaggacaaggccgcccccgagatggtgagcctgctgaagagaaacaactgcggcaaggccctggacatcgccagacaggccagagacatgctgggcggcaacggcatcagcgacgagtaccacgtgatcagacacgccatgaacctggaggccgtgaacacctacgagggcacccacgacatccacgccctgatcctgggcagagccatcaccggcatccaggccttcaccgccagcaagtag

SEQ ID NO: 3554 - DNA, 1185 bp, Artificial Sequence
  derived and/or modified sequence
atgagaagcagcagcggcacccccagcgcccccaccgccagaagagacagctgcctggccagctgctggcccatcgccaccaagagcctggccctgctgcccagactggagtgcagcggcaccatcctggcccactgcaagttctgcctgcccggcagcagcgacagccccgccagcacccccctggtggccggcatcaccggctacggctgcgccggcgtgagcagcgtggcctacggcctgctggccagagagctggagagagtggacagcggctacagaagcgccatgagcgtgcagagcagcctggtgatgcaccccatctacgcctacggcagcgaggagcagagacagaagtacctgccccagctggccaagggcgagctgctgggctgcttcggcctgaccgagcccaacagcggcagcgaccccagcagcatggagaccagagcccactacaacagcagcaacaagagctacaccctgaacggcaccaagacctggatcaccaacagccccatggccgacctgttcgtggtgtgggccagatgcgaggacggctgcatcagaggcttcctgctggagaagggcatgagaggcctgagcgcccccagaatccagggcaagttcagcctgagagccagcgccaccggcatgatcatcatggacggcgtggaggtgcccgaggagaacgtgctgcccggcgccagcagcctgggcggccccttcggctgcctgaacaacgccagatacggcatcgcctggggcgtgctgggcgccagcgagttctgcctgcacaccgccagacagtacgccctggacagaatgcagttcggcgtgcccctggccagaaaccagctgatccagaagaagctggccgacatgctgaccgagatcaccctgggcctgcacgcctgcctgcagctgggcagactgaaggaccaggacaaggccgcccccgagatggtgagcctgctgaagagaaacaactgcggcaaggccctggacatcgccagacaggccagagacatgctgggcggcaacggcatcagcgacgagtaccacgtgatcagacacgccatgaacctggaggccgtgaacacctacgagggcacccacgacatccacgccctgatcctgggcagagccatcaccggcatccaggccttcaccgccagcaagtag

SEQ ID NO: 3555 - protein, 465 aa, Artificial Sequence [sequence omitted]

SEQ ID NO: 3556 - DNA, 1398 bp, Artificial Sequence
  derived and/or modified sequence
atgctagacgacagagcccgtatggaggccgcaaaaaaggaaaaagtagaacaaattttggctgagtttcagctacaggaggaagacctaaagaaagtgatgcgtagaatgcaaaaagaaatggatcgtggcctgcggctcgagacacacgaagaagcctccgtgaaaatgctgccgacctatgtccgatctacgcccgagggctccgaggtgggcgactttctgagcctggacctgggaggaactaattttcgagtcatgctggtgaaagtgggtgagggagaggagggacagtggagcgtaaaaacaaaacaccagatgtattcaattccggaggatgccatgaccgggacagccgagatgttgttcgactatatttccgagtgcataagcgacttccttgacaaacatcagatgaaacacaagaaactgccccttggctttaccttctctttcccagtaagacacgaagacattgacaaaggaatcctgctgaattggactaaagggttcaaagcaagcggagctgagggcaacaatgtcgtagggctccttcgagatgcaataaaaaggcgcggtgatttcgaaatggacgtggtcgccatggtcaatgacacagtcgctactatgattagctgctactacgaggatcaccaatgcgaggtgggcatgatagtggggaccggatgtaacgcatgttacatggaggaaatgcaaaatgttgaactggtagagggtgacgaaggccgtatgtgcgttaataccgaatggggggccttcggagatagcggagaactcgacgagttcctgctggagtatgacaggctcgttgacgaatcatcagcaaaccccggccagcagctttatgaaaaactgataggcggaaagtatatgggcgagcttgtgcgcttggtactcctgagattagtggacgaaaacctcctgtttcacggcgaggcaagtgaacaactgagaacccgtggtgcatttgagacccggtttgtaagccaggttgaaagtgataccggggatcgcaaacaaatatataatattttgtcgaccttgggcctccgacccagcacaacggattgcgatatagtcagaagggcctgtgaaagcgtctctactcgcgccgctcacatgtgttccgcggggctggcaggagttatcaacagaatgcgggaatctcgaagcgaggacgtgatgcggattacggtcggcgtggacggcagtgtctacaagctacatccatcctttaaggagcggttccacgccagtgtccggcggttaaccccttcctgcgaaatcactttcattgagagcgaggaaggtagtggacgcggagctgctttggtgtcggccgtggcgtgcaaaaaggcttgcatgctggggcagtag

SEQ ID NO: 3557 - DNA, 2729 bp, Artificial Sequence
  derived and/or modified sequence
gagcaggaaatgccgagcggcgcctgagccccagggaagcaggctaggatgtgagagacacagtcacctgcagcctaattactcaaaagctgtccccaggtcacagaagggagaggacatttcccactgaatctgtctgaaggacactaagccccacagctcaacacaaccaggagagaaagcgctgaggacgccacccaagcgcccagcaatggccctgcctggagaacatccaggctcagtgaggaagggtccagaagggaatgcttgccgactcgttggagaacaatgaaaaggaggaaactgtgactgaacctcaaaccccaaaccagcccgaggagaaccacattctcccagggacccagggcgggccgtgacccctgcggcggagaagccttggatatttccacttcagaagcctactggggaaggctgaggggtcccagctccccacgctggctgctgtgcagatgctggacgacagagccaggatggaggccgccaagaaggagaaggtagagcagatcctggcagagttccagctgcaggaggaggacctgaagaaggtgatgagacggatgcagaaggagatggaccgcggcctgaggctggagacccatgaagaggccagtgtgaagatgctgcccacctacgtgcgctccaccccagaaggctcagaagtcggggacttcctctccctggacctgggtggcactaacttcagggtgatgctggtgaaggtgggagaaggtgaggaggggcagtggagcgtgaagaccaaacaccagatgtactccatccccgaggacgccatgaccggcactgctgagatgctcttcgactacatctctgagtgcatctccgacttcctggacaagcatcagatgaaacacaagaagctgcccctgggcttcaccttctcctttcctgtgaggcacgaagacatcgataagggcatccttctcaactggaccaagggcttcaaggcctcaggagcagaagggaacaatgtcgtggggcttctgcgagacgctatcaaacggagaggggactttgaaatggatgtggtggcaatggtgaatgacacggtggccacgatgatctcctgctactacgaagaccatcagtgcgaggtcggcatgatcgtgggcacgggctgcaatgcctgctacatggaggagatgcagaatgtggagctggtggagggggacgagggccgcatgtgcgtcaataccgagtggggcgccttcggggactccggcgagctggacgagttcctgctggagtatgaccgcctggtggacgagagctctgcaaaccccggtcagcagctgtatgagaagctcataggtggcaagtacatgggcgagctggtgcggcttgtgctgctcaggctcgtggacgaaaacctgctcttccacggggaggcctccgagcagctgcgcacacgcggagccttcgagacgcgcttcgtgtcgcaggtggagagcgacacgggcgaccgcaagcagatctacaacatcctgagcacgctggggctgcgaccctcgaccaccgactgcgacatcgtgcgccgcgcctgcgagagcgtgtctacgcgcgctgcgcacatgtgctcggcggggctggcgggcgtcatcaaccgcatgcgcgagagccgcagcgaggacgtaatgcgcatcactgtgggcgtggatggctccgtgtacaagctgcaccccagcttcaaggagcggttccatgccagcgtgcgcaggctgacgcccagctgcgagatcaccttcatcgagtcggaggagggcagtggccggggcgcggccctggtctcggcggtggcctgtaagaaggcctgtatgctgggccagtgagagcagtggccgcaagcgcagggaggatgccacagccccacagcacccaggctccatggggaagtgctccccacacgtgctcgcagcctggcggggcaggaggcctggccttgtcaggacccaggccgcctgccataccgctggggaacagagcgggcctcttccctcagtttttcggtgggacagccccagggccctaacgggggtgcggcaggagcaggaacagagactctggaagccccccacctttctcgctggaatcaatttcccagaagggagttgctcactcaggactttgatgcatttccacactgtcagagctgttggcctcgcctgggcccaggctctgggaaggggtgccctctggatcctgctgtggcctcacttccctgggaactcatcctgtgtggggaggcagctccaacagcttgaccagacctagacctgggccaaaagggcagccaggggctgctcatcacccagtcctggccattttcttgcctgaggctcaagaggcccagggagcaatgggagggggctccatggaggaggtgtcccaagctttgaatacccccagagaccttttctctcccataccatcactgagtggcttgtgattctgggatggaccctcgcagcaggtgcaagagacagagcccccaagcctctgccccaaggggcccacaaaggggagaagggccagccctacatcttcagctcccatagcgctggctcaggaagaaaccccaagcagcattcagcacaccccaagggacaaccccatcatatgacatgccaccctctccatgcccaacctaagattgtgtgggttttttaattaaaaatgttaaaagttttaaa

SEQ ID NO: 3558 - DNA, 1398 bp, Artificial Sequence
  derived and/or modified sequence
atgctggatgaccgggccaggatggaggccgccaagaaggagaaggtggagcagatcctggccgagttccagctgcaggaggaggacctgaagaaggtgatgaggaggatgcagaaggagatggaccggggcctgcggctggagacccatgaggaggcctctgtgaagatgctgcccacctacgtgcgcagcaccccagagggcagcgaggtgggggacttcctgagcctggacctgggcggcaccaacttccgggtgatgctggtgaaggtgggggagggggaggagggccagtggagcgtgaagaccaagcaccagatgtacagcatcccagaagatgccatgactggaacagctgagatgctgtttgactacatcagcgagtgcatcagtgacttcctggacaagcaccagatgaagcacaagaagctgcccctgggcttcaccttctccttccctgtgagacatgaagatattgacaagggcatcctgctgaactggaccaagggcttcaaggccagcggggctgagggcaacaacgtggtgggcctgctgagagatgccatcaagagaagaggagactttgagatggatgtggtggccatggtgaatgacacagtggccaccatgatcagctgctactatgaggaccaccagtgtgaggtgggcatgattgtgggcaccggctgcaatgcctgctacatggaggagatgcagaatgtggagctggtggagggagatgagggccgcatgtgtgtgaacacagagtggggcgccttcggggacagcggggagctggatgagttcctgctggagtatgaccggctggtggatgagagcagcgccaaccctggccagcagctgtatgagaagctgattggaggcaagtacatgggagagctggtgcggctggtgctgctgcggctggtggatgagaacctgctcttccatggagaggccagcgagcagctgcggaccaggggggcctttgagaccaggtttgtgtcccaggtggagagtgacaccggggacaggaagcagatctacaacatcctgagcaccctgggcctgcggcccagcaccacagactgtgacatcgtgcggcgggcctgtgagagcgtgtccacccgggccgcccacatgtgcagcgctggcctggccggggtcatcaacaggatgagggagagccgctcagaagatgtgatgaggatcaccgtgggcgtggatggctctgtgtacaagctgcaccccagcttcaaggagcgcttccacgcctctgtgcggcggctgacccccagctgtgagatcaccttcattgaaagtgaggagggcagcggcagaggagctgccctggtgtctgctgtggcctgcaagaaggcctgcatgctgggccagtag

SEQ ID NO: 3559 - DNA, 1398 bp, Artificial Sequence
  derived and/or modified sequence
atgctggacgaccgggcccggatggaggccgccaagaaggagaaggtcgaacagatcttggcagagttccagctgcaggaagaggacttaaagaaagtcatgcgtcggatgcaaaaagagatggatcgcggacttcgtctggaaactcacgaagaggcctccgtcaagatgctccccacatatgttaggtcaacaccggagggctcggaggtgggcgacttcctgtcactggacttgggaggcactaacttcagagtaatgctagtaaaagtgggcgagggtgaagaggggcagtggtctgtgaagactaagcatcagatgtacagtatccccgaggacgccatgacaggcacagctgagatgctttttgattatatcagcgagtgtatcagtgattttttggacaagcatcagatgaagcataaaaagctccctctgggctttacgttctcctttccagtgcggcacgaggacatagataaaggtattttgttgaactggacaaaagggttcaaagcatctggcgcggagggcaacaatgtggtcggattacttcgcgacgcaatcaagcggcgtggagatttcgagatggacgtggtggctatggtaaacgacactgttgcgaccatgattagctgttactacgaggatcaccagtgcgaggtgggtatgatcgtgggtacaggatgtaatgcctgttatatggaagaaatgcaaaatgtcgagctggttgaaggagatgaggggcgtatgtgtgtcaacaccgagtggggcgcattcggggactctggggagttagacgagtttcttctggagtacgaccggctggttgacgagtcatctgccaatccagggcagcagctttacgaaaaactcatcggcgggaagtacatgggcgagttggtaagacttgtgctcctgagattagtggacgagaatctgctgttccacggagaagcgagtgaacagctcagaacccggggggcatttgagacccggttcgtaagccaggtcgaatcagacaccggcgacagaaagcagatatacaacatactgagtacactgggacttagacctagcaccaccgactgcgacatagtgagacgggcctgcgaatcagtgtctacacgcgcagcacacatgtgcagcgcagggttggctggcgttataaatcgtatgagggaaagccgctccgaagacgtcatgaggattacagttggagtcgatggctcggtatacaagctgcatccttcttttaaagaacgctttcacgccagtgtaagaaggctgacacctagctgtgagatcacgttcatcgagtcagaggaagggtcagggaggggcgccgcgcttgttagcgcggtggcatgcaagaaggcctgcatgctgggacagtag

SEQ ID NO: 3560 - DNA, 1398 bp, Artificial Sequence
  derived and/or modified sequence
atgctggatgatcgagcacgcatggaggcggctaagaaggagaaagttgagcagatcttagccgagttccagctccaggaggaggatctgaagaaagtgatgagacgcatgcagaaagagatggacagggggctgcgcctggagacacatgaagaggcgtccgtgaaaatgctgcctacatatgtgagaagtacccctgagggttccgaggtgggggattttctgtcgctcgacttagggggtacaaattttagggttatgctggtcaaggtcggggagggtgaagaagggcaatggtctgttaagacaaagcatcagatgtactccatccccgaggacgcgatgactgggaccgccgagatgttgttcgactacatttccgagtgtatcagcgactttctagataagcatcagatgaagcacaagaagttgcctctcggctttactttttccttccctgtgcggcacgaggatatcgacaagggtatcttgttaaattggaccaagggcttcaaagctagcggggcagaagggaacaacgtggtcggcttgttgcgggatgccatcaagaggagaggagactttgagatggatgtggtcgctatggttaatgataccgtggcgacgatgatctcttgttactatgaggaccaccagtgtgaagtcggcatgatagtgggcaccggctgcaacgcttgttacatggaggaaatgcagaacgtagagctcgtggaaggggacgaagggcgaatgtgtgtgaacacagagtggggcgcttttggcgacagcggggaattagacgaattcctcctggaatacgacagactggttgatgagtcatcagcaaatccaggccagcagctctacgagaaactaattgggggaaagtatatgggagagctcgtccggcttgtactgttgcgcctggtcgatgagaacctccttttccatggcgaagccagcgaacaactgagaacccggggagccttcgaaacacgattcgtatctcaggtggaatcagatacaggggatcgcaagcagatctataacattctcagcaccctgggcctcaggccctcaaccacagattgcgatatcgtgcgtagggcctgcgaatctgtgtctacacgggctgcccacatgtgctccgccggactggctggggtgattaatagaatgagggaatcacggtcagaagacgttatgagaattaccgtgggagtcgacgggagtgtgtacaagctccatccatccttcaaggagcggttccatgcatcagtacgccgactgactccttcctgtgagattacatttattgagtcggaagagggaagtgggaggggagccgctttagttagtgctgtcgcttgcaagaaagcttgtatgttgggccagtag

SEQ ID NO: 3561 - DNA, 1398 bp, Artificial Sequence
  derived and/or modified sequence
atgctggacgacagagccagaatggaggccgccaagaaggagaaggtggagcagatcctggccgagttccagctgcaggaggaggacctgaagaaggtgatgagaagaatgcagaaggagatggacagaggcctgagactggagacccacgaggaggccagcgtgaagatgctgcccacctacgtgagaagcacccccgagggcagcgaggtgggcgacttcctgagcctggacctgggcggcaccaacttcagagtgatgctggtgaaggtgggcgagggcgaggagggccagtggagcgtgaagaccaagcaccagatgtacagcatccccgaggacgccatgaccggcaccgccgagatgctgttcgactacatcagcgagtgcatcagcgacttcctggacaagcaccagatgaagcacaagaagctgcccctgggcttcaccttcagcttccccgtgagacacgaggacatcgacaagggcatcctgctgaactggaccaagggcttcaaggccagcggcgccgagggcaacaacgtggtgggcctgctgagagacgccatcaagagaagaggcgacttcgagatggacgtggtggccatggtgaacgacaccgtggccaccatgatcagctgctactacgaggaccaccagtgcgaggtgggcatgatcgtgggcaccggctgcaacgcctgctacatggaggagatgcagaacgtggagctggtggagggcgacgagggcagaatgtgcgtgaacaccgagtggggcgccttcggcgacagcggcgagctggacgagttcctgctggagtacgacagactggtggacgagagcagcgccaaccccggccagcagctgtacgagaagctgatcggcggcaagtacatgggcgagctggtgagactggtgctgctgagactggtggacgagaacctgctgttccacggcgaggccagcgagcagctgagaaccagaggcgccttcgagaccagattcgtgagccaggtggagagcgacaccggcgacagaaagcagatctacaacatcctgagcaccctgggcctgagacccagcaccaccgactgcgacatcgtgagaagagcctgcgagagcgtgagcaccagagccgcccacatgtgcagcgccggcctggccggcgtgatcaacagaatgagagagagcagaagcgaggacgtgatgagaatcaccgtgggcgtggacggcagcgtgtacaagctgcaccccagcttcaaggagagattccacgccagcgtgagaagactgacccccagctgcgagatcaccttcatcgagagcgaggagggcagcggcagaggcgccgccctggtgagcgccgtggcctgcaagaaggcctgcatgctgggccagtag

SEQ ID NO: 3562 - protein, 466 aa, Artificial Sequence
  derived and/or modified sequence
MTTSPILQLLLRLSLCGLLLQRAETGSKGQTAGELYQRWERYRRECQETLAAAEPPSGLACNGSFDMYVCWDYAAPNATARASCPWYLPWHHHVAAGFVLRQCGSDGQWGLWRDHTQCENPEKNEAFLDQRLILERLQVMYTVGYSLSLATLLLALLILSLFRRLHCTRNYIHINLFTSFMLRAAAILSRDRLLPRPGPYLGDQALALWNQALAACRTAQIVTQYCVGANYTWLLVEGVYLHSLLVLVGGSEEGHFRYYLLLGWGAPALFVIPWVIVRYLYENTQCWERNEVKAIWWIIRTPILMTILINFLIFIRILGILLSKLRTRQMRCRDYRLRLARSTLTLVPLLGVHEVVFAPVTEEQARGALRFAKLGFEIFLSSFQGFLVSVLYCFINKEVQSEIRRGWHHCRLRRSLGEEQRQLPERAFRALPSGSGPGEVPTSRGLSSGTLPGPGNEASRELESYC

SEQ ID NO: 3563 - DNA, 1401 bp, Artificial Sequence
  derived and/or modified sequence
atgactacgagccccattctgcagttactgctcagacttagtctgtgtggcctgctgcttcagcgggccgagaccggaagcaaaggtcaaaccgccggggagctgtatcagagatgggagaggtatcggcgagagtgtcaggagacccttgccgctgcagagcccccttctggtctggcgtgtaacggttcatttgatatgtatgtatgctgggattacgcagcgcctaacgcaacagcccgcgcctcctgtccttggtacctgccatggcaccaccacgtggctgctgggttcgtgctccgtcaatgcgggtccgatggtcagtggggcctgtggagagatcacacacagtgtgaaaaccctgaaaaaaacgaagccttcctggatcagcgactcattcttgaacgcctgcaggtgatgtataccgttggatattccctgtccctggctacgctgctgctggctttgctaatcctgagccttttccgccgcttacactgcactcggaactacatccacatcaacttattcacctcctttatgctccgtgctgctgcaatcctatcccgcgacaggttgttaccaaggcccggcccttatctgggagaccaagcattggccctctggaaccaggcgctggctgcttgtcggactgcccaaatagtcactcaatactgtgtgggtgccaattacacttggcttctagtcgaaggggtttacctgcactcccttcttgtgcttgtgggggggagtgaggagggccattttcgctattatctgcttttgggttggggtgcccccgccctttttgtgatcccatgggttatagtgagatatctgtatgagaacacccaatgttgggagcggaatgaagtgaaggccatatggtggatcatcagaacacccattttgatgaccatcctgatcaatttccttatttttatccgaattctgggcattctgctttccaagcttcgtactcggcagatgcggtgccgagattaccggcttcggctcgctcggagcacactcacactggtgcccctactaggagttcacgaagttgtcttcgctcctgtgaccgaggagcaggctcggggggccctgcgcttcgcgaagctgggatttgaaatattcttgagcagctttcagggctttctggtgagcgtcctctattgcttcataaataaggaggtgcagtctgagattagacgaggatggcaccactgcaggctcaggcgctccctgggcgaggaacagaggcagctgcctgaacgcgccttcagggcgcttcccagtggaagcggacctggcgaagtgcccacctctaggggcctttcttctgggactctgcccggccctggcaatgaggcatctcgtgaactggagtcttattgttag

SEQ ID NO: 3564 - DNA, 1401 bp, Artificial Sequence
  derived and/or modified sequence
atgacaaccagtcccattctgcagctgctgctgagattatccctgtgcgggctgcttctgcagagagcggaaacaggttctaagggccagacggctggggaactttaccagcgctgggagagatatcgtcgagagtgccaggaaacgctggctgccgcggagccaccaagcggtctggcatgcaatgggagctttgacatgtacgtgtgttgggattatgccgcacctaacgccaccgcccgggcctcctgtccttggtatctcccttggcatcatcacgttgcagcaggcttcgtccttagacagtgcggatctgatggccagtggggcctttggcgggaccatacgcaatgtgaaaacccggaaaagaacgaagcttttctggaccaaagactcattttggagagattgcaggttatgtacacagtgggctattctctgtcactcgcaacactattgctggcactgctgatcctgagtctgtttcgccgtctgcactgcacaagaaactacatacatatcaatctgtttacttccttcatgctgcgagccgccgccatcttatccagggataggctgctgcccaggccaggcccgtatctaggcgaccaagctctcgccctctggaaccaggcactggctgcttgccgcacagcacagattgtgacccagtactgcgtgggcgcgaactatacttggctcctcgttgaaggcgtctatttgcatagcttgcttgtgctggtcggggggtccgaggaagggcacttccgctattatctgctgctcgggtggggggcccctgccttattcgtcattccttgggtgattgtgagatatctgtacgagaatacacagtgctgggagcgcaacgaagtgaaggcgatctggtggatcattaggaccccgattctcatgacaatcttaattaatttcctcatttttatcaggatattggggatccttctctcaaagttacgaacccgacagatgcgatgccgggactaccggttgcggctggccaggtccacactgacccttgttccgctcctgggagtgcacgaggtggtgttcgctccagtcactgaagaacaggcacgtggcgccctcagattcgctaagttagggtttgaaatttttctttctagctttcagggattcctggtgtccgttctgtactgctttatcaataaggaggtgcagtctgagatacggcgcggttggcaccattgtagactccggaggagccttggcgaggaacagagacagttgccagaaagggcattccgggcgcttccatccgggagcgggccaggcgaagttccaacatcaagaggtctgtcttccgggaccttgcccggtccaggtaatgaggcaagcagagaactcgagtcttactgctag

SEQ ID NO: 3565 - DNA, 2011 bp, Artificial Sequence
  derived and/or modified sequence
ggcagcggtggcaggggctgcaggagcaagtgaccaggagcaggactggggacaggcctgatcgcccctgcacgaaccagacccttcgccgccctcacgatgactacctctccgatcctgcagctgctgctgcggctctcactgtgcgggctgctgctccagagggcggagacaggctctaaggggcagacggcgggggagctgtaccagcgctgggaacggtaccgcagggagtgccaggagaccttggcagccgcggaaccgccttcaggcctcgcctgtaacgggtccttcgatatgtacgtctgctgggactatgctgcacccaatgccactgcccgtgcgtcctgcccctggtacctgccctggcaccaccatgtggctgcaggtttcgtcctccgccagtgtggcagtgatggccaatggggactttggagagaccatacacaatgtgagaacccagagaagaatgaggcctttctggaccaaaggctcatcttggagcggttgcaggtcatgtacactgtcggctactccctgtctctcgccacactgctgctagccctgctcatcttgagtttgttcaggcggctacattgcactagaaactatatccacatcaacctgttcacgtctttcatgctgcgagctgcggccattctcagccgagaccgtctgctacctcgacctggcccctaccttggggaccaggcccttgcgctgtggaaccaggccctcgctgcctgccgcacggcccagatcgtgacccagtactgcgtgggtgccaactacacgtggctgctggtggagggcgtctacctgcacagtctcctggtgctcgtgggaggctccgaggagggccacttccgctactacctgctcctcggctggggggcccccgcgcttttcgtcattccctgggtgatcgtcaggtacctgtacgagaacacgcagtgctgggagcgcaacgaagtcaaggccatttggtggattatacggacccccatcctcatgaccatcttgattaatttcctcatttttatccgcattcttggcattctcctgtccaagctgaggacacggcaaatgcgctgccgggattaccggctgaggctggctcgctccacgctgacgctggtgcccctgctgggtgtccacgaggtggtgtttgctcccgtgacagaggaacaggcccggggcgccctgcgcttcgccaagctcggctttgagatcttcctcagctccttccagggcttcctggtcagcgtcctctactgcttcatcaacaaggaggtgcagtcggagatccgccgtggctggcaccactgccgcctgcgccgcagcctgggcgaggagcaacgccagctcccggagcgcgccttccgggccctgccctccggctccggcccgggcgaggtccccaccagccgcggcttgtcctcggggaccctcccagggcctgggaatgaggccagccgggagttggaaagttactgctagggggcgggatccccgtgtctgttcagttagcatggatttattgagtgccaactgcgtgccaggcccagtacggaggacgctggggaaatggtgaaggaaacagaaaaaaggtccctgcccttctggagatgacaactgagtggggaaaacagaccgtgaacacaaaacatcaagttccacacacgctatggaatggttatgaagggaagcgagaagggggcctagggtggtctgggaggcgtctccaaggaggtgacacttaagccatccccgaaagaggtgaaagagatcactttggggagagctggagaacaggattctaggcggaagcgatagcataggcaaaggcccttgggcaggaaggcgctcagccttggctggagtagaattaagtcagagccaacaggtggggagagacagagaagtgggcaggggcacccaagttgggatttcatttcaggtgcattggagattcttaggagtgtctcttgggggtaatattttatttttt

SEQ ID NO: 3566 - DNA, 3289 bp, Artificial Sequence
  derived and/or modified sequence
ggcagcggtggcaggggctgcaggagcaagtgaccaggagcaggactggggacaggcctgatcgcccctgcacgaaccagacccttcgccgccctcacgatgactacctctccgatcctgcagctgctgctgcggctctcactgtgcgggctgctgctccagagggcggagacaggctctaaggggcagacggcgggggagctgtaccagcgctgggaacggtaccgcagggagtgccaggagaccttggcagccgcggaaccgccttcaggcctcgcctgtaacgggtccttcgatatgtacgtctgctgggactatgctgcacccaatgccactgcccgtgcgtcctgcccctggtacctgccctggcaccaccatgtggctgcaggtttcgtcctccgccagtgtggcagtgatggccaatggggactttggagagaccatacacaatgtgagaacccagagaagaatgaggcctttctggaccaaaggctcatcttggagcggttgcaggtcatgtacactgtcggctactccctgtctctcgccacactgctgctagccctgctcatcttgagtttgttcaggcggctacattgcactagaaactatatccacatcaacctgttcacgtctttcatgctgcgagctgcggccattctcagccgagaccgtctgctacctcgacctggcccctaccttggggaccaggcccttgcgctgtggaaccaggccctcgctgcctgccgcacggcccagatcgtgacccagtactgcgtgggtgccaactacacgtggctgctggtggagggcgtctacctgcacagtctcctggtgctcgtgggaggctccgaggagggccacttccgctactacctgctcctcggctggggggcccccgcgcttttcgtcattccctgggtgatcgtcaggtacctgtacgagaacacgcagtgctgggagcgcaacgaagtcaaggccatttggtggattatacggacccccatcctcatgaccatcttgattaatttcctcatttttatccgcattcttggcattctcctgtccaagctgaggacacggcaaatgcgctgccgggattaccggctgaggctggctcgctccacgctgacgctggtgcccctgctgggtgtccacgaggtggtgtttgctcccgtgacagaggaacaggcccggggcgccctgcgcttcgccaagctcggctttgagatcttcctcagctccttccagggcttcctggtcagcgtcctctactgcttcatcaacaaggaggtgcagtcggagatccgccgtggctggcaccactgccgcctgcgccgcagcctgggcgaggagcaacgccagctcccggagcgcgccttccgggccctgccctccggctccggcccgggcgaggtccccaccagccgcggcttgtcctcggggaccctcccagggcctgggaatgaggccagccgggagttggaaagttactgctagggggcgggatccccgtgtctgttcagttagcatggatttattgagtgccaactgcgtgccaggcccagtacggaggacgctggggaaatggtgaaggaaacagaaaaaaggtccctgcccttctggagatgacaactgagtggggaaaacagaccgtgaacacaaaacatcaagttccacacacgctatggaatggttatgaagggaagcgagaagggggcctagggtggtctgggaggcgtctccaaggaggtgacacttaagccatccccgaaagaggtgaaagagatcactttggggagagctggagaacaggattctaggcggaagcgatagcataggcaaaggcccttgggcaggaaggcgctcagccttggctggagtagaattaagtcagagccaacaggtggggagagacagagaagtgggcaggggcacccaagttgggatttcatttcaggtgcattggagattcttaggagtgtctcttgggggtaatattttattttttaaaaaatgaggatgtcactcttacccaggttggtcttgaactcctgggctcaagcaatcctcccaccacgggtctctcaaagtgctgggattacaggcgtgagccaccgcacccggcttttttttttttttttaaacggagtctcactctgtcacccaggctggagtgcagtggtgcaatttcagctcactgcaccctccacctcccgagttcaagcctcccgggtagctgggattacaggcaccgccaccatgcctggctaatttttgcattttcagtagagatagggtttctccatgttggccaggctggtctcgaactcctgacctcaagtgatccacccacctcagcctcccaaagtgctgggattacaggcataagccaccatgcccggcccaaatgggctaatgttttaaacagatccttcttgtctgccctgtaggaggacaaattatcaggggcaggggtggaagctggagcccagaaaggaggggactgcaggtgggaagtgatggtggctggaccaggatggaggccactgaggggtatgaagcagtcggatttgaagctgtttaaaaggtggaggtgagaggatttcatgaaggagcacatgaggacacagcagcagagaggactccttggctttggatggtggagagactaaagatagagagattgggttcgggtagggggagaaccacgtgtgctctttggaaaggttaggctggcagtgtttgtaggacatgacaggacactgagtgtaagggtctggagctctcaggagaggggcgagctggagatagtaatgtgagaggcactgggtcctgagagggtgatttggtgtggaccggagcacaggtgaggcaaggcaggcctcgcagctgaaactttatatccagagcagccagggccactgctggctgcggagtgaggacgcatatccccactgtccttagatgggtggcccctggaacctgggagaatgagggggcatgctgacagtctcattgtggctggaccacctgtacatacacccacaagaccctcacccctaaatcctccccctacacatatgcacacttaagttaccgtatgggtgttgtcgagcattttccctggggtctgtggctccctggaccgacatgccccaaagctgaactcagccttttcaagcttgcggccctgctgcccaattcccctacaccctgccttgtgggttctcgcggggtgggggccttagggcaaggctcttgtaaataaagtataagaaacagttgc

SEQ ID NO: 3567 - DNA, 1401 bp, Artificial Sequence
  derived and/or modified sequence
atgaccaccagccccatcctgcagctgctgctgcggctgagcctgtgtggcctgctgctgcagagagctgagaccggcagcaagggccagacagctggggagctgtaccagcgctgggagcgctacagaagagagtgccaggagaccctggccgctgctgagcccccatctggcctggcctgcaatggcagctttgacatgtatgtgtgctgggactatgctgccccaaatgccacagcccgggccagctgcccctggtacctgccctggcaccaccacgtggccgccggctttgtgctgcggcagtgtggcagtgatggccagtggggcctgtggagggaccacacccagtgtgaaaatcctgagaagaatgaggccttcctggaccagaggctcatcctggagcggctgcaggtgatgtacacagtgggctacagcctgagcctggccaccctgctgctggccctgctgatcctgagcctcttccggcggctgcactgcaccaggaactacatccacatcaacctcttcaccagcttcatgctgcgggctgctgccatcctgagccgggaccggctgctgcccaggcctggcccctacctgggggaccaggccctggccctgtggaaccaggccctggccgcctgcaggacagcccagatcgtgacccagtactgtgtgggcgccaactacacctggctgctggtggagggcgtgtacctgcacagcctgctggtgctggtgggcggcagcgaggagggccacttccgctactacctgctgctgggctggggcgccccagccctcttcgtcatcccctgggtgattgtgcgctacctgtatgagaacacccagtgctgggagagaaatgaggtgaaggccatctggtggatcatccgcacccccatcctgatgaccatcctgatcaacttcctgatcttcatccgcatcctgggcatcctgctgagcaagctgcggacccggcagatgcgctgccgggactaccgcctgcggctggcccggagcaccctgaccctggtgcccctgctgggcgtgcatgaggtggtgtttgcccctgtgacagaggagcaggcccggggggccctgcgctttgccaagctgggctttgagatcttcctgagcagcttccagggcttcctggtgtctgtgctgtactgcttcatcaacaaggaggtgcagagcgagatccggcggggctggcaccactgccgcctgcggcgcagcctgggggaggagcagaggcagctgcctgagcgggccttccgggccctgcccagcggcagcggccctggagaggtgcccaccagccggggcctgagcagcggcaccctgcccggccctggaaatgaggccagccgggagctggagagctactgctag

SEQ ID NO: 3568 - DNA, 1401 bp, Artificial Sequence
  derived and/or modified sequence
atgaccaccagccccatcctgcagctgctgctgcggctgagcctgtgtggtctgctattgcagcgtgccgagactggcagtaagggtcagaccgcaggcgaactgtatcagaggtgggagaggtatagaagagaatgccaggagacactggctgccgcggaacccccttccggattggcgtgtaacggatccttcgacatgtatgtttgctgggactatgcagctccaaatgctaccgcgagggcgagttgtccatggtacctgccctggcaccaccatgtagcagctggctttgtcttgagacaatgcggatctgacggtcagtggggactgtggagagatcatacacagtgtgagaaccccgagaagaatgaggcctttctcgaccaacgactgatactagaaaggttgcaggtgatgtacaccgtgggttacagcttgagtcttgctaccctactactggcattattaatcctctctttgtttaggcgcctgcactgcaccaggaattacatccatattaacttattcacttctttcatgctcagggcagcggctatcctatcaagggaccgccttctacctaggccagggccttatctcggtgaccaagccttagccctgtggaaccaggcactggctgcctgtaggacagctcagatcgttacacaatactgcgtaggggccaactacacctggttactggtggagggtgtctacctgcatagcctcctggttctagttggtgggtctgaagagggacatttccgctactatctcttactcggatggggcgcccctgccttgttcgtcatcccttgggtgatagtgcggtatctgtacgagaatactcagtgttgggagcggaacgaggtcaaggccatctggtggatcatcagaactccaattctcatgacaatcttgattaacttcctgatctttatcagaattctagggattcttctctcgaagctgagaacacggcagatgagatgtcgcgattaccgcctccggttggcgcggagtacactgaccctcgtaccccttttaggagtgcacgaggtggttttcgcccccgttaccgaggagcaggcacggggggcacttagatttgccaagctcggcttcgagatatttctgtcttcattccaggggttcttagtgtccgttctctactgtttcattaataaggaagtgcagtcagagatccgaagagggtggcaccactgtcgtttacggcgctccctgggagaggaacagcggcaactccccgaacgggcattccgcgcccttccatcaggaagtggccccggggaagtgccaacttctcgcggactctctagcgggaccctacccggaccgggtaacgaggcttcacgcgaactggagtcctactgttag

SEQ ID NO: 3569 - DNA, 1401 bp, Artificial Sequence
  derived and/or modified sequence
atgaccaccagccccatcctgcagctgctgctgcggctgagcctgtgtggcctgctcctccagcgggctgagaccggaagtaaggggcagacagctggagaactgtaccagcggtgggagaggtaccgacgcgaatgtcaagagactcttgctgccgccgagccgccgagcggcctggcttgcaacggaagctttgatatgtacgtgtgctgggattacgccgcgcccaatgccacagcccgcgcttcttgcccctggtatttgccctggcaccaccatgttgcagcaggcttcgtgctccgccagtgcggcagcgacggacagtggggtctctggagagatcacacccagtgcgaaaatcccgagaaaaatgaggctttcctagatcagagactgattctcgagcggcttcaggtgatgtacaccgtggggtacagcctttccctcgcgaccctgctcttggccctgctcatactgagcctatttaggcgcctccattgtactcgtaactatatccacatcaatctgtttacatctttcatgctgcgcgctgctgccatcctgtcacgagacaggcttctgccacgtccaggtccttacttaggcgaccaagcactcgccttgtggaatcaggcgttagcagcctgccgtactgcgcagatagtgactcagtattgtgtgggtgccaactacacatggctgctagtggaaggcgtttacttgcactccctcctcgtacttgtgggaggtagcgaggagggtcatttcaggtactacctactcctcggatggggggcccccgctctgtttgttatcccgtgggttatcgtgcgttacctctatgaaaatacccagtgctgggagcggaacgaggtgaaagctatctggtggattattcgcacaccaattttaatgaccattctcatcaactttcttatttttatccgcatcctgggcatcctgctgtctaagttgcgtaccaggcaaatgcgctgtagggactataggctgcggctcgctaggagcacactgactttggtgcctctgctgggtgttcatgaagttgtgttcgcccctgtcaccgaagagcaggccaggggggccctgcggttcgccaaattaggctttgagatatttctgagtagctttcagggtttcctggtgtccgttctgtactgctttataaataaggaggttcaatctgaaatccgccgtggatggcaccactgtaggctgaggcgaagtcttggggaagaacagcggcagctccccgaacgtgcattcagagccttgccttctggatctggccctggggaggtccccacctctcgtggcctgtcctccggcaccctccccggcccgggcaatgaagccagccgggaactggagtcatattgctag

SEQ ID NO: 3570 - DNA, 1401 bp, Artificial Sequence
  derived and/or modified sequence
atgaccacaagccccatcctccaactactgctgcgattgtctctgtgtggtctcctgctccagagggctgagacggggtccaaaggacagactgccggagaactctatcaacgctgggaacggtaccggagggagtgccaggaaactctcgccgctgccgaacctccatctggactggcttgcaatgggtcattcgatatgtatgtttgttgggactacgccgcacctaacgctacagctagggcctcctgcccttggtacctgccctggcatcatcacgttgccgctggtttcgtgcttcgtcagtgtggtagcgacggccagtggggactctggcgtgaccacacacagtgtgagaatccggaaaagaacgaagcttttctcgatcagagactcatactggagcgcctacaggtcatgtacacagtaggctattcactgtccttagctacccttctactggctttgttaatcctgtccctgttcaggagactccactgcacgagaaattatatccacattaatcttttcacctcttttatgttaagggcagccgcaattctgagtcgagatcgactgttgcctagaccagggccttatctgggcgaccaggcactcgcactctggaaccaggctcttgctgcctgtcgcaccgcccagatcgtcactcaatactgtgttggcgctaattacacctggctcctggttgagggcgtctatttgcacagtctcctggttctggtgggtggtagcgaggaggggcatttccggtactaccttctgctagggtggggagcacccgctctcttcgtgataccatgggtgatcgtgcggtacctgtacgaaaacacacagtgttgggagaggaatgaagtgaaggcaatctggtggattatcagaactcctattcttatgaccatccttatcaacttcctgatatttattcgcatactaggcatactactgtccaaactgcgaacacgacagatgcgatgcagggattacaggcttaggctggccagatctactctcactctggtcccactcctgggtgtccatgaggtcgtctttgcacctgtgactgaagaacaggcccgtggcgctctgaggtttgccaagctcggctttgaaatatttttgagttcctttcaggggtttttagtcagcgtgttatattgctttattaataaggaagtgcagtcagagattaggcgcggttggcatcattgtaggttacggaggtctctgggggaggaacagcgacagctcccagaaagagcttttagggccctccctagcggctcaggacccggtgaggttccaacgtctcggggattgtcttccgggacactccccggtccaggcaacgaggcgagccgagagcttgagtcgtattgctag

SEQ ID NO: 3571 - DNA, 1401 bp, Artificial Sequence
  derived and/or modified sequence
atgacaacctccccaatcctgcagctgctcctgcgactgtcactgtgtggtctcctgctgcagcgcgcagagacggggagcaaaggacaaacagccggagaattatatcagcgctgggagaggtaccgtagagaatgtcaggagacactggccgctgctgagccgcctagcggactggcctgcaacggatcattcgacatgtatgtttgttgggactacgccgctccaaatgccacagcgagagccagttgcccctggtacttgccctggcatcatcacgttgctgctggatttgtcctacgccagtgtggctccgacggacagtggggtctctggcgggaccacacacagtgcgaaaatcctgagaagaatgaggcattccttgaccagcgacttattctggagcgactgcaggttatgtatacagtgggctactctttgagcctagctacactcctactagccttgctcatactctcattatttaggcgtttgcattgtacccgcaactacatccatataaatctcttcaccagtttcatgctacgcgctgctgccatcctttcccgagaccggctgctgccaagacccggaccctatctaggggatcaggcactcgcactctggaaccaggcgcttgctgcttgccgcacggctcagatagttactcaatactgtgttggcgctaattacacttggctactcgtcgagggtgtatatcttcacagcctgttagtgctcgttggcggttctgaggaaggtcatttcaggtactacctcttgctggggtggggagctcccgcactgttcgtgattccttgggtgattgtcagatatttgtatgagaatacccagtgctgggagcgaaacgaggttaaggccatatggtggatcatacggactcccatactgatgacaattctgataaattttctcatctttatacggattctgggaatactcttatccaagttgcggactaggcagatgaggtgtcgtgactaccggcttcggctggctaggtctaccctgacgctggtacccctacttggagtgcacgaggtggttttcgcaccagttacagaggaacaggctcgtggggctctgcgttttgcgaaattaggattcgagatcttcctgtcaagtttccaaggattcctcgtctccgttctttactgttttattaacaaggaggtgcaatcagaaatccgacgaggctggcatcactgccgacttcgtcgctccctaggagaggagcagagacagcttcccgagagagcctttagggcactcccctcaggaagcggccctggggaggttccaacctccaggggtctatccagcgggacattgcccggtcctggaaacgaggccagtcgggaactcgagagttactgctag

SEQ ID NO: 3572 - DNA, 1401 bp, Artificial Sequence
  derived and/or modified sequence
atgaccaccagccccatcctgcagctgctgctgagactgagcctgtgcggcctgctgctgcagagagccgagaccggcagcaagggccagaccgccggcgagctgtaccagagatgggagagatacagaagagagtgccaggagaccctggccgccgccgagccccccagcggcctggcctgcaacggcagcttcgacatgtacgtgtgctgggactacgccgcccccaacgccaccgccagagccagctgcccctggtacctgccctggcaccaccacgtggccgccggcttcgtgctgagacagtgcggcagcgacggccagtggggcctgtggagagaccacacccagtgcgagaaccccgagaagaacgaggccttcctggaccagagactgatcctggagagactgcaggtgatgtacaccgtgggctacagcctgagcctggccaccctgctgctggccctgctgatcctgagcctgttcagaagactgcactgcaccagaaactacatccacatcaacctgttcaccagcttcatgctgagagccgccgccatcctgagcagagacagactgctgcccagacccggcccctacctgggcgaccaggccctggccctgtggaaccaggccctggccgcctgcagaaccgcccagatcgtgacccagtactgcgtgggcgccaactacacctggctgctggtggagggcgtgtacctgcacagcctgctggtgctggtgggcggcagcgaggagggccacttcagatactacctgctgctgggctggggcgcccccgccctgttcgtgatcccctgggtgatcgtgagatacctgtacgagaacacccagtgctgggagagaaacgaggtgaaggccatctggtggatcatcagaacccccatcctgatgaccatcctgatcaacttcctgatcttcatcagaatcctgggcatcctgctgagcaagctgagaaccagacagatgagatgcagagactacagactgagactggccagaagcaccctgaccctggtgcccctgctgggcgtgcacgaggtggtgttcgcccccgtgaccgaggagcaggccagaggcgccctgagattcgccaagctgggcttcgagatcttcctgagcagcttccagggcttcctggtgagcgtgctgtactgcttcatcaacaaggaggtgcagagcgagatcagaagaggctggcaccactgcagactgagaagaagcctgggcgaggagcagagacagctgcccgagagagccttcagagccctgcccagcggcagcggccccggcgaggtgcccaccagcagaggcctgagcagcggcaccctgcccggccccggcaacgaggccagcagagagctggagagctactgctag

SEQ ID NO: 3573 - protein, 382 aa, Artificial Sequence
  derived and/or modified sequence
MGDWSALGKLLDKVQAYSTAGGKVWLSVLFIFRILLLGTAVESAWGDEQSAFRCNTQQPGCENVCYDKSFPISHVRFWVLQIIFVSVPTLLYLAHVFYVMRKEEKLNKKEEELKVAQTDGVNVDMHLKQIEIKKFKYGIEEHGKVKMRGGLLRTYIISILFKSIFEVAFLLIQWYIYGFSLSAVYTCKRDPCPHQVDCFLSRPTEKTIFIIFMLVVSLVSLALNIIELFYVFFKGVKDRVKGKSDPYHATSGALSPAKDCGSQKYAYFNGCSSPTAPLSPMSPPGYKLVTGDRNNSSCRNYNKQASEQNWANYSAEQNRMGQAGSTISNSHAQPFDFPDDNQNSKKLAAGHELQPLAIVDQRPSSRASSRASSRPRPDDLEI

SEQ ID NO: 3574 - protein, 366 aa, Artificial Sequence
  derived and/or modified sequence
MGDWSALGKLLDKVQAYSTAGGKVWLSAWGDEQSAFRCNTQQPGCENVCYDKSFPISHVRFWVLQIIFVSVPTLLYLAHVFYVMRKEEKLNKKEEELKVAQTDGVNVDMHLKQIEIKKFKYGIEEHGKVKMRGGLLRTYIISILFKSIFEVAFLLIQWYIYGFSLSAVYTCKRDPCPHQVDCFLSRPTEKTIFIIFMLVVSLVSLALNIIELFYVFFKGVKDRVKGKSDPYHATSGALSPAKDCGSQKYAYFNGCSSPTAPLSPMSPPGYKLVTGDRNNSSCRNYNKQASEQNWANYSAEQNRMGQAGSTISNSHAQPFDFPDDNQNSKKLAAGHELQPLAIVDQRPSSRASSRASSRPRPDDLEI

SEQ ID NO: 3575 - DNA, 1149 bp, Artificial Sequence
  derived and/or modified sequence
atgggcgactggagcgccctgggcaagctgctggacaaggtgcaggcctacagcaccgccggcggcaaggtgtggctgagcgtgctgttcatcttcagaatcctgctgctgggcaccgccgtggagagcgcctggggcgacgagcagagcgccttcagatgcaacacccagcagcccggctgcgagaacgtgtgctacgacaagagcttccccatcagccacgtgagattctgggtgctgcagatcatcttcgtgagcgtgcccaccctgctgtacctggcccacgtgttctacgtgatgagaaaggaggagaagctgaacaagaaggaggaggagctgaaggtggcccagaccgacggcgtgaacgtggacatgcacctgaagcagatcgagatcaagaagttcaagtacggcatcgaggagcacggcaaggtgaagatgagaggcggcctgctgagaacctacatcatcagcatcctgttcaagagcatcttcgaggtggccttcctgctgatccagtggtacatctacggcttcagcctgagcgccgtgtacacctgcaagagagacccctgcccccaccaggtggactgcttcctgagcagacccaccgagaagaccatcttcatcatcttcatgctggtggtgagcctggtgagcctggccctgaacatcatcgagctgttctacgtgttcttcaagggcgtgaaggacagagtgaagggcaagagcgacccctaccacgccaccagcggcgccctgagccccgccaaggactgcggcagccagaagtacgcctacttcaacggctgcagcagccccaccgcccccctgagccccatgagcccccccggctacaagctggtgaccggcgacagaaacaacagcagctgcagaaactacaacaagcaggccagcgagcagaactgggccaactacagcgccgagcagaacagaatgggccaggccggcagcaccatcagcaacagccacgcccagcccttcgacttccccgacgacaaccagaacagcaagaagctggccgccggccacgagctgcagcccctggccatcgtggaccagagacccagcagcagagccagcagcagagccagcagcagacccagacccgacgacctggagatctag

SEQ ID NO: 3576 - DNA, 1101 bp, Artificial Sequence
  derived and/or modified sequence
atgggcgactggagcgccctgggcaagctgctggacaaggtgcaggcctacagcaccgccggcggcaaggtgtggctgagcgcctggggcgacgagcagagcgccttcagatgcaacacccagcagcccggctgcgagaacgtgtgctacgacaagagcttccccatcagccacgtgagattctgggtgctgcagatcatcttcgtgagcgtgcccaccctgctgtacctggcccacgtgttctacgtgatgagaaaggaggagaagctgaacaagaaggaggaggagctgaaggtggcccagaccgacggcgtgaacgtggacatgcacctgaagcagatcgagatcaagaagttcaagtacggcatcgaggagcacggcaaggtgaagatgagaggcggcctgctgagaacctacatcatcagcatcctgttcaagagcatcttcgaggtggccttcctgctgatccagtggtacatctacggcttcagcctgagcgccgtgtacacctgcaagagagacccctgcccccaccaggtggactgcttcctgagcagacccaccgagaagaccatcttcatcatcttcatgctggtggtgagcctggtgagcctggccctgaacatcatcgagctgttctacgtgttcttcaagggcgtgaaggacagagtgaagggcaagagcgacccctaccacgccaccagcggcgccctgagccccgccaaggactgcggcagccagaagtacgcctacttcaacggctgcagcagccccaccgcccccctgagccccatgagcccccccggctacaagctggtgaccggcgacagaaacaacagcagctgcagaaactacaacaagcaggccagcgagcagaactgggccaactacagcgccgagcagaacagaatgggccaggccggcagcaccatcagcaacagccacgcccagcccttcgacttccccgacgacaaccagaacagcaagaagctggccgccggccacgagctgcagcccctggccatcgtggaccagagacccagcagcagagccagcagcagagccagcagcagacccagacccgacgacctggagatctag

SEQ ID NO: 3577 - DNA, 1149 bp, Artificial Sequence
  derived and/or modified sequence
atgggggattggtctgccttaggtaaacttcttgataaagtccaggcatatagtactgccggtggtaaagtatggttgtcagtgcttttcatctttaggattcttctcctgggtacagctgtggagagcgcctggggcgacgagcagtctgcctttagatgtaatacccaacagcctgggtgcgaaaatgtgtgttacgataaaagttttccgataagccacgtgcgattttgggtccttcaaatcatattcgtttccgtgcccactctcttgtacttggcccatgtcttctatgtcatgagaaaggaagagaaacttaacaaaaaagaggaggaactcaaggtcgctcagaccgacggcgtaaatgtcgacatgcatctgaagcagatcgaaatcaaaaagtttaaatatggcatcgaagagcatgggaaagtgaagatgagaggcgggttattgcgaacgtacatcattagcatcctgtttaaatccatttttgaagtcgctttcctcctgatacagtggtacatctacggcttcagcctgtctgcggtttatacatgcaaaagggatccttgtccacatcaggtcgattgctttctgtctcgccccaccgaaaaaacgatctttattatttttatgttggtggtcagcctcgtctcactagcactcaacatcattgagttgttctatgtgttttttaaaggagtcaaggatagggtgaaaggaaagagcgatccctatcatgcgacgagtggagctctgtctcccgccaaggattgtgggagccagaagtatgcttatttcaacgggtgttcaagcccaacagcgcccttgtctcccatgagcccgccgggttataagctggtgaccggggataggaacaactcaagctgtcgcaactacaataagcaggcgagtgaacagaactgggccaactattcagccgaacaaaatcgcatgggacaggctggatccaccatatccaattcacacgcacagccattcgactttccagatgacaatcagaatagtaaaaaactcgccgccggtcacgaactgcagccgcttgcgattgtggatcagcgaccctcctcccgcgctagctcaagagctagtagccggccgcgcccagacgacctggagatttag

SEQ ID NO: 3578 - DNA, 1101 bp, Artificial Sequence
  derived and/or modified sequence
atgggtgattggagtgctttggggaagttgctggataaggtgcaggcttactcaacagcaggaggaaaggtttggctttctgcttggggggacgaacagtcagccttcaggtgtaacacacagcagccgggatgtgagaacgtgtgttacgataagtcctttccgatctcccatgtgaggttctgggttctccagataatttttgtgagcgtcccaacattgctgtacctcgcccacgtgttctacgttatgcggaaggaggaaaaactaaacaagaaagaggaagagctcaaagtcgctcagacagatggcgtgaatgttgatatgcacctgaagcagatagaaataaaaaagtttaagtacggcatcgaggagcacggcaaggtgaagatgcggggtggcctcttgcggacatacatcatatccatactgttcaaatcaatttttgaagtcgccttcctgctgattcagtggtatatttatggattttccttaagcgccgtgtacacatgtaaacgggatccctgcccccatcaggtggactgcttcttatctcgcccgacagaaaagaccatttttatcatcttcatgctcgtggtgagccttgtcagtcttgccttaaatatcattgagcttttttacgtgttctttaaaggcgtgaaggacagggtgaaggggaagtccgatccataccacgctacaagcggggcattgtcaccagcaaaagattgtggttctcagaagtacgcttatttcaacggctgctccagtcctacggcaccgcttagtcctatgtcacccccgggctacaagctggtgaccggggacaggaataattcctcatgcaggaattacaacaagcaggcgtccgagcagaattgggccaactactccgctgagcagaacagaatgggacaggccgggtccaccattagcaactctcatgcccagccatttgacttccccgatgataaccagaacagcaagaaattagccgcaggccacgaattgcaacccctcgcaatcgtggaccaaagacctagcagcagagccagttctcgtgcttcgtcgaggccacggcctgacgacctggaaatctag

SEQ ID NO: 3579 - DNA, 3037 bp, Artificial Sequence
  derived and/or modified sequence
gcgtgaggaaagtaccaaacagcagcggagttttaaactttaaatagacaggtctgagtgcctgaacttgccttttcattttacttcatcctccaaggagttcaatcacttggcgtgacttcactacttttaagcaaaagagtggtgcccaggcaacatgggtgactggagcgccttaggcaaactccttgacaaggttcaagcctactcaactgctggagggaaggtgtggctgtcagtacttttcattttccgaatcctgctgctggggacagcggttgagtcagcctggggagatgagcagtctgcctttcgttgtaacactcagcaacctggttgtgaaaatgtctgctatgacaagtctttcccaatctctcatgtgcgcttctgggtcctgcagatcatatttgtgtctgtacccacactcttgtacctggctcatgtgttctatgtgatgcgaaaggaagagaaactgaacaagaaagaggaagaactcaaggttgcccaaactgatggtgtcaatgtggacatgcacttgaagcagattgagataaagaagttcaagtacggtattgaagagcatggtaaggtgaaaatgcgaggggggttgctgcgaacctacatcatcagtatcctcttcaagtctatctttgaggtggccttcttgctgatccagtggtacatctatggattcagcttgagtgctgtttacacttgcaaaagagatccctgcccacatcaggtggactgtttcctctctcgccccacggagaaaaccatcttcatcatcttcatgctggtggtgtccttggtgtccctggccttgaatatcattgaactcttctatgttttcttcaagggcgttaaggatcgggttaagggaaagagcgacccttaccatgcgaccagtggtgcgctgagccctgccaaagactgtgggtctcaaaaatatgcttatttcaatggctgctcctcaccaaccgctcccctctcgcctatgtctcctcctgggtacaagctggttactggcgacagaaacaattcttcttgccgcaattacaacaagcaagcaagtgagcaaaactgggctaattacagtgcagaacaaaatcgaatggggcaggcgggaagcaccatctctaactcccatgcacagccttttgatttccccgatgataaccagaattctaaaaaactagctgctggacatgaattacagccactagccattgtggaccagcgaccttcaagcagagccagcagtcgtgccagcagcagacctcggcctgatgacctggagatctagatacaggcttgaaagcatcaagattccactcaattgtggagaagaaaaaaggtgctgtagaaagtgcaccaggtgttaattttgatccggtggaggtggtactcaacagccttattcatgaggcttagaaaacacaaagacattagaatacctaggttcactgggggtgtatggggtagatgggtggagagggaggggataagagaggtgcatgttggtatttaaagtagtggattcaaagaacttagattataaataagagttccattaggtgatacatagataagggctttttctccccgcaaacacccctaagaatggttctgtgtatgtgaatgagcgggtggtaattgtggctaaatatttttgttttaccaagaaactgaaataattctggccaggaataaatacttcctgaacatcttaggtcttttcaacaagaaaaagacagaggattgtccttaagtccctgctaaaacattccattgttaaaatttgcactttgaaggtaagctttctaggcctgaccctccaggtgtcaatggacttgtgctactatatttttttattcttggtatcagtttaaaattcagacaaggcccacagaataagattttccatgcatttgcaaatacgtatattctttttccatccacttgcacaatatcattaccatcactttttcatcattcctcagctactactcacattcatttaatggtttctgtaaacatttttaagacagttgggatgtcacttaacattttttttttgagctaaagtcagggaatcaagccatgcttaatatttaacaatcacttatatgtgtgtcgaagagtttgttttgtttgtcatgtattggtacaagcagatacagtataaactcacaaacacagatttgaaaataatgcacatatggtgttcaaatttgaacctttctcatggatttttgtggtgtgggccaatatggtgtttacattatataattcctgctgtggcaagtaaagcacactttttttttctcctaaaatgtttttccctgtgtatcctattatggatactggttttgttaattatgattctttattttctctcctttttttaggatatagcagtaatgctattactgaaatgaatttcctttttctgaaatgtaatcattgatgcttgaatgatagaattttagtactgtaaacaggctttagtcattaatgtgagagacttagaaaaaatgcttagagtggactattaaatgtgcctaaatgaattttgcagtaactggtattcttgggttttcctacttaatacacagtaattcagaacttgtattctattatgagtttagcagtcttttggagtgaccagcaactttgatgtttgcactaagattttatttggaatgcaagagaggttgaaagaggattcagtagtacacatacaactaatttatttgaactatatgttgaagacatctaccagtttctccaaatgccttttttaaaactcatcacagaagattggtgaaaatgctgagtatgacacttttcttcttgcatgcatgtcagctacataaacagttttgtacaatgaaaattactaatttgtttgacattccatgttaaactacggtcatgttcagcttcattgcatgtaatgtagacctagtccatcagatcatgtgttctggagagtgttctttattcaataaagttttaatttagtataaacata

SEQ ID NO: 3580 - DNA, 1393 bp, Artificial Sequence
  derived and/or modified sequence
aaaaagcttttacgaggtatcagcacttttctttcattagggggaaggcgtgaggaaagtaccaaacagcagcggagttttaaactttaaatagacaggtctgagtgcctgaacttgccttttcattttacttcatcctccaaggagttcaatcacttggcgtgacttcactacttttaagcaaaagagtggtgcccaggcaacatgggtgactggagcgccttaggcaaactccttgacaaggttcaagcctactcaactgctggagggaaggtgtggctgtcagcctggggagatgagcagtctgcctttcgttgtaacactcagcaacctggttgtgaaaatgtctgctatgacaagtctttcccaatctctcatgtgcgcttctgggtcctgcagatcatatttgtgtctgtacccacactcttgtacctggctcatgtgttctatgtgatgcgaaaggaagagaaactgaacaagaaagaggaagaactcaaggttgcccaaactgatggtgtcaatgtggacatgcacttgaagcagattgagataaagaagttcaagtacggtattgaagagcatggtaaggtgaaaatgcgaggggggttgctgcgaacctacatcatcagtatcctcttcaagtctatctttgaggtggccttcttgctgatccagtggtacatctatggattcagcttgagtgctgtttacacttgcaaaagagatccctgcccacatcaggtggactgtttcctctctcgccccacggagaaaaccatcttcatcatcttcatgctggtggtgtccttggtgtccctggccttgaatatcattgaactcttctatgttttcttcaagggcgttaaggatcgggttaagggaaagagcgacccttaccatgcgaccagtggtgcgctgagccctgccaaagactgtgggtctcaaaaatatgcttatttcaatggctgctcctcaccaaccgctcccctctcgcctatgtctcctcctgggtacaagctggttactggcgacagaaacaattcttcttgccgcaattacaacaagcaagcaagtgagcaaaactgggctaattacagtgcagaacaaaatcgaatggggcaggcgggaagcaccatctctaactcccatgcacagccttttgatttccccgatgataaccagaattctaaaaaactagctgctggacatgaattacagccactagccattgtggaccagcgaccttcaagcagagccagcagtcgtgccagcagcagacctcggcctgatgacctggagatctagatacaggcttgaaagcatcaagattccactcaattgtggagaagaaaaaaggtgctgtagaaagtgcaccaggtgttaattttgatcc

SEQ ID NO: 3581 - DNA, 1149 bp, Artificial Sequence
  derived and/or modified sequence
atgggagactggagcgccctgggcaagctgctggacaaggtgcaggcctacagcacagctgggggcaaggtgtggctgtctgtgctcttcatcttccgcatcctgctgctgggcacagctgtggagagcgcctggggagatgagcagagcgccttccgctgcaacacccagcagcccggctgtgaaaatgtgtgctatgacaagagcttccccatcagccacgtgcgcttctgggtgctgcagatcatctttgtgtctgtgcccaccctgctgtacctggcccacgtgttctacgtgatgaggaaggaggagaagctgaacaagaaggaggaggagctgaaggtggcccagacagatggagtgaatgtggacatgcacctgaagcagatcgagatcaagaagttcaagtatggaattgaggagcacggcaaggtgaagatgagaggaggcctgctgcggacctacatcatcagcatcctcttcaagagcatctttgaggtggccttcctgctgatccagtggtacatctacggcttcagcctgtctgctgtgtacacctgcaagagggacccctgcccccaccaggtggactgcttcctgagccggcccacagagaagaccatcttcatcatcttcatgctggtggtgtccctggtgtccctggccctgaacatcatcgagctgttctacgtgttcttcaagggcgtgaaggacagagtgaagggcaagagtgacccctaccacgccaccagcggggccctgagccctgccaaggactgtggcagccagaagtatgcctacttcaacggctgcagcagccccacagcccccctgagccccatgagccccccaggctacaagctggtgactggagacaggaacaacagcagctgcaggaactacaacaagcaggccagcgagcagaactgggccaactacagcgctgagcagaacaggatgggccaggccggcagcaccatcagcaacagccacgcccagccctttgacttcccagatgacaaccagaacagcaagaagctggccgccggccacgagctgcagcccctggccatcgtggaccagaggcccagcagccgggccagcagccgggccagcagccggcccaggccagatgacctggagatctag

SEQ ID NO: 3582 - DNA, 1101 bp, Artificial Sequence
  derived and/or modified sequence
atgggagactggagcgccctgggcaagctgctggacaaggtgcaggcctacagcacagctgggggcaaggtgtggctgagcgcctggggagatgagcagagcgccttccgctgcaacacccagcagcccggctgtgaaaatgtgtgctatgacaagagcttccccatcagccacgtgcgcttctgggtgctgcagatcatctttgtgtctgtgcccaccctgctgtacctggcccacgtgttctacgtgatgaggaaggaggagaagctgaacaagaaggaggaggagctgaaggtggcccagacagatggagtgaatgtggacatgcacctgaagcagatcgagatcaagaagttcaagtatggaattgaggagcacggcaaggtgaagatgagaggaggcctgctgcggacctacatcatcagcatcctcttcaagagcatctttgaggtggccttcctgctgatccagtggtacatctacggcttcagcctgtctgctgtgtacacctgcaagagggacccctgcccccaccaggtggactgcttcctgagccggcccacagagaagaccatcttcatcatcttcatgctggtggtgtccctggtgtccctggccctgaacatcatcgagctgttctacgtgttcttcaagggcgtgaaggacagagtgaagggcaagagtgacccctaccacgccaccagcggggccctgagccctgccaaggactgtggcagccagaagtatgcctacttcaacggctgcagcagccccacagcccccctgagccccatgagccccccaggctacaagctggtgactggagacaggaacaacagcagctgcaggaactacaacaagcaggccagcgagcagaactgggccaactacagcgctgagcagaacaggatgggccaggccggcagcaccatcagcaacagccacgcccagccctttgacttcccagatgacaaccagaacagcaagaagctggccgccggccacgagctgcagcccctggccatcgtggaccagaggcccagcagccgggccagcagccgggccagcagccggcccaggccagatgacctggagatctag

SEQ ID NO: 3583 - DNA, 1149 bp, Artificial Sequence
  derived and/or modified sequence
atgggcgactggagcgccctgggcaagctgctggacaaggtgcaggcgtacagcacagccggtggaaaagtgtggctttccgtgctgtttattttccgcatcctattacttggcaccgccgtggagtccgcctggggggacgagcagtccgccttcagatgtaacacacagcaaccaggttgcgagaatgtgtgttatgataagagtttccccatcagtcatgtgaggttctgggtcctccagataatatttgtgagtgtgccaaccctgctgtacctagctcacgtgttctatgtcatgcggaaggaggagaagcttaacaagaaggaggaagagctgaaagttgcacagactgatggagttaacgttgatatgcatctgaaacagattgaaataaagaaattcaagtatggaatcgaggaacatgggaaggtcaagatgcgtggagggcttttgcggacttacataatttcgatactcttcaagtctatatttgaggttgcttttctactgattcagtggtatatctatggtttctccctgagcgctgtctacacctgcaaacgcgatccttgtccacaccaggtggactgctttttatctcgccctaccgaaaagacaatctttatcatcttcatgcttgtggtcagtctggtttccttggctttgaatataatcgaactcttctacgtgttctttaagggagtcaaggaccgggtgaagggcaagtctgacccataccatgcaacatctggggccctctctccagccaaagattgtggcagtcagaaatacgcttatttcaatggctgtagctcgccaaccgctcccctctctcccatgtcccccccagggtataagttggttaccggggatcgcaacaacagtagttgccggaactataacaaacaggcgtctgagcaaaactgggcaaactacagcgccgaacaaaatagaatgggccaagccggttcaactatctccaattctcatgcccagcctttcgatttcccagatgataaccagaacagcaaaaagttggcggccggacacgaacttcaacccctggccatcgtagatcagagaccatctagcagagcctctagccgggcatctagtagaccaagacctgacgacctggaaatctag

SEQ ID NO: 3584 - DNA, 1101 bp, Artificial Sequence
  derived and/or modified sequence
atgggcgactggagcgccctgggcaagctgctggacaaggtgcaggcatactctacagctggcggcaaagtgtggctgtccgcgtggggtgatgaacaaagcgctttccgctgtaacacacaacagcctggatgtgaaaatgtgtgttacgacaagagctttccgataagccacgtgcgcttctgggtcttgcagataatttttgtgtcagtacctaccctgttatatctcgcacatgtgttttatgtaatgcgaaaagaggagaaattaaacaaaaaggaggaagaactcaaggttgcacagaccgacggggtgaacgtggacatgcaccttaagcaaattgagataaagaagttcaagtacggcatcgaggaacatggaaaggtgaagatgcgcggcgggctactgcgaacctatatcatctccattttgtttaagtctatctttgaggtggccttcctgttgattcagtggtacatttacgggttctcgctcagtgccgtgtatacttgcaagcgagatccttgcccgcaccaggtggactgctttttatcgcgcccgacggagaaaactatttttatcatttttatgcttgtggtgtcgctcgtttctctagctcttaacatcattgaactcttttacgtcttctttaaaggagtgaaagatagggtcaaggggaagtccgacccgtaccacgccacctcaggcgccctgtctcctgctaaggattgtggaagtcagaagtatgcttatttcaacggttgctcaagccctacggccccattgtccccaatgtcaccacccggttataagttagtgacaggtgataggaataatagcagctgtcggaattacaataaacaggcctccgaacagaattgggccaattattcagctgagcagaataggatgggacaagctggttctacgatctccaactcgcacgcacaaccatttgatttccccgacgacaatcagaatagtaaaaagctagctgcaggacacgagttgcagcccctggccatagtcgatcaacgaccgtcgagccgagcctccagtagagccagcagccgacctcgtcctgacgacctcgaaatttag

SEQ ID NO: 3585 - DNA, 1149 bp, Artificial Sequence
  derived and/or modified sequence
atgggtgactggtctgctcttggtaaactgctggataaagtccaggcatatagcacagccggtggcaaagtgtggctttcggttctcttcatattccgaatactgttgctggggactgccgtcgaatctgcctggggagatgagcagtccgcgttcagatgcaacacccagcagccgggatgcgagaatgtttgctacgataagagcttccccatctcccacgtgaggttttgggttcttcagataattttcgtgtctgtccctaccttattgtatctggcccacgttttctacgttatgcgcaaagaggaaaaacttaataagaaggaggaagaactgaaggtcgctcaaactgatggcgtcaatgtggacatgcacctgaaacagatcgagatcaaaaagtttaagtacggtatcgaggaacacgggaaggtgaagatgcggggaggtttgctgcgtacttacatcatcagcatcctgttcaagtcaatatttgaagtggcttttctgctgatccagtggtatatctacggattctcgctatctgctgtatatacctgcaagcgcgacccctgtccccaccaggttgattgctttctcagtcggccaaccgagaaaactatattcatcattttcatgctggtcgtgagccttgtttctctcgctctaaatattattgagttgttctatgtcttcttcaaaggtgttaaggatagagtgaaaggcaagtctgatccctaccacgctaccagcggggctctgtctcccgctaaggattgcggaagccagaaatatgcctacttcaacggatgttcctcacccaccgcaccactatctcccatgagtcctcccggatataagttggtaaccggagatagaaacaactcaagctgccgcaattataacaagcaggctagcgagcagaactgggccaactacagcgccgagcagaacagaatgggccaggccggaagtacgataagcaactcacacgcccagcctttcgacttccctgacgacaatcagaacagcaagaagctggccgctggacacgagcttcagccactggctatcgtcgatcagcgcccttcatcgcgggcttcctctcgcgcttcctcccgcccaagacctgacgacttggaaatctag

SEQ ID NO: 3586 - DNA, 1101 bp, Artificial Sequence
  derived and/or modified sequence
atgggggattggtcggccctggggaaacttctagacaaggtccaggcgtattcaacggctggcggaaaagtgtggctctccgcttggggagatgaacaatctgccttccggtgcaatacgcaacagcccggttgtgaaaacgtttgttacgacaaatcattccctatctcgcatgtgcggttctgggtgttgcagatcatctttgtgagtgtccctacactgctgtacttagcccacgtgttttacgtcatgcggaaggaggagaagttgaacaaaaaggaggaggagctcaaggtcgctcagacagacggcgtgaatgttgacatgcatcttaaacaaatagagatcaaaaagttcaaatacgggattgaggagcacggaaaggtgaagatgagaggagggctgttaagaacctacatcatttcaattctttttaagtccatatttgaagtcgcttttctgctgatccaatggtacatttacggattttcgcttagcgctgtctacacctgcaaacgcgatccttgccctcaccaggtcgactgctttctgagtagacctactgagaaaacaatatttatcatttttatgcttgtcgttagtctcgtgtctctagctcttaacatcattgagctcttttatgttttttttaaaggcgtgaaggaccgagtaaagggcaagtctgacccgtaccacgccactagcggggctttgtctccagctaaagactgtggcagccagaaatacgcttattttaacggttgcagctcacccaccgcgccactctcacctatgtctcccccaggatacaaactggtgaccggagatagaaataactcctcgtgtagaaactataataaacaagccagtgaacagaattgggccaattatagcgctgaacagaatagaatgggacaagctgggtccacaatttccaattcccacgcccaaccctttgatttcccagacgataatcagaattcaaaaaagctggccgcaggccatgagttacagcccctggccattgttgaccagagaccttccagtcgcgctagcagcagggcttcctcccgaccccgacccgatgatctcgaaatctag

SEQ ID NO: 3587 - protein, 283 aa, Artificial Sequence
  derived and/or modified sequence
MNWTGLYTLLSGVNRHSTAIGRVWLSVIFIFRIMVLVVAAESVWGDEKSSFICNTLQPGCNSVCYDQFFPISHVRLWSLQLILVSTPALLVAMHVAHQQHIEKKMLRLEGHGDPLHLEEVKRHKVHISGTLWWTYVISVVFRLLFEAVFMYVFYLLYPGYAMVRLVKCDVYPCPNTVDCFVSRPTEKTVFTVFMLAASGICIILNVAEVVYLIIRACARRAQRRSNPPSRKGSGFGHRLSPEYKQNEINKLLSEQDGSLKDILRRSPGTGAGLAEKSDRCSAC

SEQ ID NO: 3588 - protein, 84 aa, Artificial Sequence
  derived and/or modified sequence
MNWTGLYTLLSGVNRHSTAIGRVWLSVIFIFRIMVLVVAAESVWGDEKSSFICNTLQPGCNSVCYDQFFPISHVRLWSLQLILV

SEQ ID NO: 3589 - DNA, 852 bp, Artificial Sequence
  derived and/or modified sequence
atgaactggaccgggctgtacactttgctgagtggagtgaaccgtcattccacagcgatcggccgggtctggctctcagtgatttttatctttagaattatggtccttgtggtagctgccgagtccgtgtggggagatgaaaaatcctctttcatttgcaacaccctgcagccaggctgcaattccgtgtgttacgatcagttctttcctatttcacacgtgcgcctgtggagtctgcagctgatactggtttcaaccccagccttactggtggctatgcatgtggcacaccagcagcatatcgaaaaaaagatgctccgcctggaggggcacggagaccccctccacctggaagaggtcaaacggcacaaagtacatatctcagggaccctctggtggacctatgtgatttccgtcgtgtttcggttgctgttcgaggcagtgttcatgtatgttttctacttgctgtatcctgggtatgcaatggtgcgcctggtgaagtgcgatgtgtacccatgcccgaacacagtggactgcttcgtgagcaggccaaccgagaagacagttttcaccgtgttcatgctggctgcctctggtatttgcatcatcctcaacgtcgcagaagtcgtgtacctaattatcagagcctgtgctcgccgcgcacaacgcagatcaaatcctccgtccaggaaaggctctggattcggacacaggctgtccccggaatacaagcagaatgagattaacaagctgttgtcagagcaggacggctccttgaaagatatactcaggaggtctccgggtaccggagccggactagccgaaaagagcgatagatgcagcgcttgctag

SEQ ID NO: 3590 - DNA, 852 bp, Artificial Sequence
  derived and/or modified sequence
atgaattggacaggcttatataccttgttgtccggggttaacaggcactctacagccataggcagagtctggctgtccgtcatttttattttccggatcatggtccttgtggtcgcagctgaaagcgtttggggggatgagaaaagttcgtttatctgtaataccctccagcccggttgtaacagcgtgtgttatgaccagttcttcccgatcagccatgtccggttatggagtcttcagcttatcctggtgagcacaccagccctgctagttgcaatgcacgtggctcatcaacagcacattgagaaaaagatgctgagactggaaggtcatggcgatcctcttcatttagaggaggttaagcgccacaaagttcatatttccgggacgttatggtggacctacgtgatcagcgtcgtgttccgccttttatttgaggcagtgttcatgtacgtgttctatcttctctatcccggctatgccatggtgcgattggtgaaatgtgatgtttatccctgtccgaacacagtcgattgttttgtgtcacggcctacggaaaagactgtcttcacagtgttcatgctggccgcttccgggatttgtatcatcctgaatgtggcagaggtggtgtatctgattattcgggcatgtgcacggagagcacagaggaggtccaacccccctagtaggaagggctctggctttgggcatcgtctctctcctgagtacaagcagaacgagataaataaactgctgtcagagcaggatggttccctaaaagatatcctccgccgatccccaggaacgggagccgggctggctgagaaatctgatcgctgtagcgcctgctag

SEQ ID NO: 3591 - DNA, 852 bp, Artificial Sequence
  derived and/or modified sequence
atgaattggacgggcctatataccctgctgagcggcgtgaacagacattctaccgctatagggagggtttggctatcggtgattttcatcttccggatcatggtgttggtcgtcgccgcagaatctgtgtggggcgatgagaaatcatcattcatctgtaataccctacagccagggtgtaactccgtgtgttatgatcagttcttccccatctcacatgtgcgcttatggtccctccaactgattctggtctccacaccggccctcctcgttgctatgcatgtggcacatcagcagcacatcgaaaaaaaaatgttacgtcttgagggacatggcgacccactccatttggaagaggttaagagacacaaggtacatatcagcggcacactatggtggacctacgtgatttctgtggtctttagattgttgttcgaggccgtgtttatgtacgtcttctatttgctgtaccccggatacgctatggtgagactggttaagtgcgacgtctatccgtgcccgaacaccgtggattgctttgtatctcgccccactgaaaagaccgtttttaccgtgttcatgctagcggcctctgggatctgtatcatactcaatgttgctgaagtggtgtacctcatcatcagggcttgcgcaaggcgagcccaacgaaggtctaaccccccttctcggaagggctccggtttcggccatcgcctgtcacctgaatacaaacagaatgaaatcaacaagctactgtccgaacaagacgggagcttgaaggatatcctccggagaagcccaggaaccggcgccgggctggctgaaaagtccgataggtgctcggcctgttag

SEQ ID NO: 3592 - DNA, 255 bp, Artificial Sequence
  derived and/or modified sequence
atgaattggactggcctgtatactctgctatctggagtgaataggcacagcaccgcaataggtagagtgtggctgtcagttatctttatattcaggataatggtgctggtcgtggcagccgagagtgtgtggggcgacgagaagtctagttttatctgcaataccctgcaacccggttgtaactcagtgtgttatgaccagtttttcccaatctcccacgtaagactgtggtctttgcagctgatcctggtgtag

SEQ ID NO: 3593 - DNA, 1637 bp, Artificial Sequence
  derived and/or modified sequence
atatgactccccagcaccgggcggtgatgaattgggacgcaggcgcggagcccagggaccactccccctgcacagacatgagaccataggggacctgtctgggtggcctcagggataggcgctccccaaggtgtgaatgaggcaggatgaactggacaggtttgtacaccttgctcagtggcgtgaaccggcattctactgccattggccgagtatggctctcggtcatcttcatcttcagaatcatggtgctggtggtggctgcagagagtgtgtggggtgatgagaaatcttccttcatctgcaacacactccagcctggctgcaacagcgtttgctatgaccaattcttccccatctcccatgtgcggctgtggtccctgcagctcatcctagtttccaccccagctctcctcgtggccatgcacgtggctcaccagcaacacatagagaagaaaatgctacggcttgagggccatggggaccccctacacctggaggaggtgaagaggcacaaggtccacatctcagggacactgtggtggacctatgtcatcagcgtggtgttccggctgttgtttgaggccgtcttcatgtatgtcttttatctgctctaccctggctatgccatggtgcggctggtcaagtgcgacgtctacccctgccccaacacagtggactgcttcgtgtcccgccccaccgagaaaaccgtcttcaccgtcttcatgctagctgcctctggcatctgcatcatcctcaatgtggccgaggtggtgtacctcatcatccgggcctgtgcccgccgagcccagcgccgctccaatccaccttcccgcaagggctcgggcttcggccaccgcctctcacctgaatacaagcagaatgagatcaacaagctgctgagtgagcaggatggctccctgaaagacatactgcgccgcagccctggcaccggggctgggctggctgaaaagagcgaccgctgctcggcctgctgatgccacataccaggcaacctcccatcccacccccgaccctgccctgggcgagcccctccttctcccctgccggtgcacaggcctctgcctgctggggattactcgatcaaaaccttccttccctggctacttcccttcctcccggggccttccttttgaggagctggaggggtggggagctagaggccacctatgccagtgctcaaggttactgggagtgtgggctgcccttgttgcctgcacccttccctcttccctctccctctctctgggaccactgggtacaagagatgggatgctccgacagcgtctccaattatgaaactaatcttaaccctgtgctgtcagataccctgtttctggagtcacatcagtgaggagggatgtgggtaagaggagcagagggcaggggtgctgtggacatgtgggtggagaagggagggtggccagcactagtaaaggaggaatagtgcttgctggccacaaggaaaaggaggaggtgtctggggtgagggagttagggagagagaagcaggcagataagttggagcaggggttggtcaaggccacctctgcctctagtccccaaggcctctctctgcctgaaatgttacacattaaacaggattttacagtaaa

SEQ ID NO: 3594 - DNA, 1904 bp, Artificial Sequence
  derived and/or modified sequence
ctggtggcatagggcagacacgcctgcagacattctctgggaaagggcagcagcagccaggtgtggcagtgacagggaggtgtgaatgaggcaggatgaactggacaggtttgtacaccttgctcagtggcgtgaaccggcattctactgccattggccgagtatggctctcggtcatcttcatcttcagaatcatggtgctggtggtggctgcagagagtgtgtggggtgatgagaaatcttccttcatctgcaacacactccagcctggctgcaacagcgtttgctatgaccaattcttccccatctcccatgtgcggctgtggtccctgcagctcatcctagtttccaccccagctctcctcgtggccatgcacgtggctcaccagcaacacatagagaagaaaatgctacggcttgagggccatggggaccccctacacctggaggaggtgaagaggcacaaggtccacatctcagggacactgtggtggacctatgtcatcagcgtggtgttccggctgttgtttgaggccgtcttcatgtatgtcttttatctgctctaccctggctatgccatggtgcggctggtcaagtgcgacgtctacccctgccccaacacagtggactgcttcgtgtcccgccccaccgagaaaaccgtcttcaccgtcttcatgctagctgcctctggcatctgcatcatcctcaatgtggccgaggtggtgtacctcatcatccgggcctgtgcccgccgagcccagcgccgctccaatccaccttcccgcaagggctcgggcttcggccaccgcctctcacctgaatacaagcagaatgagatcaacaagctgctgagtgagcaggatggctccctgaaagacatactgcgccgcagccctggcaccggggctgggctggctgaaaagagcgaccgctgctcggcctgctgatgccacataccaggcaacctcccatcccacccccgaccctgccctgggcgagcccctccttctcccctgccggtgcacaggcctctgcctgctggggattactcgatcaaaaccttccttccctggctacttcccttcctcccggggccttccttttgaggagctggaggggtggggagctagaggccacctatgccagtgctcaaggttactgggagtgtgggctgcccttgttgcctgcacccttccctcttccctctccctctctctgggaccactgggtacaagagatgggatgctccgacagcgtctccaattatgaaactaatcttaaccctgtgctgtcagataccctgtttctggagtcacatcagtgaggagggatgtgggtaagaggagcagagggcaggggtgctgtggacatgtgggtggagaagggagggtggccagcactagtaaaggaggaatagtgcttgctggccacaaggaaaaggaggaggtgtctggggtgagggagttagggagagagaagcaggcagataagttggagcaggggttggtcaaggccacctctgcctctagtccccaaggcctctctctgcctgaaatgttacacattaaacaggattttacagtaaatgaagaggtggcttgtgtgtttgtcaagttctttctcctgcaacctctgacctcccccaggatgagctggccttggttttttactgattaagaaaggaacagggcaaaagaagtagttacttgagtagctgaagctgcaaatgaggaaatcactgtacttctgggccgcagagccagccccggagccattcctccctgttgcttttgttgttgtggttcttgtctttttcattgtctaataacagctttattgggatttagtttacatacctccttcctctgattttgaaaagattaaaaatgacaactccctctgaa

SEQ ID NO: 3595 - DNA, 1587 bp, Artificial Sequence
  derived and/or modified sequence
gggctgggctgacagtacctggtggcatagggcagacacgcctgcagacattctctgggaaagggcagcagcagccaggtgtgaatgaggcaggatgaactggacaggtttgtacaccttgctcagtggcgtgaaccggcattctactgccattggccgagtatggctctcggtcatcttcatcttcagaatcatggtgctggtggtggctgcagagagtgtgtggggtgatgagaaatcttccttcatctgcaacacactccagcctggctgcaacagcgtttgctatgaccaattcttccccatctcccatgtgcggctgtggtccctgcagctcatcctagtttccaccccagctctcctcgtggccatgcacgtggctcaccagcaacacatagagaagaaaatgctacggcttgagggccatggggaccccctacacctggaggaggtgaagaggcacaaggtccacatctcagggacactgtggtggacctatgtcatcagcgtggtgttccggctgttgtttgaggccgtcttcatgtatgtcttttatctgctctaccctggctatgccatggtgcggctggtcaagtgcgacgtctacccctgccccaacacagtggactgcttcgtgtcccgccccaccgagaaaaccgtcttcaccgtcttcatgctagctgcctctggcatctgcatcatcctcaatgtggccgaggtggtgtacctcatcatccgggcctgtgcccgccgagcccagcgccgctccaatccaccttcccgcaagggctcgggcttcggccaccgcctctcacctgaatacaagcagaatgagatcaacaagctgctgagtgagcaggatggctccctgaaagacatactgcgccgcagccctggcaccggggctgggctggctgaaaagagcgaccgctgctcggcctgctgatgccacataccaggcaacctcccatcccacccccgaccctgccctgggcgagcccctccttctcccctgccggtgcacaggcctctgcctgctggggattactcgatcaaaaccttccttccctggctacttcccttcctcccggggccttccttttgaggagctggaggggtggggagctagaggccacctatgccagtgctcaaggttactgggagtgtgggctgcccttgttgcctgcacccttccctcttccctctccctctctctgggaccactgggtacaagagatgggatgctccgacagcgtctccaattatgaaactaatcttaaccctgtgctgtcagataccctgtttctggagtcacatcagtgaggagggatgtgggtaagaggagcagagggcaggggtgctgtggacatgtgggtggagaagggagggtggccagcactagtaaaggaggaatagtgcttgctggccacaaggaaaaggaggaggtgtctggggtgagggagttagggagagagaagcaggcagataagttggagcaggggttggtcaaggccacctctgcctctagtccccaaggcctctctctgcctgaaatgttacacattaaacaggattttacagtaaatg

SEQ ID NO: 3596 - DNA, 484 bp, Artificial Sequence
  derived and/or modified sequence
cagcagcagccaggtgtggcagtgacagggagacactatctgcagaagcacagggagcctgctgtagaaagacttctgtctcagatacattgtttcatcctacctatcctaccgctttggaacggtgtgaccttgaggagttacttatctgagcttcagcttcttcatctggaaaatgggataacaggcttcctaaatgggtcgaaagaaaaaatgtgtgaatgaggcaggatgaactggacaggtttgtacaccttgctcagtggcgtgaaccggcattctactgccattggccgagtatggctctcggtcatcttcatcttcagaatcatggtgctggtggtggctgcagagagtgtgtggggtgatgagaaatcttccttcatctgcaacacactccagcctggctgcaacagcgtttgctatgaccaattcttccccatctcccatgtgcggctgtggtccctgcagctcatcctagttt

SEQ ID NO: 3597 - DNA, 852 bp, Artificial Sequence
  derived and/or modified sequence
atgaactggacaggcctgtacaccctgctgtctggagtgaacagacacagcacagccatcggccgggtgtggctgagcgtcatcttcatcttccgcatcatggtgctggtggtggccgctgagagcgtgtggggagatgagaagagcagcttcatctgcaacaccctgcagcccggctgcaacagcgtgtgctatgaccagttcttccccatcagccacgtgcggctgtggagcctgcagctgatcctggtgtccaccccagccctgctggtggccatgcacgtggcccaccagcagcacatcgagaagaagatgctgcggctggagggccatggagaccccctgcacctggaggaggtgaagaggcacaaggtgcacatcagcggcaccctgtggtggacctacgtgatctctgtggtgttccggctgctgtttgaagctgtgttcatgtatgtgttctacctgctgtacccaggctacgccatggtgcggctggtgaagtgtgatgtgtacccctgccccaacacagtggactgctttgtgtcccggcccacagagaagacagtgttcaccgtcttcatgctggccgccagcggcatctgcatcatcctgaatgtggccgaggtggtgtacctgatcatccgggcctgtgcccggcgggcccagaggaggagcaacccccccagcaggaaaggaagtggcttcggccaccggctgagccctgagtacaagcagaatgagatcaacaagctgctgtctgagcaggacggcagcctgaaggacatcctgcggcgcagccctggcactggagctggcctggccgagaagagtgaccgctgcagcgcctgctag

SEQ ID NO: 3598 - DNA, 255 bp, Artificial Sequence
  derived and/or modified sequence
atgaactggacaggcctgtacaccctgctgtctggagtgaacagacacagcacagccatcggccgggtgtggctgagcgtcatcttcatcttccgcatcatggtgctggtggtggccgctgagagcgtgtggggagatgagaagagcagcttcatctgcaacaccctgcagcccggctgcaacagcgtgtgctatgaccagttcttccccatcagccacgtgcggctgtggagcctgcagctgatcctggtgtag

SEQ ID NO: 3599 - DNA, 852 bp, Artificial Sequence
  derived and/or modified sequence
atgaactggaccggcctgtacaccctgctgagcggcgtgaaccggcacagtactgctattggaagggtttggctgtccgtgatattcattttccggatcatggtgctagtggtggcggccgagtctgtctggggtgatgagaagagtagcttcatttgtaacaccctccagcctggatgtaattccgtatgttatgaccagttcttccctatctcccacgtccggctgtggtcattgcagttgatcctggtgagtactccggccctgctggtcgccatgcatgtggcccaccagcagcatattgagaaaaaaatgttacggctggagggccacggcgatcctctgcacctggaagaggtcaagcgtcataaagtgcacatctctggcacactgtggtggacctacgttatttctgtggtgttcaggctgctctttgaggcagtgtttatgtatgttttctatctgctgtatcccgggtacgccatggttcggctggtcaagtgcgatgtatacccttgcccaaatacggtggattgtttcgtctcgaggcctacagaaaagactgtgttcacagttttcatgctggcagcttctgggatatgcatcatattgaatgtggcagaggtagtatatctgatcatccgggcttgtgcccggcgggcccagaggagatcaaatcctccaagtagaaagggctctggattcggccataggctatcacctgaatacaagcagaatgagatcaacaaactcctatccgaacaggatggttcactgaaagatatcctacgccgctctccaggaaccggggcaggtctcgccgaaaagtccgaccgatgtagtgcatgctag

SEQ ID NO: 3600 - DNA, 852 bp, Artificial Sequence
  derived and/or modified sequence
atgaactggaccggcctgtacaccctgctgagcggcgtgaaccggcactctactgccatcggcagagtctggctttccgtgattttcatctttaggatcatggtattggttgtggcagccgagtcagtttggggggacgaaaaatctagtttcatctgtaacacgcttcaaccaggatgtaactccgtctgttatgatcaattctttccaatctctcacgtgaggctgtggagcctgcagttaattcttgtgagtacccctgccctcctggtcgccatgcacgtcgcacatcagcagcacatcgagaagaaaatgcttcgattagagggccacggcgatcctctccaccttgaggaggtgaaacgtcataaagtccacatcagtggaacgctgtggtggacttacgttatttccgtagtctttaggcttttgttcgaagcagtgttcatgtacgtattctatttgctatatccgggctacgcgatggtgcggttagtgaagtgcgatgtgtatccatgccccaataccgttgattgctttgtcagtaggccgacggagaagactgtctttacagtttttatgttggccgcaagcgggatttgcatcattctgaacgttgctgaggtagtctatctcattattcgggcgtgtgctcggcgggcacaacgaaggtcaaaccccccttcgagaaagggatcagggtttggtcacaggctatctccagagtataagcagaacgagatcaacaagttgcttagcgagcaagacggctccctgaaggatatccttcggagatctccagggaccggcgctggccttgccgaaaagtctgatagatgttctgcctgttag

SEQ ID NO: 3601 - DNA, 852 bp, Artificial Sequence
  derived and/or modified sequence
atgaactggaccggcctgtacaccctgctgagcggcgtgaaccggcattccaccgctattgggcgtgtgtggctatccgtgatcttcatctttcggattatggttcttgtagtggccgccgaatccgtgtggggcgacgagaaaagctctttcatctgtaataccctccaacctggttgtaacagcgtctgttatgatcagtttttccccatttcacatgtgcgcctgtggagtctccaactgatcctggtgtctacaccagcgcttctggtggcaatgcacgtcgcgcaccagcagcacatcgagaaaaagatgctacgactggaggggcacggcgaccccctacacttggaggaggtgaagcggcataaagtgcatatctcaggcactttgtggtggacctacgtgataagtgtcgtgtttcgcttgctatttgaggcagtgttcatgtacgtattttatctgctgtaccctggttacgctatggtcaggctggttaagtgtgacgtgtacccctgccccaacaccgtggattgctttgtttctaggcccacggaaaaaacagtgttcacagttttcatgctggctgctagcggaatctgtatcatcctgaatgtggccgaggtagtctacctgattatacgcgcttgtgctcgccgggcccagcgaaggtccaatcccccctcacgcaagggatccggtttcggacacagactgagtcctgagtataagcaaaacgaaatcaacaagctcttgtccgaacaggacggtagcctcaaggacattctaagacgctctcccgggactggcgcaggtttggctgaaaagtcggatcgctgttccgcgtgttag

SEQ ID NO: 3602 - DNA, 255 bp, Artificial Sequence
  derived and/or modified sequence
atgaactggaccggcctgtacaccctgctgagcggcgtgaaccggcacagtaccgccattggaagggtctggctgagtgtgatcttcatctttaggatcatggttctggttgtggctgccgaatcagtgtggggagatgagaaatcctcttttatttgtaacaccctccagcccggttgtaactctgtgtgctacgatcagttttttcccatttcccatgttaggctgtggagcttgcaactgattttggtgtag

SEQ ID NO: 3603 - DNA, 852 bp, Artificial Sequence
  derived and/or modified sequence
atgaactggacaggtctttatacccttctctcaggcgtgaaccggcacagcacagccatcggcagagtgtggctgagtgtgatcttcatctttcgaatcatggtactagtggttgcggctgagtccgtgtggggtgatgaaaaaagttcatttatttgcaacactctccagcccggatgcaactctgtgtgttacgatcagttcttcccaattagccatgtgcggctatggagcctccagctgatcctcgtcagtacccctgccttgctggttgcaatgcacgtcgctcaccagcagcacattgaaaagaagatgctgcgtctggaaggccacggcgatccattgcacttggaggaagtaaaaagacataaggtccacatcagcggtactttatggtggacttatgttatctcggtcgtgttccggcttttattcgaagcggtgttcatgtacgtattctatctgctgtatcctgggtatgcaatggtgaggctcgtgaaatgtgatgtttacccatgtccaaatacagtggattgtttcgtatctagaccgactgagaaaaccgtttttacagtattcatgctagcagcttccggtatatgtattatcctgaacgttgccgaggtggtctacctgatcatccgggcatgcgcgagaagggcccagagacgttcaaacccaccatcaaggaaggggagtggctttggacacagactcagcccagagtacaagcagaacgaaattaataaactcctgtcggagcaggatggctcgctcaaggacatcctgcgtcgctcaccgggaaccggcgctggactggccgagaagagcgaccgatgttctgcctgctag

SEQ ID NO: 3604 - DNA, 852 bp, Artificial Sequence
  derived and/or modified sequence
atgaattggacggggctttacactctcctctccggggtgaacagacattccactgccatcggtcgggtgtggctgtcagtgatcttcatctttagaattatggtccttgtcgtggcagctgaatccgtttggggagatgagaaatctagcttcatttgcaacaccctgcaacctgggtgcaatagtgtgtgctacgaccagttctttcccatttctcacgtgcgtttgtggagcctgcaattaatccttgtgagcacaccggcattgctcgttgccatgcatgtggcccaccaacaacatatcgagaagaagatgctgaggctagagggacatggtgatcctttgcatctggaggaggtgaagcggcacaaagtgcacatcagtggtaccctgtggtggacctacgtaatcagcgtcgtctttagactcctttttgaggctgtcttcatgtatgtcttttacctcctgtatcccggatatgccatggtgcgtctcgtcaaatgcgacgtctatccatgccccaacactgttgactgctttgtcagtcgcccaactgaaaaaactgtgtttacggtgttcatgctggccgcttcaggcatctgcattatactcaacgttgcggaggtggtgtacctgataatcagggcctgtgccagacgtgcccagcggagatcaaaccccccttcaagaaaaggttcggggttcggacatcgcctatcccccgaatacaagcagaatgaaatcaataagttgctaagcgagcaggacggcagtctgaaggacattctgcgtaggtctccaggaaccggcgctgggctggccgaaaaatccgataggtgctcggcatgttag

SEQ ID NO: 3605 - DNA, 852 bp, Artificial Sequence
  derived and/or modified sequence
atgaattggaccggtctgtatacccttctgagcggagtgaacagacacagcactgctattgggcgagtctggttgtcagtgatcttcatttttcggataatggttctggttgtggcagctgaatccgtgtggggtgatgagaaatcttcgtttatctgtaacaccttacagcccggttgtaacagcgtgtgttacgaccagttctttccgatttcacacgtgcgattgtggagcctgcagctgatactggttagcacgcccgcattgctggtagcaatgcacgtagcccatcaacaacatatagagaagaagatgttgcggctcgaggggcatggggaccctcttcacctggaagaagttaaacgccataaggtacatatatcaggcacgttgtggtggacatatgtgatttcggtggtgtttaggctgctgttcgaggccgtattcatgtatgtattctatctcctgtatcccggatacgccatggtgcgcctggtcaaatgtgatgtgtatccctgtcctaacaccgtcgactgctttgtgtctagaccgaccgagaagacagtgtttacagtgttcatgctggcggcttcgggcatatgtataatactgaatgtcgctgaagtcgtgtacctcatcattagagcctgtgccagaagagcccaaagacgaagcaaccctccgtctcgcaagggcagcggtttcggccacagactgtctccggaatataagcaaaatgaaataaataaactcctgtccgagcaagatggctcattgaaggatattctacggagaagcccagggaccggggctggcctcgctgagaaatcagatcgatgtagcgcttgttag

SEQ ID NO: 3606 - DNA, 255 bp, Artificial Sequence
  derived and/or modified sequence
atgaactggaccggtctttacactttgttgtctggggtcaaccggcactctactgccatcggtagggtctggctgagcgtgatatttatcttccggatcatggtgttggtggttgccgctgaaagtgtctggggcgatgaaaaatccagcttcatctgtaacaccttacagcccggatgtaatagcgtctgttatgatcagttcttccccattagccacgtaagattgtggagcctacagctgattctggtgtag

SEQ ID NO: 3607 - DNA, 852 bp, Artificial Sequence
  derived and/or modified sequence
atgaactggaccggcctgtacaccctgctgagcggcgtgaacagacacagcaccgccatcggcagagtgtggctgagcgtgatcttcatcttcagaatcatggtgctggtggtggccgccgagagcgtgtggggcgacgagaagagcagcttcatctgcaacaccctgcagcccggctgcaacagcgtgtgctacgaccagttcttccccatcagccacgtgagactgtggagcctgcagctgatcctggtgagcacccccgccctgctggtggccatgcacgtggcccaccagcagcacatcgagaagaagatgctgagactggagggccacggcgaccccctgcacctggaggaggtgaagagacacaaggtgcacatcagcggcaccctgtggtggacctacgtgatcagcgtggtgttcagactgctgttcgaggccgtgttcatgtacgtgttctacctgctgtaccccggctacgccatggtgagactggtgaagtgcgacgtgtacccctgccccaacaccgtggactgcttcgtgagcagacccaccgagaagaccgtgttcaccgtgttcatgctggccgccagcggcatctgcatcatcctgaacgtggccgaggtggtgtacctgatcatcagagcctgcgccagaagagcccagagaagaagcaacccccccagcagaaagggcagcggcttcggccacagactgagccccgagtacaagcagaacgagatcaacaagctgctgagcgagcaggacggcagcctgaaggacatcctgagaagaagccccggcaccggcgccggcctggccgagaagagcgacagatgcagcgcctgctag

SEQ ID NO: 3608 - DNA, 255 bp, Artificial Sequence
  derived and/or modified sequence
atgaactggaccggcctgtacaccctgctgagcggcgtgaacagacacagcaccgccatcggcagagtgtggctgagcgtgatcttcatcttcagaatcatggtgctggtggtggccgccgagagcgtgtggggcgacgagaagagcagcttcatctgcaacaccctgcagcccggctgcaacagcgtgtgctacgaccagttcttccccatcagccacgtgagactgtggagcctgcagctgatcctggtgtag

SEQ ID NO: 3609 - protein, 524 aa, Artificial Sequence
  derived and/or modified sequence
MAASKKAVLGPLVGAVDQGTSSTRFLVFNSKTAELLSHHQVEIKQEFPREGWVEQDPKEILHSVYECIEKTCEKLGQLNIDISNIKAIGVSNQRETTVVWDKITGEPLYNAVVWLDLRTQSTVESLSKRIPGNNNFVKSKTGLPLSTYFSAVKLRWLLDNVRKVQKAVEEKRALFGTIDSWLIWSLTGGVNGGVHCTDVTNASRTMLFNIHSLEWDKQLCEFFGIPMEILPNVRSSSEIYGLMKAGALEGVPISGCLGDQSAALVGQMCFQIGQAKNTYGTGCFLLCNTGHKCVFSDHGLLTTVAYKLGRDKPVYYALEGSVAIAGAVIRWLRDNLGIIKTSEEIEKLAKEVGTSYGCYFVPAFSGLYAPYWEPSARGIICGLTQFTNKCHIAFAALEAVCFQTREILDAMNRDCGIPLSHLQVDGGMTSNKILMQLQADILYIPVVKPSMPETTALGAAMAAGAAEGVGVWSLEPEDLSAVTMERFEPQINAEESEIRYSTWKKAVMKSMGWVTTQSPESGIP

SEQ ID NO: 3610 - DNA, 1575 bp, Artificial Sequence
  derived and/or modified sequence
atggccgctagtaagaaagcggttttaggacctttagtcggggcggtcgatcaaggcaccagttccacaaggttcctagtttttaattctaagactgccgaacttttgagccatcaccaagtagagattaaacaagaatttcctagggaaggctgggtagagcaggatcccaaagagatcctacactcagtctatgaatgcattgagaaaacatgcgaaaaacttgggcaactcaacatagacatctcaaacatcaaggccattggcgtctccaatcagagagaaacaacagtggtttgggacaaaatcacaggggagcctttatataatgccgtggtgtggctagacctaaggacccagagtacggttgagagcttgtctaaaaggatcccaggtaacaataatttcgtgaaatccaagactggattacctctgtcgacctatttctctgccgtaaagctcaggtggttgctcgacaatgtacggaaagttcaaaaagccgtggaagagaagcgtgccctgttcggcacgatcgattcttggcttatttggtcactgactggaggcgtcaacggcggtgtacactgcactgatgtcactaacgccagcaggacaatgctttttaatattcactcactggaatgggacaagcagctgtgcgaatttttcggtattcccatggaaatcctgcccaacgtccggtcatcgagcgagatatatggactgatgaaagccggtgcattagagggcgtccccatcagcggttgtttaggggatcagagcgccgccttggtgggtcagatgtgtttccagattggccaggcgaaaaacacctacggaacaggctgtttcctactgtgtaatacaggacacaaatgtgttttctcagaccacggactgttgacaactgtggcatataaactgggccgggacaagcctgtgtattatgcccttgaaggttccgtcgccatcgctggagctgttattagatggttgcgcgataatcttggaatcattaaaactagtgaggaaatcgaaaaactggctaaggaagtggggactagctacggctgttacttcgtacctgcattttcaggactttatgccccctactgggagccttccgcccgtggaataatctgtggtctaacacagttcaccaacaagtgtcacatcgcattcgccgccctcgaggcagtgtgttttcagacccgcgagatactggatgcaatgaatcgcgattgcggcatacccttgtcccacctgcaggttgacggagggatgactagtaataaaatccttatgcagctacaagcggatatcctgtatataccagtcgtgaagccatctatgccagagaccaccgctctgggcgccgccatggccgcaggtgctgcagaaggtgtcggagtctggtctctggaaccagaagacctgtctgcagtgacaatggagagatttgagccacaaatcaatgcagaggaatccgagattcggtattcaacttggaagaaggcagtgatgaagtccatggggtgggtcactactcaatcgccagagtcgggaattccctag

SEQ ID NO: 3611 - DNA, 2063 bp, Artificial Sequence
  derived and/or modified sequence
ctcccgccgccgtcacccaggaaaccggccgcaatcgccggccgacctgaagctggtttcatggcagcctcaaagaaggcagttttggggccattggtgggggcggtggaccagggcaccagttcgacgcgctttttggttttcaattcaaaaacagctgaactacttagtcatcatcaagtagaaataaaacaagagttcccaagagaaggatgggtggaacaggaccctaaggaaattctacattctgtctatgagtgtatagagaaaacatgtgagaaacttggacagctcaatattgatatttccaacataaaagctattggtgtcagcaaccagagggaaaccactgtagtctgggacaagataactggagagcctctctacaatgctgtggtgtggcttgatctaagaacccagtctaccgttgagagtcttagtaaaagaattccaggaaataataactttgtcaagtccaagacaggccttccacttagcacttacttcagtgcagtgaaacttcgttggctccttgacaatgtgagaaaagttcaaaaggccgttgaagaaaaacgagctctttttgggactattgattcatggcttatttggagtttgacaggaggagtcaatggaggtgtccactgtacagatgtaacaaatgcaagtaggactatgcttttcaacattcattctttggaatgggataaacaactctgcgaattttttggaattccaatggaaattcttccaaatgtccggagttcttctgagatctatggcctaatgaaagctggggccttggaaggtgtgccaatatctgggtgtttaggggaccagtctgctgcattggtgggacaaatgtgcttccagattggacaagccaaaaatacgtatggaacaggatgtttcttactatgtaatacaggccataagtgtgtattttctgatcatggccttctcaccacagtggcttacaaacttggcagagacaaaccagtatattatgctttggaaggttctgtagctatagctggtgctgttattcgctggctaagagacaatcttggaattataaagacctcagaagaaattgaaaaacttgctaaagaagtaggtacttcttatggctgctacttcgtcccagcattttcggggttatatgcaccttattgggagcccagcgcaagagggataatctgtggactcactcagttcaccaataaatgccatattgcttttgctgcattagaagctgtttgtttccaaactcgagagattttggatgccatgaatcgagactgtggaattccactcagtcatttgcaggtagatggaggaatgaccagcaacaaaattcttatgcagctacaagcagacattctgtatataccagtagtgaagccctcaatgcccgaaaccactgcactgggtgcggctatggcggcaggggctgcagaaggagtcggcgtatggagtctcgaacccgaggatttgtctgccgtcacgatggagcggtttgaacctcagattaatgcggaggaaagtgaaattcgttattctacatggaagaaagctgtgatgaagtcaatgggttgggttacaactcaatctccagaaagtggtattccataaaacctaccaactcatggattcccaagatgtgagctttttacataatgaaagaacccagcaattctgtctcttaatgcaatgacactattcatagactttgattttatttataagccacttgctgcatgaccctccaagtagacctgtggcttaaaataaagaaaatgcagcaaaaagaatgctatagaaatatttggtggttttttttttttttaaacatccacagttaaggttgggccagctacctttggggctgaccccctccattgccataacatcctgctccattccctctaagatgtaggaagaattcggatccttaccattggaatcttccatcgaacatactcaaacacttttggaccaggatttgagtctctgcatgacatatacttgattaaaaggttattactaacctgttaaaaatc

SEQ ID NO: 3612 - DNA, 1575 bp, Artificial Sequence
  derived and/or modified sequence
atggccgccagcaagaaggctgtgctgggccccctggtgggcgctgtggaccagggcaccagcagcacccgcttcctggtgttcaacagcaagacagctgagctgctgagccaccaccaggtggagatcaagcaggagttcccccgggagggctgggtggagcaggaccccaaggagatcctgcacagcgtgtatgagtgcatcgagaagacctgtgagaagctgggccagctgaacatcgacatcagcaacatcaaggccatcggcgtgagcaaccagcgggagaccaccgtggtgtgggacaagatcaccggggagcccctgtacaatgctgtggtgtggctggacctgcggacccagagcacagtggagagcctgagcaagagaattcctggcaacaacaactttgtgaagagcaagacaggcctgcccctgagcacctacttctctgctgtgaagctgcgctggctgctggacaacgtgaggaaggtgcagaaggctgtggaggagaagagggccctgtttggcaccatcgacagctggctgatctggagcctgactggaggagtgaatggaggagtgcactgcacagatgtgaccaatgccagcaggaccatgctgttcaacatccacagcctggagtgggacaagcagctgtgtgagttcttcggcatccccatggagatcctgcccaacgtgcgcagcagcagcgagatctacggcctgatgaaggccggggccctggagggcgtgcccatcagcggctgcctgggggaccagagcgctgccctggtgggccagatgtgcttccagatcggccaggccaagaacacctatggaacaggctgcttcctgctgtgcaacacaggccacaagtgtgtgttcagtgaccacggcctgctgaccaccgtggcctacaagctgggccgggacaagcctgtgtactatgccctggagggctctgtggccatcgccggggctgtgatccgctggctgcgggacaacctgggcatcatcaagaccagcgaggagattgagaagctggccaaggaggtgggcaccagctatggctgctactttgtgcctgccttcagcggcctgtatgccccctactgggagcccagcgcccggggcatcatctgtggcctgacccagttcaccaacaagtgccacatcgcctttgctgccctggaggccgtgtgcttccagacccgggagatcctggatgccatgaacagagactgtggcatccccctgagccacctgcaggtggatggcggcatgaccagcaacaagatcctgatgcagctgcaggccgacatcctgtacatccctgtggtgaagcccagcatgcctgagaccacagccctgggcgccgccatggctgctggagctgctgagggcgtgggcgtgtggagcctggagcctgaggacctgtctgctgtgaccatggagagatttgagccccagatcaatgctgaggagagcgagatccgctacagcacctggaagaaggctgtgatgaagtccatgggctgggtgaccacccagagccctgagagcggcatcccctag

SEQ ID NO: 3613 - DNA, 1575 bp, Artificial Sequence
  derived and/or modified sequence
atggccgccagcaagaaggccgtgctgggccccctggtgggcgccgtcgaccagggcacatccagtactcggtttctggtgttcaattctaaaaccgccgagctgctctcacatcaccaagtcgagattaagcaggagttcccaagggaaggttgggtggagcaggatcctaaggaaatacttcacagtgtctacgagtgcatcgaaaagacttgcgagaaactgggtcagctgaacattgatatctccaacatcaaagctattggagtgagcaaccagcgtgaaacaacagttgtatgggacaagattacaggagagccactctataacgcagttgtttggcttgacctccgcacacagagtactgttgagtcccttagtaagagaatccccgggaataataactttgtcaagtcaaaaactggattgcctttgtccacctattttagcgccgtgaagctgcggtggttgttagacaacgtcagaaaggtgcagaaagctgtggaggaaaaaagagccctgttcggtaccatagattcttggctgatttggtctttgacaggcggcgtgaatggtggtgtgcattgtaccgatgtgaccaatgctagcagaactatgctgttcaacatacacagcttggaatgggacaaacagctctgcgagttttttggaattcctatggaaatcttgcccaatgttaggagcagtagcgagatctatggtcttatgaaagcgggcgccttagagggtgtacctattagcggatgcctgggagatcaaagtgcagcactggtgggacagatgtgcttccagatcggacaggcgaaaaatacgtacggaacgggatgcttcctcctttgtaataccgggcacaagtgtgtcttcagcgatcacggattactcacgacagttgcatacaagcttgggcgagacaagccggtgtattatgccctcgaaggtagcgtggctattgcaggagctgttatcagatggttaagagataacctgggtatcatcaaaacttccgaagagatagaaaagctcgccaaggaagttgggactagctacggatgttatttcgtgccggccttctctggattgtatgcgccttattgggagcccagtgcccgggggatcatctgcggtctgacgcagttcacgaacaagtgccacattgcgtttgctgcgctagaagccgtatgtttccagacaagagagattctcgacgcaatgaatcgcgactgcggaatcccattatcccatttgcaggtagacggaggcatgacctctaacaagattctgatgcagctgcaggcagatatcctgtatatccccgtcgtgaagccctccatgccggagactactgcccttggagcagcgatggcggccggagccgccgaaggcgtcggagtttggtccctcgagccagaggacctgagcgcggttactatggagaggtttgagcctcagatcaatgccgaggaaagtgagattcggtactccacttggaaaaaagctgtgatgaagtctatgggctgggtcaccactcaaagcccagaaagtggcatcccctag

SEQ ID NO: 3614 - DNA, 1575 bp, Artificial Sequence
  derived and/or modified sequence
atggccgcatcaaagaaggctgttctcggtcctctcgtaggggcagtcgaccaaggaactagcagcactcggttcctggtgttcaattcaaagaccgccgagttgttgtcccaccatcaagtggagattaagcaagagttcccccgagagggctgggtggaacaggaccccaaagaaatccttcactcagtctacgagtgtatcgaaaagacatgtgagaaactggggcagctgaatatcgacatatccaatatcaaggccattggtgtgagcaaccagcgtgagacaaccgtggtctgggacaagatcactggcgagcccctgtacaatgcagtggtttggctcgatttgcgaacacagagcactgtggagtctttatcaaagagaattcccggaaataacaacttcgtgaaatccaagactgggcttcctttgtccacatactttagcgccgttaagttgagatggcttctggacaatgtgaggaaagtgcagaaagcagtggaagagaagcgcgcactctttgggaccattgattcctggctcatctggagcctgaccgggggtgtcaacgggggagtgcactgtacggatgtgacaaacgcaagccgcacaatgctattcaatattcacagcctagagtgggacaagcaactgtgcgagttcttcgggattcctatggaaatcctgccaaatgtgaggtcttcaagtgaaatctacggcctcatgaaggcgggagctttagagggtgtcccgatttccggttgcctaggtgatcagtctgccgcattagtgggccaaatgtgtttccagatcggccaggccaagaatacctacggtaccggctgtttcttgctgtgcaacacgggccataagtgtgtgttctccgatcacggtctcttgactaccgtggcctacaaattgggccgagacaagcccgtttattatgctctggaaggctctgtggccatcgctggcgcagtgatccggtggttgcgggacaatttgggaatcattaagacctcagaagagatcgaaaagctcgccaaggaggtgggtaccagttatggatgttattttgtgcctgccttttcaggcttgtatgctccctactgggaaccgtctgctaggggtatcatctgtggcctcacacagttcactaacaaatgccacattgcttttgctgctctcgaggccgtttgttttcagacccgcgagatacttgacgctatgaatagggactgcgggattccactctcccatttgcaggtagacggcggtatgacaagtaacaaaatccttatgcagcttcaggcggacatcctttacattcctgtggtgaaaccgtctatgcccgagacgacagctctgggagctgccatggccgcaggagcggctgagggcgtgggagtgtggtctttagagcccgaggacttatctgccgtgaccatggagaggtttgaaccgcagattaacgcagaagaatctgaaatccgctacagcacatggaaaaaagccgtgatgaagtcaatgggatgggtgaccacccaaagtccagagagtgggatcccttag

SEQ ID NO: 3615 - DNA, 1575 bp, Artificial Sequence
  derived and/or modified sequence
atggccgccagcaagaaggccgtgctgggccccctggtgggcgccgtggaccagggcaccagcagcaccagattcctggtgttcaacagcaagaccgccgagctgctgagccaccaccaggtggagatcaagcaggagttccccagagagggctgggtggagcaggaccccaaggagatcctgcacagcgtgtacgagtgcatcgagaagacctgcgagaagctgggccagctgaacatcgacatcagcaacatcaaggccatcggcgtgagcaaccagagagagaccaccgtggtgtgggacaagatcaccggcgagcccctgtacaacgccgtggtgtggctggacctgagaacccagagcaccgtggagagcctgagcaagagaatccccggcaacaacaacttcgtgaagagcaagaccggcctgcccctgagcacctacttcagcgccgtgaagctgagatggctgctggacaacgtgagaaaggtgcagaaggccgtggaggagaagagagccctgttcggcaccatcgacagctggctgatctggagcctgaccggcggcgtgaacggcggcgtgcactgcaccgacgtgaccaacgccagcagaaccatgctgttcaacatccacagcctggagtgggacaagcagctgtgcgagttcttcggcatccccatggagatcctgcccaacgtgagaagcagcagcgagatctacggcctgatgaaggccggcgccctggagggcgtgcccatcagcggctgcctgggcgaccagagcgccgccctggtgggccagatgtgcttccagatcggccaggccaagaacacctacggcaccggctgcttcctgctgtgcaacaccggccacaagtgcgtgttcagcgaccacggcctgctgaccaccgtggcctacaagctgggcagagacaagcccgtgtactacgccctggagggcagcgtggccatcgccggcgccgtgatcagatggctgagagacaacctgggcatcatcaagaccagcgaggagatcgagaagctggccaaggaggtgggcaccagctacggctgctacttcgtgcccgccttcagcggcctgtacgccccctactgggagcccagcgccagaggcatcatctgcggcctgacccagttcaccaacaagtgccacatcgccttcgccgccctggaggccgtgtgcttccagaccagagagatcctggacgccatgaacagagactgcggcatccccctgagccacctgcaggtggacggcggcatgaccagcaacaagatcctgatgcagctgcaggccgacatcctgtacatccccgtggtgaagcccagcatgcccgagaccaccgccctgggcgccgccatggccgccggcgccgccgagggcgtgggcgtgtggagcctggagcccgaggacctgagcgccgtgaccatggagagattcgagccccagatcaacgccgaggagagcgagatcagatacagcacctggaagaaggccgtgatgaagagcatgggctgggtgaccacccagagccccgagagcggcatcccctag

SEQ ID NO: 3616 - protein, 17 aa, Artificial Sequence
  derived and/or modified sequence
FDGCYCDSLENLADGYK

SEQ ID NO: 3617 - protein, 429 aa, Artificial Sequence
  derived and/or modified sequence
MQLRNPELHLGCALALRFLALVSWDIPGARALDNGLARTPTMGWLHWERFMCNLDCQEEPDSCISEKLFMEMAELMVSEGWKDAGYEYLCIDDCWMAPQRDSEGRLQADPQRFPHGIRQLANYVHSKGLKLGIYADVGNKTCAGFPGSFGYYDIDAQTFADWGVDLLKFDGCYCDSLENLADGYKHMSLALNRTGRSIVYSCEWPLYMWPFQKPNYTEIRQYCNHWRNFADIDDSWKSIKSILDWTSFNQERIVDVAGPGGWNDPDMLVIGNFGLSWNQQVTQMALWAIMAAPLFMSNDLRHISPQAKALLQDKDVIAINQDPLGKQGYQLRQGDNFEVWERPLSGLAWAVAMINRQEIGGPRSYTIAVASLGKGVACNPACFITQLLPVKRKLGFYEWTSRLRSHINPTGTVLLQLENTMQMSLKDLL

SEQ ID NO: 3618 - DNA, 1418 bp, Artificial Sequence
  derived and/or modified sequence
aaacaataacgtcattatttaataagtcatcggtgattggtccgcccctgaggttaatcttaaaagcccaggttacccgcggaaatttatgctgtccggtcaccgtgacaatgcagctgaggaacccagaactacatctgggctgcgcgcttgcgcttcgcttcctggccctcgtttcctgggacatccctggggctagagcactggacaatggattggcaaggacgcctaccatgggctggctgcactgggagcgcttcatgtgcaaccttgactgccaggaagagccagattcctgcatcagtgagaagctcttcatggagatggcagagctcatggtctcagaaggctggaaggatgcaggttatgagtacctctgcattgatgactgttggatggctccccaaagagattcagaaggcagacttcaggcagaccctcagcgctttcctcatgggattcgccagctagctaattatgttcacagcaaaggactgaagctagggatttatgcagatgttggaaataaaacctgcgcaggcttccctgggagttttggatactacgacattgatgcccagacctttgctgactggggagtagatctgctaaaatttgatggttgttactgtgacagtttggaaaatttggcagatggttataagcacatgtccttggccctgaataggactggcagaagcattgtgtactcctgtgagtggcctctttatatgtggccctttcaaaagcccaattatacagaaatccgacagtactgcaatcactggcgaaattttgctgacattgatgattcctggaaaagtataaagagtatcttggactggacatcttttaaccaggagagaattgttgatgttgctggaccagggggttggaatgacccagatatgttagtgattggcaactttggcctcagctggaatcagcaagtaactcagatggccctctgggctatcatggctgctcctttattcatgtctaatgacctccgacacatcagccctcaagccaaagctctccttcaggataaggacgtaattgccatcaatcaggaccccttgggcaagcaagggtaccagcttagacagggagacaactttgaagtgtgggaacgacctctctcaggcttagcctgggctgtagctatgataaaccggcaggagattggtggacctcgctcttataccatcgcagttgcttccctgggtaaaggagtggcctgtaatcctgcctgcttcatcacacagctcctccctgtgaaaaggaagctagggttctatgaatggacttcaaggttaagaagtcacataaatcccacaggcactgttttgcttcagctagaaaatacaatgcagatgtcattaaaagacttactttaaaatgtttattttattgcc

SEQ ID NO: 3619 - DNA, 1287 bp, Artificial Sequence
  derived and/or modified sequence
atgcagctgaggaacccagaactacatctgggctgtgcactcgcccttcgcttccttgcactggtgagctgggatatcccgggcgcacgggctctggacaacggccttgcacgcactccaactatgggatggctccactgggagaggttcatgtgtaacctggactgtcaggaggagccagattcatgcatcagtgaaaagctgttcatggagatggccgagctcatggtgtccgagggttggaaagacgctggatacgagtacctatgcattgacgactgctggatggctccacagcgcgactccgagggtcgactgcaagctgacccacagcggtttccacatggcattcgccagttggccaattacgtgcatagcaagggattgaagttaggaatctatgcggacgtgggcaataaaacctgtgccggattcccaggcagctttggatattacgacattgatgctcagacatttgccgattggggggtggacttgcttaagttcgatggttgctattgcgacagtctcgagaacctcgccgacggatacaagcacatgtcgctggcactgaatcggactggaaggtccatagtgtattcttgtgaatggccgctgtacatgtggccatttcagaagccaaactatacggaaattcgacagtactgtaatcactggcggaatttcgccgatatcgacgactcttggaagtcgattaagagcattctggattggacctcttttaaccaggagcgtattgtagacgtcgccggaccgggggggtggaacgaccccgatatgctcgttattgggaacttcggattaagctggaatcagcaggtcacccagatggcgctctgggcaattatggccgcgccactgtttatgtccaacgacctgagacacatctcaccacaggctaaagccttgctgcaggataaggacgtaatcgcaatcaaccaggatcctctcggaaaacagggatatcagctacgtcagggcgacaacttcgaagtctgggaacggcctctgtctggtctggcctgggccgttgcgatgatcaatcgccaggaaatcggcggtccacggagttataccatcgccgtggctagccttggaaagggcgtagcctgtaatcccgcctgcttcatcacccagctgctgccggtcaaaaggaagctcggtttctatgagtggaccagccgactccggagtcacatcaatcctacaggaactgtgctcttacagctggagaatacaatgcagatgtcgctgaaagatctactg

SEQ ID NO: 3620 - DNA, 1287 bp, Artificial Sequence
  derived and/or modified sequence
atgcagctgcggaatccagagctccacctgggatgcgccctcgcactgcggttcctggcgttggtcagctgggacatcccaggagcaagagccctggataatggactggcgcgcaccccgactatgggttggcttcattgggagcgattcatgtgcaaccttgactgtcaggaagaaccggattcttgcatctctgagaagctgttcatggaaatggcggaacttatggtatccgaaggttggaaagatgcgggatacgagtacttgtgtatcgacgactgctggatggccccgcaaagagactcggaaggccgcctccaggccgacccgcaacggttcccgcacggcattcggcagttggcaaactacgtgcattcgaagggcttgaaactgggaatctacgccgacgtgggcaacaagacctgcgccggctttccgggttcatttggttactatgacatcgacgcccagaccttcgccgattggggagtggatctcctgaagttcgatggctgctattgtgatagcttggagaacctggccgacggatacaagcatatgagcctggcgttgaatcggactggacggtcaatcgtgtacagctgcgaatggccgctctacatgtggcctttccagaagcccaattacaccgaaatccgccagtactgtaatcactggcgcaacttcgcagatatcgatgattcgtggaagagcattaagtctatcctcgactggacgtcctttaaccaggaacggattgttgacgtggcgggtcctggaggttggaacgatccagatatgttggtcatcggaaatttcggattgtcgtggaaccagcaagtgacccagatggccttgtgggcgattatggccgcccccctgtttatgagcaatgacctcaggcacatcagcccacaagcaaaagcgctcctgcaagacaaggatgtgatcgctattaaccaagacccgctcggcaaacaaggctaccagctgagacagggagacaattttgaggtctgggaacggccgctgtcagggctcgcctgggcggtcgccatgatcaacagacaggaaatcggtgggccacggtcgtacaccatcgcagtggccagccttggtaaaggagtcgcttgcaaccccgcgtgcttcatcacccaactgctccctgtgaagcgaaagctcgggttctacgagtggacctcgagactgcggtcgcatatcaaccctactggaaccgtgctgctgcagctggagaatactatgcaaatgtcgctgaaggatctgctc

SEQ ID NO: 3621 - DNA, 1287 bp, Artificial Sequence
  derived and/or modified sequence
atgcagctccgcaatcccgaactccacctgggatgtgctttggctctcaggttcttggctctcgtgtcgtgggatatcccgggcgcacgagctcttgacaacggtctggcgcgcaccccgaccatgggatggctgcactgggagcggttcatgtgcaacctcgattgccaagaggagcccgactcgtgcatctcggaaaagctgttcatggagatggcagaactcatggtttccgaaggatggaaagatgctgggtacgaatacctctgcatcgacgactgctggatggcgccgcagcgggattccgaaggacggctgcaagctgacccgcagcggttcccgcacggcatccgacaactggctaactacgtccacagcaagggactgaaacttgggatctacgccgacgtcggtaacaaaacttgcgcggggttcccggggagcttcggatactacgacatcgacgcccagactttcgcggattggggagtggacctcctcaaattcgacggctgttactgtgactcccttgaaaacctcgccgacggctacaagcacatgtcgctggccctcaacagaacgggtcgctcgatcgtgtactcatgcgaatggccactgtacatgtggccttttcagaaaccgaactacaccgaaatcaggcagtactgcaatcattggcgcaattttgcggacatcgacgattcctggaagagcatcaaatccattttggattggacctcctttaatcaggaaagaattgtggatgtggcgggaccgggcgggtggaatgacccagacatgctggtgatcggcaactttggattgagctggaaccaacaggtcacgcagatggctctgtgggcaatcatggctgcaccattgttcatgtccaacgatctgcggcatatcagcccacaggccaaggcgctcctgcaagataaggacgtgatcgccatcaaccaggacccactcggaaaacagggataccaactgagacagggcgataacttcgaagtgtgggagcggcctctgtctgggctcgcctgggccgtcgctatgatcaatcgccaggaaattgggggcccgagatcgtataccatcgccgtcgcgtcacttggcaagggagtggcatgcaacccagcatgtttcatcactcagctcctgccagtgaaaagaaaactgggcttctacgaatggacgtcgcgcctcagatcgcatatcaatcctactggaaccgtgctccttcaattggagaacactatgcagatgtcactcaaagatctgctg

SEQ ID NO: 3622 - DNA, 1287 bp, Artificial Sequence
  derived and/or modified sequence
atgcaattgcggaaccccgaattgcacctgggctgcgctctcgccctgagatttctggccctggttagctgggatattcccggggctcgcgctctggataatggtctggcaaggaccccaactatgggttggctgcattgggagaggtttatgtgcaacctcgattgccaggaagaaccggattcctgcatctcggaaaaactgttcatggagatggcggagctgatggtgagcgaaggttggaaggacgcaggctacgagtatctctgcatagacgactgctggatggccccgcaacgagactcggaaggtcgcctccaagcagaccctcaacggtttccgcatggcatcaggcaattggctaactacgtgcactcgaaggggctgaaactgggaatctacgcagatgttggtaacaagacgtgtgcaggtttcccgggatcgttcggctactacgacatcgacgcccaaaccttcgcggattggggcgtggacctgctgaaatttgacggctgttactgtgattcactcgaaaacctcgctgatggatacaagcacatgtctttggccttgaatcggaccggccggagcattgtctactcctgcgagtggccactgtatatgtggcctttccagaagccaaactacaccgagatcagacagtactgcaatcactggcgtaacttcgctgatatcgacgattcatggaaaagcataaagtcaattttggactggactagcttcaaccaggaacgcatcgtggacgtggcgggtccaggcgggtggaacgatccggacatgctggtgatcgggaacttcggactgagctggaatcagcaggtaacgcaaatggccctgtgggcgatcatggctgcgcctctcttcatgtccaacgacttgaggcatattagtccccaagccaaggccctcctccaggataaagacgtgatcgctatcaatcaggatccacttggaaaacagggataccagctgcgccagggagataactttgaggtctgggagcggcctctctctggattggcctgggccgtggctatgatcaaccggcaggaaatcggaggcccaagatcctacactatcgccgtcgcctcgctcggaaagggtgtggcctgcaacccggcttgtttcatcacccaactgttgcctgtgaagcgcaaactcggattctacgaatggacttccagactcagatcccacatcaatccgactggaaccgtgttgctccagctcgaaaatactatgcagatgtcgctcaaggacctgttg

SEQ ID NO: 3623 - DNA, 1287 bp, Artificial Sequence
  derived and/or modified sequence
atgcagctgcgtaatcccgagctccacttgggatgcgcccttgctttgcgattcctagcgctggtcagttgggacatacccggtgctcgagcgctagataacgggcttgcgagaacacctactatgggctggctccactgggagcgatttatgtgtaatttggactgtcaagaggagcctgacagctgcatctcagagaaacttttcatggagatggctgaactcatggtcagcgaggggtggaaggacgccgggtacgagtatctgtgcattgacgactgctggatggccccacagagggattcagaggggcgactccaggcagacccgcagcgtttcccacatggaattcgccagctggcgaactacgtacactccaagggactgaagcttggaatttacgcagatgtcggaaataagacctgtgcgggattcccggggtccttcggatattacgacatcgacgcccaaactttcgccgattggggggtcgatctattgaagtttgatggttgctactgcgattcccttgagaatcttgccgatggttacaagcacatgtcgctagcgttgaaccgtacgggccgatcaatagtctatagttgcgagtggcccctgtatatgtggcccttccagaagccaaattatacagaaatccgtcaatattgcaatcattggcggaacttcgctgatatcgacgatagttggaagtcgatcaaatcgatacttgactggacttcgtttaatcaagaacgaatcgtcgatgtcgccggcccagggggatggaacgatccagatatgctcgtcataggcaactttggcctcagttggaaccagcaggtgacccagatggcactgtgggctatcatggcagcgccgcttttcatgagcaacgatcttcggcacatttctccccaagcaaaagcgttgctgcaggataaggacgttattgcgattaatcaggaccctctgggaaagcaaggttaccagctccgacaaggagacaacttcgaagtatgggaaaggcccctgagtggtttagcctgggcagtggcgatgatcaatcggcaagagatcgggggtccgcgatcctatactatcgcggttgcttccctaggaaagggtgtggcgtgcaatcctgcctgcttcatcacccaacttctcccggtgaaaaggaagctagggttctatgagtggacgtcgcggcttcggtcccatataaaccctaccggcaccgtgctgctccagctcgaaaacacaatgcagatgtcgcttaaagacctcctc

SEQ ID NO: 3624 - DNA, 1287 bp, Artificial Sequence
  derived and/or modified sequence
atgcaactgagaaatccggaactacacctcggttgcgccctcgcacttcgattcttggcattagtgagttgggacatccccggcgcaagggcgctcgacaacggcctcgcccggacccccaccatggggtggctccattgggagcggtttatgtgcaatttagactgccaggaggaaccagattcttgtatctctgaaaagctgtttatggaaatggcagaactcatggttagcgagggatggaaggatgcaggctacgaatatctctgcattgatgactgctggatggcacctcagagagactctgagggacggttgcaggccgatcctcaaagattcccccacgggatccgccagctcgccaactacgtgcactctaaaggtttaaagttaggcatctacgcagacgtgggtaataagacctgcgccggatttcctggtagttttggctactacgatatcgacgctcagacgtttgcggattggggcgtcgacctgctcaagttcgatggctgttattgtgactctctcgagaacctggcagacggttataaacatatgagccttgcccttaacaggacgggtagatctatcgtttactcttgtgagtggcctctgtatatgtggcctttccagaagcctaactacacggaaatccggcaatactgcaatcactggaggaacttcgccgacatagacgatagctggaagagcatcaaatcaatcttagattggacttcttttaatcaggagaggatcgttgatgtcgctgggcctggcggctggaacgaccccgatatgctggtgatcggaaacttcggtctctcctggaaccaacaagtgacccagatggctctgtgggctatcatggccgcccctctgttcatgtccaacgaccttcggcatataagtcctcaggccaaggccttgctccaggacaaagacgtgatcgccattaaccaggaccctttggggaaacaggggtatcagctgcgccagggggataatttcgaggtgtgggaacggccactctctggcttggcttgggctgtggctatgatcaacaggcaggagattggcggacctcggtcctacaccatcgctgtggcatcactgggaaagggcgtggcatgtaacccagcttgctttatcacccagctgttgccagtcaagcgcaaactggggttttatgaatggacatccagactgcggtcacatattaaccctacagggaccgtgttgctgcagctggagaataccatgcagatgagtctaaaggacctgcta

SEQ ID NO: 3625 - DNA, 1287 bp, Artificial Sequence
  derived and/or modified sequence
atgcaattgcgtaaccccgagttgcacttgggctgcgcccttgctctgaggttccttgccctggtgtcctgggacatccctggtgcccgcgccctggataacgggctggctagaaccccgacgatgggctggctccattgggagcggtttatgtgcaaccttgattgccaggaagaaccagacagctgcatctccgagaagctctttatggagatggcggagctgatggtttcggaggggtggaaggatgcgggctacgagtacctctgcattgacgactgctggatggccccgcagcgggattccgagggcagacttcaggctgacccgcagcgtttcccgcatggaattcggcagctggctaactacgtccacagcaagggcttgaaacttggtatctatgcagatgtcggtaacaaaacctgcgccggtttccccggtagcttcggatattacgacatcgatgcccagacgttcgccgattggggggtggacctccttaagttcgatgggtgctattgcgactctctggaaaatcttgccgacggttacaagcatatgagccttgccctcaataggacgggtcgcagcatcgtctactcgtgcgagtggcccctgtacatgtggcctttccagaagcctaactacactgaaatccgtcagtactgcaaccactggcgcaactttgccgatatcgacgactcctggaaaagcatcaagtcgattctagactggacgtcattcaaccaagagcgtatcgtagacgtcgcgggtcccggaggctggaacgaccccgacatgctagtgatcggaaactttggcctgtcttggaatcagcaggtgacccagatggccctctgggccatcatggctgctccgcttttcatgagtaatgatctcagacatatttcccctcaagccaaggccctccttcaagacaaggacgtcatagcgatcaaccaagaccctctcggcaagcaaggttaccaactcaggcaaggtgataacttcgaggtgtgggagcgcccgctgagcggcttggcttgggccgtcgccatgatcaaccgtcaagagatcggtggcccccgctcctacaccatcgccgttgcttccctggggaagggcgttgcgtgcaaccctgcctgctttatcacacaactgctgcccgtgaagcgtaagcttggcttctacgaatggaccagccgtctgcggtcgcatatcaatcctaccggcaccgtcttactccaactggagaataccatgcagatgagcctgaaggatttgctc

SEQ ID NO: 3626 - DNA, 1287 bp, Artificial Sequence
  derived and/or modified sequence
atgcagctacggaaccctgaattgcatttaggatgcgccctagcactacgctttctagcactcgtgagctgggatatacccggcgccagggcccttgacaacggactggcacgaacaccaacaatggggtggctgcactgggaacgtttcatgtgtaacctcgattgtcaggaggagcccgactcatgcatttctgaaaagttatttatggagatggctgagctgatggtcagcgagggctggaaggacgccggctatgaatacctgtgcatcgacgattgctggatggcgccacaaagggactcggagggtaggctgcaagccgatcctcaaaggttcccccacgggattcggcaactcgctaactatgtgcatagcaagggactaaagctgggaatatacgccgatgtgggtaacaaaacctgcgcagggttcccaggatcattcgggtactatgacatcgatgcgcagaccttcgctgattggggcgtagacctgctcaagttcgacggctgctattgcgattcattggagaatttggctgatggatacaagcacatgtcactggctcttaatcggaccggacgaagcattgtctactcttgtgaatggcctttatacatgtggccttttcagaagcccaactacaccgaaatccgccagtactgcaaccattggaggaacttcgctgacattgacgattcctggaagtctatcaagtctatactggactggaccagctttaaccaggaacggattgtagacgtcgccggccccggaggatggaatgatccagatatgttagtgatcgggaacttcgggctgtcctggaatcaacaggttactcaaatggcactttgggctatcatggcagcaccactgttcatgtcgaatgatcttcgacatatttctccacaggccaaagcactgctgcaagataaagacgttatcgcaatcaatcaggaccctctagggaaacaggggtaccagctccgacagggagacaacttcgaggtttgggagaggcctctgtcgggcctcgcctgggccgtggccatgataaacagacaggaaataggaggaccccgcagctacaccattgcagtcgcaagcctgggcaagggcgtagcatgtaaccccgcgtgttttataacacagttgctgcccgtaaagaggaaactaggcttctacgaatggactagccgattgagaagccacataaaccctaccggcactgtcttgctgcagctggaaaatacgatgcagatgtccctcaaagatctgctt

SEQ ID NO: 3627 - DNA, 1287 bp, Artificial Sequence
  derived and/or modified sequence
atgcaactccggaaccccgaactgcacctcggttgtgcactcgcgctgagattcctcgccctggtgtcctgggatatcccgggcgcgcgggctctggacaacggccttgccagaacgcctactatgggatggcttcactgggaaagattcatgtgtaacctggactgccaggaggagccggactcctgcatctcggagaagctcttcatggaaatggcagagttgatggtgtcagaagggtggaaggacgcaggttacgaatacctctgcatcgacgactgctggatggcccctcagcgggactccgagggcagactgcaggcggacccacagcgctttccacatggaataaggcaactggctaattacgtgcacagcaaaggactcaagctgggaatttacgccgacgtcggtaacaagacctgtgcgggattcccaggctcattcggctactacgacatcgacgcccaaacgtttgcagactggggggtggatctgctgaagttcgacggctgctattgcgactcacttgagaacctggcggatggatacaaacatatgtcgctggcattgaaccgcaccggcagatcgatcgtgtactcatgcgagtggccgctttacatgtggccgttccagaaaccgaactacactgaaatcagacagtactgcaaccattggcggaactttgcggatatcgacgacagctggaagagcatcaagtccatcttggattggaccagcttcaaccaggagcggatcgtcgatgtggccggtccgggaggatggaacgatccggacatgctggtgatcggaaatttcggcctcagctggaatcaacaggtgacccagatggccctttgggccatcatggccgcaccattgtttatgtcgaacgatctccggcacatctccccgcaggctaaggccctcctgcaggacaaggacgtcattgccatcaaccaagatccactcggcaagcagggttaccaactgcgacaaggcgacaatttcgaggtgtgggagcgcccgctcagcggcctggcgtgggctgtggccatgatcaaccggcaggagatcggcggtcctcgctcctacactatcgcggtggcatccctggggaagggggtggcgtgtaacccggcttgcttcatcacccaacttcttcctgtcaaacgcaagctgggattctacgagtggacctctaggctccgctcacatatcaaccccaccggaactgtgcttctgcaactggaaaacaccatgcagatgagcctgaaggacctgctg

SEQ ID NO: 3628 - DNA, 1287 bp, Artificial Sequence
  derived and/or modified sequence
atgcagcttagaaaccccgaactgcatctgggttgcgccctcgcacttagattcctggcgctggtgtcgtgggacattccaggcgcacgagccctcgacaacggacttgcaaggacccctaccatgggatggttgcactgggaacggtttatgtgtaaccttgattgccaagaggagccagatagctgtatatcagaaaagttgttcatggagatggcggaactgatggtatcagaaggatggaaggatgccgggtatgagtacctttgcattgatgattgttggatggcaccacagcgcgattcagagggaaggctgcaagcagatcctcagcggttcccacatggaattaggcagcttgcaaattacgtccattcgaaaggactcaaacttggtatctacgcagatgtgggcaataagacctgtgctggctttcctggttcatttggctactatgatattgatgctcaaaccttcgcggactggggtgtcgacttgctcaagtttgatggttgttactgtgactcccttgaaaacctcgcagacgggtacaagcatatgtcactcgcactcaatagaaccggtcgtagcattgtttactcgtgtgaatggcctctgtacatgtggccgtttcaaaagccaaactacaccgaaatcagacagtactgcaaccactggcgaaactttgcagacattgacgactcctggaaatccatcaaatccattcttgattggaccagctttaaccaagagaggatcgtggatgtggcgggtcctgggggatggaacgatccagatatgctggtgattgggaactttggcctgtcctggaatcaacaagtcactcagatggccctgtgggccatcatggccgccccccttttcatgtcgaatgacttgcgtcatattagccctcaagcgaaagcacttctccaagataaggatgtaattgccataaaccaagaccccctcggaaagcaaggctatcaacttcgccaaggagataacttcgaagtgtgggaacgtccattgtctggccttgcctgggcagtggcaatgatcaatagacaggaaatcggtggaccccgatcctacactattgcagtcgcgtcgttgggaaagggggtggcttgcaaccctgcatgcttcattactcagcttctgcctgtgaagcgcaagctgggattttacgaatggacttcccgccttagatcccacatcaacccaactgggacggttctgcttcaactcgagaataccatgcagatgtccctgaaggatcttctg

SEQ ID NO: 3629 - DNA, 1287 bp, Artificial Sequence
  derived and/or modified sequence
atgcagctgagaaatccggaacttcatcttggatgtgcacttgctctgaggtttctggcactggtgtcgtgggacattcctggagcacgcgcactggataacgggctggcgaggaccccaactatgggctggctccactgggaaagatttatgtgcaaccttgattgtcaggaggaaccagattcatgcattagcgaaaagctgttcatggaaatggctgaactgatggtgtccgaagggtggaaagatgcagggtatgaatacctgtgcattgatgattgttggatggcgcctcagcgtgactcggaaggtagactgcaagccgatccgcagagattcccccatggaatccgtcagctggcgaattacgtgcattcgaagggtcttaaacttggcatatacgccgacgtggggaataagacctgcgctggattcccgggttcgtttggatattacgacatagatgcacagacctttgctgattggggagtcgatcttctgaagtttgatggttgctactgtgattcgctcgagaacctggccgacggatacaaacatatgagcctggccctcaacagaacgggccggtccatcgtgtacagctgtgaatggcctctgtacatgtggccctttcaaaagcccaattacaccgaaatccgccaatactgcaaccattggcgcaactttgcagacattgatgatagctggaagtcaataaagtccattcttgattggacctcgtttaaccaggaaagaatcgtggacgtggcgggccccggaggttggaacgatcctgatatgcttgtgattggaaacttcggactgtcgtggaaccaacaggtgacccaaatggccctgtgggccatcatggcagcccctctgtttatgtcgaacgaccttagacacatctctcctcaggcaaaggcacttctccaggacaaagatgtgatcgcaattaaccaggaccccctgggcaagcagggataccagctgagacaaggggataacttcgaggtctgggaacggcctctttcaggcctggcctgggccgtggccatgatcaatcgccaagagatcggtggtccacgctcttacaccattgcagtggcaagccttgggaaaggagtggcctgtaatcctgcgtgtttcataacgcaactgcttcctgtgaagagaaaattgggtttttacgaatggacgagccggcttcggtcacacatcaatccaactggaaccgtcctgttgcaactggaaaacactatgcagatgtctcttaaggatctgctg

SEQ ID NO: 3630 - DNA, 1287 bp, Artificial Sequence
  derived and/or modified sequence
atgcagcttagaaatccagagctgcacctcggctgtgcacttgccctgagattcctcgcattggtgtcatgggacatcccgggtgctagagcccttgacaatggcctggcgcggacacctaccatgggatggctccactgggaaaggttcatgtgcaatttggattgtcaggaggagccggattcatgcatttccgagaagctcttcatggagatggccgagctgatggtctctgaaggttggaaggacgccggatatgagtatctttgcattgacgattgctggatggcgccacagagagactccgaagggaggctgcaagctgacccgcagagatttccgcatggcatacgccaactggccaactacgtgcactctaagggcctcaaactgggcatttacgcagatgttggcaataagacctgtgcgggcttcccggggagttttggctactatgatattgacgctcaaaccttcgcagactggggggtggacctcctgaaatttgacgggtgttactgtgatagtctggaaaatctggctgacgggtataaacacatgtctctggctctgaaccggacaggccgcagtattgtctacagctgtgagtggcctctctacatgtggcccttccagaagccaaactacaccgaaatccgacagtactgcaatcactggagaaacttcgcagacattgatgactcatggaagtccatcaagagtatccttgactggacctctttcaatcaggagcggattgttgacgtagccgggccagggggatggaatgaccctgacatgctcgtcatagggaactttggtttgagctggaatcagcaagttactcagatggcactgtgggctataatggccgcgcctctgtttatgtcaaatgatctgcggcacatctcccctcaggcaaaagctctgctgcaggataaagacgtcatcgcaattaatcaggaccctctgggcaagcaagggtatcagttgcggcaaggagataacttcgaggtctgggagcgacccctttccggactggcctgggctgtggcaatgatcaacaggcaggagattggaggcccccggtcttataccatagccgtcgccagtctggggaaaggtgtggcatgcaatccagcatgttttatcactcagctcctgccggttaagcggaagttgggcttttacgaatggacatctcgactccggagccatatcaatcccaccggcaccgtgctgctgcaactggaaaacaccatgcaaatgtccctgaaagacctgctc

SEQ ID NO: 3631 - DNA, 1287 bp, Artificial Sequence
  derived and/or modified sequence
atgcagctgcggaaccccgagcttcatctgggatgtgcactggcattgcgatttctggccctggtgtcatgggacatccccggagcccgagccctggacaatggccttgccaggacccccactatggggtggttgcattgggagcgctttatgtgcaatctggattgtcaggaggaacctgattcttgtatttcagaaaaactttttatggagatggcagaactgatggtttctgagggatggaaggatgccgggtatgaatacctgtgtatagatgactgttggatggcacctcagagagattctgaggggcgcctgcaggccgatccccagaggttcccccacggaatacgccagctggccaattacgtgcattctaaaggactaaaattggggatttacgctgatgtcggcaacaaaacctgcgctggctttccagggtcctttggatattacgacatcgatgcacagacgttcgcagactggggcgtggacttgctgaaatttgacggttgctactgcgactctttagaaaaccttgccgacggatacaagcatatgagtctggccttaaacagaacaggcagatctatcgtgtatagctgtgagtggccactatatatgtggccatttcagaaaccaaattatacagagatccggcagtactgcaaccactggagaaactttgccgacatagatgactcctggaaatccatcaaatctattctagattggacatctttcaaccaagaacgtattgtggatgttgcaggccctggcggttggaatgatccagatatgcttgttattggcaacttcgggttatcatggaaccagcaggtgacccagatggcgctgtgggctataatggctgcccccctttttatgagcaacgacctgcggcatataagcccacaggccaaggcacttttgcaggataaagacgtcattgcgatcaaccaggatcccctaggaaaacaggggtaccaactgcgccagggcgacaactttgaggtgtgggaaaggcctctgtcaggcctggcatgggccgtcgcaatgatcaatcggcaggaaatcggtggcccccggtcttatacaattgctgtggctagcttgggcaagggcgtagcctgcaatcccgcatgtttcataacacaacttcttcctgtaaagcgaaagctgggcttctatgagtggacttctaggctgcgcagccacattaacccaaccggaacagtcctgttgcaactggaaaataccatgcaaatgtcactcaaggatctactc

SEQ ID NO: 3632 - DNA, 1287 bp, Artificial Sequence
  derived and/or modified sequence
atgcagctgcgaaaccccgaactccacctgggctgtgccctcgctctgcggtttctcgcactggttagctgggacattcctggggcgcgagcactggacaacggactggctaggactcccacaatggggtggctccattgggagcgctttatgtgcaatctagattgtcaggaggagcctgacagttgcatctcagagaaactgtttatggagatggctgagctgatggtgtcagaggggtggaaagatgctgggtacgaatacctatgcatcgatgactgctggatggctccccagagagattctgaggggcgcctgcaagccgaccctcaaaggtttccccatggaattagacagctggcgaattatgttcattcaaagggcttaaaactgggtatctacgctgacgtaggaaacaagacctgcgcgggattccctggctcattcggttactacgacattgacgcccagacttttgctgattggggagtggacttgctgaagtttgatggctgttactgtgattctttggagaatttggcagacggatataaacatatgtcactagcattgaatcggacaggccgcagcatcgtttatagttgcgaatggcccctgtacatgtggccgttccagaaacccaattatacggaaattcgacagtattgcaaccactggagaaactttgctgatatcgacgatagttggaagagcatcaagtctatactggactggacaagttttaaccaagaacggattgtggacgtggctggtccaggtggttggaacgaccctgatatgctggtgattggcaacttcggcttgtcttggaatcagcaggtgacacagatggcactatgggcaattatggctgctcctctgttcatgtccaacgacctacgtcatataagtccccaggccaaagcattgctgcaggataaagatgtgatcgcaataaaccaggaccccctgggcaagcaaggctatcagttgcggcagggagataacttcgaggtctgggaacgaccactgagcggacttgcatgggccgttgcaatgattaaccggcaggagatcggcgggcctcggagttatactatcgccgtcgcctcacttggaaagggagtggcttgcaatccagcatgcttcattacgcagcttctgcccgtcaaaagaaagctgggcttctatgagtggacaagtcgactgagatcccatatcaatcccactggcaccgttctcctgcaacttgaaaatacaatgcaaatgtcactcaaagatcttttg

SEQ ID NO: 3633 - DNA, 1287 bp, Artificial Sequence
  derived and/or modified sequence
atgcagttgagaaatccggaactccacctgggatgtgcactggctctcagattcctggccctggtgagctgggatattccgggggcccgggcactggataatgggctggctagaaccccgaccatggggtggctgcattgggaacgctttatgtgtaaccttgactgtcaggaagaacccgactcctgcatctcggaaaagctgtttatggaaatggcggaactgatggtgagcgagggatggaaggatgccgggtatgagtacttgtgcatcgacgactgctggatggccccacaacgcgacagcgagggacggctccaagccgacccacaacgcttcccgcatggtatcaggcagctcgccaactacgtgcattcgaaaggacttaagctcggaatctacgcggacgtgggcaacaaaacttgcgctggctttcctggatcgttcggatactatgatatcgacgcgcagacttttgccgactggggagtggatctcctgaagttcgacggatgctattgtgactcccttgaaaacctggccgacggctacaagcatatgtcgttggccctgaatcgaacgggacggagcatcgtctactcctgtgaatggcctctgtacatgtggccattccagaaaccgaattacactgaaatcagacaatactgcaatcattggcggaatttcgctgatattgacgacagctggaagtccattaagagcatcctcgactggacgtcattcaaccaagagaggattgtggacgtggccggccctgggggctggaatgacccagacatgctggtcatcggtaacttcggactgagctggaatcagcaggtcactcagatggccttgtgggctatcatggctgcacccctgtttatgtcgaacgatcttcggcacattagccctcaggccaaagctctgctgcaggataaagacgtgatcgcaatcaaccaggacccgctggggaagcagggctatcagctccgccaaggagacaacttcgaagtgtgggagcgccctctgtcgggcctcgcctgggcggtggcaatgatcaataggcaagagattgggggacccaggtcgtacaccatcgcagtggcttcactgggaaagggagtggcttgcaatccggcatgcttcatcactcagctccttcccgtgaagaggaagctgggtttttacgaatggacctccaggctgcggtcccatatcaaccctaccgggactgtcttgcttcaactggagaataccatgcagatgtcactcaaagacctgctg

SEQ ID NO: 3634 - DNA, 1287 bp, Artificial Sequence
  derived and/or modified sequence
atgcagctgagaaatcccgaacttcatttgggatgcgcactggcacttagattcctcgcacttgtgtcgtgggatatccctggtgcaagagcacttgacaatggactcgctcgtactcccactatgggctggctgcattgggagcgattcatgtgtaatcttgactgtcaggaggaacctgattcctgcatttcggaaaaactgttcatggagatggcagagctgatggtgagcgagggatggaaagacgccggatacgagtacctttgtattgatgattgctggatggccccccaacgggattccgaaggacgtctgcaagcagatccacaaaggtttcctcatggcattcggcaactcgcaaattacgtgcattctaaaggacttaaacttggaatttacgcagacgtgggaaacaagacgtgtgccggttttcctggttcctttggttactacgacatcgatgcacaaaccttcgccgattggggtgtggacttgctcaagtttgacgggtgctactgcgattcgctcgaaaatctggcggatggatacaaacacatgtcattggcgctgaaccgaactggccgatcgattgtgtacagctgtgagtggccgctttacatgtggccctttcaaaagcctaactataccgaaatccgccagtactgtaaccattggcgcaattttgcagatatcgacgattcctggaagagcatcaaatccatcctcgattggacctcttttaaccaagagcgtattgtggatgtggcaggtccaggcggttggaacgatccagacatgcttgtcattggtaacttcggactttcgtggaaccaacaggtgacccaaatggcactgtgggccattatggcagcaccgctcttcatgtccaacgatcttcgtcatatttcgccacaagcaaaggcccttttgcaggacaaggacgtgattgccattaaccaagacccattgggtaagcagggataccagcttagacaaggtgacaattttgaagtttgggagcggcctcttagcggtcttgcttgggccgtggcaatgatcaatagacaggagattgggggccctaggagctataccatagcagtggcatcccttggtaaaggggttgcctgtaatcctgcatgttttatcacccaacttttgcctgtcaagagaaaacttgggttttacgagtggacgtcgcgcctcaggtcacacattaatcccaccggcaccgtgctgttgcagctggaaaacaccatgcagatgtccctgaaggatctgctc

SEQ ID NO: 3635 - DNA, 1287 bp, Artificial Sequence
  derived and/or modified sequence
atgcagctcaggaatcctgagctgcaccttggttgcgccctcgctctgcggtttctggctctggtaagttgggatattcccggggctagagctctggataatggtctggcacgcaccccaaccatgggatggctgcactgggagcgctttatgtgcaatctggattgtcaagaagaacccgactcttgcatctccgagaagctctttatggagatggccgagctgatggtgagtgaggggtggaaggacgccgggtacgaatatctgtgtatagatgactgctggatggcccctcaaagagacagcgaaggccggctgcaagccgacccccaacgcttccctcacggcatacggcagctggcaaactatgtacattccaaagggctgaagctgggaatatatgctgatgtcggtaataaaacatgtgctggctttccaggatcctttggctactacgatatcgatgcccagactttcgccgactggggtgtagatctgttaaagtttgacggttgttattgcgactctctggagaaccttgccgatggatataagcacatgtctttagctctaaaccgaaccggccgcagtattgtgtacagctgcgagtggccactctacatgtggccttttcagaagccaaactatacagaaattcgccagtattgtaaccactggcgaaattttgccgatattgacgactcttggaagtctattaaatccatcctggattggacttcttttaatcaggagcgaattgtggacgtggcaggacccggaggttggaatgaccctgatatgctcgtgattggtaactttgggctttcttggaatcagcaggtgactcagatggctctgtgggctattatggctgctcctttgttcatgagcaacgatctgcggcatatctctccccaggccaaggccctactgcaggataaggacgtcatcgccataaaccaggacccactaggtaagcagggttaccaactgcgacagggggacaatttcgaagtgtgggagcggcctttaagtggcctggcctgggcagtggccatgatcaaccgccaggagatcggcgggcccagaagctacactattgctgtggcttctctaggtaagggagtggcttgcaatcccgcttgcttcatcacacagctgctgcctgtgaagcgcaagttagggttctatgaatggacttcacggttaagaagtcacatcaacccaaccggcacagttctgttacagttagagaacaccatgcagatgagtttgaaagatctactg

SEQ ID NO: 3636 - DNA, 1287 bp, Artificial Sequence
  derived and/or modified sequence
atgcagttgaggaaccctgaattacatctcgggtgtgcactggccctgcgcttcctggctctggtgagttgggatataccaggtgcacgggctctggataacggcctcgctagaactcctaccatgggttggctacattgggaacgattcatgtgcaacttggattgccaagaggagcctgactcttgtatcagtgaaaagctgttcatggagatggcggagttaatggttagtgaagggtggaaagatgcagggtatgaatacctgtgcattgatgactgctggatggcgccccagcgggactctgagggccgtctgcaggccgatccgcagaggtttccccatggcatccggcagcttgctaattatgtccacagcaaggggttaaaattggggatctacgccgacgtgggtaataagacctgcgcaggatttcctgggagttttggctattacgatattgacgcacagactttcgcagattggggggttgatctgttaaagttcgacggctgctactgcgactctctcgaaaatctggccgatggctacaagcacatgagtctggctctgaataggacaggacgcagcattgtgtatagctgtgaatggccgctctacatgtggccatttcagaagcccaactatacagagattagacaatattgtaaccactggcgaaatttcgcagacatcgatgactcttggaaatccatcaaatctatattggattggacctctttcaaccaggagcgtattgtggatgtggccgggcccggtggatggaacgatccggacatgttagtgattgggaattttggccttagttggaatcagcaggtaacgcaaatggctctctgggctatcatggccgcaccactgtttatgagtaacgatttaaggcacatctcaccacaggccaaggctctgttgcaggataaagatgtgatcgctatcaaccaggaccctctgggaaaacaggggtaccagctacggcagggagacaacttcgaggtctgggagcgcccactgtccggactagcctgggcggttgccatgatcaaccggcaagaaataggcggccccaggtcctatacgatagccgtggccagcctgggcaagggtgtggcctgcaacccagcgtgttttataacgcagttacttcctgtgaagcggaaacttggcttctacgagtggacatcaagactacgaagccacattaatcctacagggaccgtgttgctacagctggagaacaccatgcagatgtcgttgaaagatctactg

SEQ ID NO: 3637 - DNA, 1287 bp, Artificial Sequence
  derived and/or modified sequence
atgcaactcagaaacccagagctgcacctggggtgcgcactggcgctgcgattcctggccttggttagctgggacatccctggagcacgggccctggataatgggcttgcccgcaccccaactatgggatggttacattgggagcggtttatgtgtaacctcgactgtcaagaggaacctgattcgtgcatctccgagaaattgtttatggaaatggcggagcttatggtgtcagaaggctggaaggatgctggctatgaatatttatgtatcgacgactgctggatggccccccagagagactccgaaggcaggctgcaggccgacccccaacggtttcctcacggcattcgacagctggccaattacgttcactccaaagggttgaagctaggaatatatgcagatgtggggaataaaacttgcgcaggtttcccgggatctttcgggtattatgatatagatgcccagacctttgccgactggggcgttgacttgctcaaattcgatggctgttactgtgactccttagagaatttggccgatggctataagcatatgtccctggccttgaaccggaccgggcgcagtattgtctatagctgcgagtggcccttatatatgtggcccttccagaaacccaattatactgagattcgccaatactgtaatcactggaggaatttcgcagacatcgacgatagctggaagtcaatcaagtctattctggactggacctcctttaaccaggagcgcatagttgacgtggcaggcccaggaggatggaacgatccagatatgttagtgatcggaaatttcggcctctcgtggaatcagcaggttacgcagatggccctctgggcaataatggcagcacccctctttatgagcaacgatctgcggcacatttcaccccaggccaaagccttgctgcaagataaagacgtgatcgccatcaaccaggatccacttgggaagcaaggctatcaactgcgtcagggggataacttcgaggtatgggaacggcccctgtccggcctggcgtgggcggtagctatgataaaccgtcaggagattggaggcccccggtcttataccatcgctgttgcctcactggggaagggggtggcttgcaaccccgcctgtttcatcacacaactgttacccgttaaacggaagctgggattttacgagtggacatcccggcttcgctcacacataaacccgaccggaacagtcctgctccagctcgagaacactatgcagatgagcctcaaggacctgctg

SEQ ID NO: 3638 - DNA, 1287 bp, Artificial Sequence
  derived and/or modified sequence
atgcagttgagaaaccctgaactgcatctcggatgcgccctggcactcagatttctcgccctggtgtcttgggatattcctggtgccagagccttagacaatggtctcgccaggaccccaacaatgggatggctgcattgggaaagattcatgtgtaatttggactgccaggaggagcctgatagctgcatctctgagaagctgtttatggaaatggccgagctcatggttagcgagggttggaaagacgctggatatgagtacctgtgcatcgacgactgctggatggcaccccagcgtgatagtgaagggaggttgcaggccgatcctcagcggtttccccacggcatccggcagctcgctaattacgttcactctaagggcctgaagctagggatttatgccgatgtcggaaacaaaacctgcgcggggttccccggcagctttgggtattacgatatcgacgcccaaacatttgctgattggggggtggacctccttaagttcgatgggtgctactgtgacagcctagagaatctggcagacggctataagcatatgtcacttgctcttaataggacgggccgcagcatcgtctacagttgtgagtggcctctgtacatgtggcctttccagaagcccaactacacagagatcagacagtactgtaatcactggcgcaactttgccgacattgacgatagctggaaatctataaagtccatattagactggacgtcattcaatcaggaaaggattgttgacgtggcggggcccggcggttggaatgaccctgacatgctggtgattgggaatttcggactgtcttggaaccagcaggtgactcagatggcactgtgggccatcatggctgctccactgtttatgtccaacgacttgcggcacatctccccccaggctaaggcactgttgcaagataaggatgtgatcgcgattaaccaggacccactgggtaaacagggctatcagctccggcaaggggataacttcgaggtctgggagcggccactatccgggctggcttgggctgtggcaatgatcaaccgtcaggagattggcgggccacggtcttacacgatcgcggtggccagcctgggaaagggagttgcctgtaaccctgcatgtttcattacacagctgcttccagtaaaaaggaaattaggtttctacgaatggacatctcggttgagatcccacattaaccccacagggacagtgctgttgcagctggagaatacgatgcagatgagccttaaagaccttttg

SEQ ID NO: 3639 - DNA, 1287 bp, Artificial Sequence
  derived and/or modified sequence
atgcagctgagaaatccggaactgcatctcggctgtgctctcgctctccggttcctggctcttgtgtcatgggacatcccgggcgcccgcgctctcgacaacgggctggctagaacacccacaatggggtggttacattgggagcgatttatgtgcaatctggactgtcaagaagaacctgatagttgcatctcagaaaaactgttcatggagatggcagaactgatggtgtctgagggctggaaggacgcaggatatgagtatctatgtatagatgattgttggatggcccctcagcgcgacagtgaggggaggctgcaggctgatccgcagcgatttcctcatggaatcagacagcttgcgaactatgttcactccaaagggctcaaactagggatttacgccgacgtaggaaataagacatgtgctggcttcccagggagcttcgggtattacgacattgatgcccagaccttcgcagactggggggtagacttgctcaaattcgatgggtgttactgcgatagcctggagaatcttgccgatgggtataaacacatgtctctggctctgaatcgcacaggccggagtattgtgtattcttgtgaatggccgctttatatgtggccttttcagaagccaaactacacggaaatccgacagtactgcaatcattggaggaacttcgctgacattgacgatagctggaagtctatcaagtctatcttggactggacgagctttaaccaggagcgcatagtggacgtggcaggacctggaggatggaatgacccagacatgctggtaatcggcaatttcgggctgagttggaatcagcaggtgactcagatggccctctgggccattatggctgcccctcttttcatgtctaacgaccttcgtcacataagtccacaggcaaaagcactgttgcaagataaggatgttatcgcgattaaccaggatcccctggggaaacagggttaccagctgcgtcagggggataactttgaagtgtgggagcgccccctgtccggcttagcatgggcagtggcaatgattaatagacaggagatcggagggccacggagctatactatagctgtcgcttcactgggaaagggtgtggcttgcaatcctgcttgtttcatcacacagctcctgccagttaagcggaagctgggcttttacgaatggactagcagactacgcagtcatatcaatcccacagggactgtattgctacaattggagaacaccatgcagatgagtttgaaggacctgctt

SEQ ID NO: 3640 - DNA, 1287 bp, Artificial Sequence
  derived and/or modified sequence
atgcaactgcgcaatcctgagcttcacctcgggtgcgccctcgcccttcgattcttggcccttgtgtcgtgggacattccaggagcgcgtgctcttgataacgggctcgcccgtaccccaaccatgggatggctccattgggaacgcttcatgtgcaatcttgattgccaggaagagccggactcgtgtatttccgaaaagctgtttatggagatggccgaactgatggttagtgaaggctggaaggacgccggttacgagtacctctgtatcgatgattgttggatggcacctcaacgggactcggagggacgcctccaagcagacccacaacgcttcccgcatggaatccggcagctcgctaactatgtgcactccaagggactgaagctgggaatttacgcagacgtgggaaacaagacttgcgccggatttcctggcagcttcggttactacgatatcgacgctcagaccttcgcggattggggggttgacttgttgaagttcgatggctgttactgcgactccctggagaacttggcagacgggtacaagcacatgtcactcgcactgaacagaacgggaagatccatagtgtactcgtgcgaatggccactttacatgtggccattccagaaacctaattacactgaaattaggcagtactgcaatcactggaggaatttcgctgacatcgatgatagctggaagagcatcaagtccatccttgactggacttccttcaaccaggaaagaatcgtcgatgtggccggaccggggggctggaacgacccggacatgctcgtcatcggcaactttggattgtcgtggaaccagcaggtgacccaaatggcactctgggctataatggccgccccactgtttatgagtaacgacctgaggcacatctcaccgcaggctaaagcactcctccaggacaaggatgtgattgccattaatcaggatccgctcggcaaacagggttaccaactgcggcaaggcgataacttcgaggtgtgggagcggccgctgagcggcctcgcttgggcggtggccatgatcaatcgccaagaaatcggaggacccagaagctataccatcgcggtcgcttcgctgggtaagggggtagcctgcaaccctgcctgtttcatcactcaactgcttccggtgaagcggaaactgggtttctatgaatggactagccgactgcgctcacatatcaatccgaccggaactgtcctcctgcagctggagaataccatgcaaatgtcactgaaagacctgttg

SEQ ID NO: 3641 - DNA, 1287 bp, Artificial Sequence
  derived and/or modified sequence
atgcaattaaggaaccctgaactacatttgggatgtgcactcgcgctgaggttcctcgccctggtgagctgggatattcctggcgctagggcattggataatggcttagcccgcacacccacgatgggctggttgcactgggagcgttttatgtgtaacctggactgtcaggaggagccagattcctgcatctccgagaagctttttatggaaatggccgagctgatggtttctgagggctggaaggatgctggctacgaatatctgtgcatagacgattgctggatggctccccagcgcgactctgagggtaggctgcaggctgacccacagcgctttccccacggcatcaggcagctggctaactacgtacactctaaagggcttaagttgggcatttatgccgacgtaggtaacaagacctgcgctgggttccccggcagcttcggttattacgacatcgacgcccagaccttcgcggattggggggtggacctactgaaattcgacggatgttactgtgactcactggagaacctggctgatggttacaagcacatgagtctcgcgctgaatagaaccgggaggagcatcgtctatagttgcgaatggccgttgtacatgtggccttttcagaagcccaattatacggaaatccggcagtactgtaaccactggcgcaatttcgcggacattgatgattcctggaaatcaattaaaagcatccttgactggacaagttttaatcaggaaaggattgtggacgtggctggccccgggggatggaatgaccccgacatgctggtaatcggaaattttggactctcatggaaccagcaggtcacacagatggcactgtgggctattatggcggccccactgttcatgtccaacgacctccgtcacatcagcccacaggctaaggctctgcttcaagacaaggacgtgatcgcgatcaaccaggatcctctggggaaacagggataccagcttcgccagggggacaacttcgaggtctgggagagacccttgagcggtctcgcatgggcggtcgccatgataaatcgccaggaaataggcgggcccagatcctacaccatagctgtggcaagtcttggcaaaggagtcgcttgtaatcctgcctgcttcatcacacaattacttcccgtcaaacgcaagctgggattctatgaatggactagcaggctgaggagccatataaaccccaccggcacagtcttgctgcagctggaaaatacgatgcagatgagccttaaagatttgctt

SEQ ID NO: 3642 - DNA, 1287 bp, Artificial Sequence
  derived and/or modified sequence
atgcagctgcggaatccggaactgcacctgggatgcgccttggcgctgcgcttccttgccctcgtctcctgggacatccctggtgcgcgggccctcgacaatggactcgctagaaccccaaccatgggctggctgcattgggagcggttcatgtgtaatctcgactgccaggaagaaccggacagctgtatctcagagaagctgttcatggaaatggccgaattgatggtttcagagggctggaaagacgcgggatacgaatatctgtgcatcgatgattgctggatggccccgcaacgggactcagaagggcggctgcaagccgatccacaacggtttccgcacgggattcggcagctggccaattacgtgcactctaagggactgaaactcggcatctacgccgacgtgggcaacaagacctgcgcgggattcccgggttcatttggatactacgacattgatgcacaaaccttcgctgactggggcgtcgacctgcttaagttcgacggatgctactgcgattcgctggaaaacctggcagatgggtacaaacacatgtcactcgccctgaaccggactggtcggagcatcgtttactcgtgtgaatggccgctctacatgtggccatttcaaaagcccaactacaccgaaatcaggcagtactgcaatcattggagaaatttcgccgatattgacgactcatggaagtccattaagtcgatcctggattggacttccttcaatcaggagaggatcgtggacgtggcaggacccgggggatggaatgatcccgacatgctggtcatcggtaatttcggcctctcctggaatcagcaagtcactcagatggcactgtgggccatcatggcggcacccctcttcatgtccaacgaccttcgccacatctcgccccaagccaaagcgctgctccaggataaagatgtgatcgccatcaatcaagacccgctgggcaagcagggataccagctccgccagggagataactttgaggtgtgggaacgccctctgagcggtttggcctgggctgtcgccatgatcaaccgccaggaaatcggcggaccgagatcgtacactatcgcagttgcatccctcggaaagggagtggcatgcaaccccgcctgcttcatcacccaactcctgcccgtgaagcgaaagttgggcttctacgaatggacgtcacgcctgaggtcgcacatcaaccctactggaactgtgcttctgcagctcgaaaataccatgcaaatgtccctcaaggacctgctg

SEQ ID NO: 3643 - DNA, 1287 bp, Artificial Sequence
  derived and/or modified sequence
atgcagcttcgaaacccagagttgcacttgggatgcgctctggcactgcggttcctggctctggtgagctgggatattccaggcgcaagggctctggataatggccttgcccgcacaccaaccatggggtggttgcattgggagagatttatgtgcaacttggactgtcaggaagagcccgactcatgtatctctgagaaactgttcatggaaatggctgaactgatggtgagcgagggctggaaggacgcaggatatgaatacctttgcatcgacgactgctggatggcaccacagagggactctgagggccgccttcaggcggacccgcagagattcccacatggaatcagacagctcgccaactacgttcactctaagggtcttaagctgggcatctacgctgatgtgggtaacaaaacctgtgccggatttcctggtagctttggatactacgatatcgatgcgcaaacctttgcagactggggcgtggacttgctcaagtttgacggatgctactgcgacagtttggaaaacttggccgatggatacaagcacatgtcccttgcccttaatagaaccggtagatccatcgtatacagttgcgagtggcctctgtacatgtggcctttccaaaagcctaactacacagaaatacgtcagtactgtaaccactggcgcaatttcgccgatatcgacgacagctggaagagtatcaagagtattctggattggaccagctttaatcaagagcgcatcgtggatgttgctggtcctggcgggtggaatgaccctgatatgttagtcatcggaaacttcggcctcagctggaaccagcaagttacacagatggctctgtgggctatcatggccgctcctctttttatgtctaacgatctccgccacattagccctcaggctaaggcactcctgcaggataaagacgtcattgccatcaaccaggacccactggggaaacagggatatcagctgcgtcaaggcgacaacttcgaggtctgggagcgcccactttctggcctggcctgggcagtggccatgataaacaggcaggaaatcggaggccccaggagctacaccatagccgtcgcttctctcggaaagggcgtcgcctgcaaccctgcttgcttcatcactcagctcctgcctgtaaaacgcaaattagggttctacgaatggacctctagactcagatcccatattaaccccaccggcaccgtcctgttgcagctggaaaacacaatgcagatgtctctcaaagacctgctc

SEQ ID NO: 3644 - DNA, 1287 bp, Artificial Sequence
  derived and/or modified sequence
atgcagttgcggaacccagaattgcacctgggatgcgccctggcactgaggttcttggcattggtgtcctgggacatcccgggagcccgcgccctggataacggactcgccagaaccccaactatgggatggttgcattgggaacgctttatgtgtaaccttgactgccaggaagagccggattcctgcattagcgagaaactgtttatggaaatggccgagcttatggtgtcagagggatggaaggacgccgggtacgagtacctttgcatcgatgactgctggatggcgccgcagcgcgactctgaaggacggctgcaagcagaccctcagagattccctcacggaatccggcaactcgccaactacgtccatagcaaaggactcaaacttggaatttacgcggatgtcggcaacaagacttgcgccggcttccctggatccttcgggtattacgacattgatgcacaaaccttcgctgactggggagtggacctcctgaaatttgatggctgctactgcgacagcctcgaaaatctcgcggacggctacaagcacatgtcactcgcgctcaaccgcacggggcgatctatcgtctactcgtgtgagtggcccctttacatgtggccatttcaaaagccaaattacacggaaatacgacaatactgtaaccattggcgtaatttcgccgatatcgacgatagctggaagagcatcaaatcgatcctggactggacctcattcaaccaagaacgtattgtcgatgtggcagggcccgggggatggaacgacccggatatgctggtgatcggaaacttcggtctgtcatggaatcagcaggtgactcagatggcgctgtgggctatcatggccgcgccgctgttcatgtcgaatgatctgagacacatttccccgcaagcaaaggctctgctgcaagacaaagacgtgatagccattaatcaagaccctctgggaaagcagggttaccagctgcggcagggtgataacttcgaagtgtgggagaggccgctctctggactggcttgggcggtggcaatgatcaaccggcaggaaatcggcggaccacgctcgtatactatcgcggttgctagccttggtaagggtgtggcttgcaaccccgcatgtttcatcacccagctccttccagtcaagagaaagctcggcttctacgagtggacttcgagactccgctcgcacatcaatccgactggtaccgtgcttctccaactggaaaataccatgcagatgtcgcttaaggatctgctg

SEQ ID NO: 3645 - DNA, 1287 bp, Artificial Sequence
  derived and/or modified sequence
atgcaactccggaatcctgagctccacctcggttgtgcactggctctgcgctttctggcgctggtgagttgggatatccctggagcaagggcactcgacaatgggttggcacgaactccaaccatgggctggctccactgggaacggtttatgtgtaacctggactgccaggaagaaccagattcgtgcatcagcgaaaagctgtttatggaaatggcagaactgatggtgtctgaaggatggaaggatgcaggatacgagtacctgtgcatcgatgattgttggatggcccctcaacgcgactccgagggtcggctccaggcggatccacaaagatttccacacggtattcggcaactggcgaattacgtgcattccaaaggactgaagctgggaatctacgcagatgtcggtaacaagacctgtgcaggattcccgggctctttcggatactatgatattgatgcacaaactttcgccgactggggagtggacctgcttaagttcgatggttgctactgcgattcacttgaaaacttggcagatggttacaagcacatgtccctggcactcaatcgtacgggtcgatcgattgtctacagctgcgaatggccactctacatgtggccattccagaagcctaactatacggagatacgtcagtactgtaatcactggaggaactttgcggacatagatgactcttggaagtccataaagagcattctcgactggaccagctttaatcaagaacgaattgtcgacgtggcagggcctggtggatggaatgatcctgatatgttggtgatcgggaactttggactgtcatggaaccaacaggtgactcagatggcattgtgggctatcatggccgcaccactgtttatgtccaacgacttgaggcatatttcgccacaggcaaaggccttgctgcaggataaggatgtgattgccattaatcaagaccccctggggaaacaaggataccaactgcgccaaggtgataactttgaggtctgggaacgccccctctccggactggcctgggcagtcgctatgattaaccgacaagagatcggtggaccccggtcctacactattgctgtggcatcgttgggaaagggcgtggcatgcaaccctgcctgcttcattactcaactcctgccagtgaaaagaaaactgggcttctacgagtggacctcgagacttagaagccacattaaccctactgggaccgtcctgctccagctcgaaaacaccatgcagatgtcacttaaggatttgctt

SEQ ID NO: 3646 - DNA, 1287 bp, Artificial Sequence
  derived and/or modified sequence
atgcaactgagaaatcctgaacttcatctgggatgtgcactggcacttaggtttctcgccctggtgtcctgggacattccaggtgcccgcgcacttgacaacgggctcgcaagaactccaactatggggtggcttcattgggagcgctttatgtgtaacctggattgtcaggaagagcctgactcgtgtatttccgaaaagctgttcatggaaatggctgaacttatggtatcagaaggatggaaggacgccggttacgaatacttgtgtattgacgattgttggatggcaccgcaaagagactccgaagggagactgcaggcagaccctcaacggtttcctcacggcatacgacagctggcgaattacgtgcactccaagggattgaaattgggcatatacgcagatgtcggtaataagacttgtgccggttttccagggagctttgggtactacgacattgacgcccaaacgttcgcggattggggcgtggatcttctgaaatttgatggctgttactgcgatagccttgagaatttggcggatggctataaacacatgtcgcttgccctcaacagaactggaagatcgattgtttactcgtgcgaatggccactttacatgtggccgtttcaaaagccaaactacactgaaattcggcaatactgtaatcattggcggaactttgcagacattgatgattcgtggaagtctattaagtcgattctggattggaccagcttcaaccaggaacggattgtggatgtcgccggccccggaggatggaacgatccagacatgcttgtgatagggaattttggtctgagctggaatcaacaagtgacccaaatggcactgtgggcaattatggcagcaccactcttcatgagcaacgacctgagacatatttcaccccaggcgaaagcacttctccaggataaggatgttatcgctattaaccaagatcctctggggaagcaaggctaccagctcagacagggtgataacttcgaggtgtgggaacggcccctgagcggtcttgcttgggctgtggccatgatcaacaggcaagaaataggagggccaagatcgtacaccatcgcagtggcatccttgggaaagggtgtcgcctgcaatcctgcttgtttcataactcaactcctcccagtcaagaggaagctgggattctacgaatggactagccgcctgagaagccatatcaacccgactgggacggtgcttctgcagctggaaaacactatgcaaatgtcactgaaggaccttctg

SEQ ID NO: 3647 - DNA, 1287 bp, Artificial Sequence
  derived and/or modified sequence
atgcaattaagaaacccagaattgcacctgggatgcgcattggctctcagatttctcgctttggttagctgggacattcccggggcacgtgctcttgataacggacttgcaaggacccccactatgggatggcttcattgggaaaggttcatgtgcaaccttgattgccaagaggaacccgactcatgcatttccgaaaaacttttcatggagatggctgagttgatggtttctgaaggatggaaagatgcaggctatgaatatctctgcattgatgactgctggatggccccacaaagagatagcgagggtcgtttacaagccgatcctcagagattcccacatggaataaggcagcttgccaactatgttcatagcaagggattgaagctcggaatttatgccgacgttggaaataagacgtgcgctggatttccaggtagtttcggatattacgatattgacgctcaaaccttcgccgactggggcgtcgacctcctcaagtttgatggttgctactgtgacagcctggaaaaccttgcagacggctataagcatatgtcccttgcattaaaccgtaccggacgatctatcgtttatagttgcgagtggcctctgtatatgtggccattccagaagcctaactacactgaaatcagacagtattgtaaccattggaggaattttgcagatatagacgactcctggaagagtataaagagtatcctcgattggacctcctttaaccaggaacgtatagtggatgtcgctggccctggtggatggaacgaccccgacatgcttgtgattggaaacttcggtttgtcatggaaccaacaagtgacccaaatggcactttgggctataatggccgctccattgttcatgtcaaacgacctaaggcacatcagcccacaagctaaagcgcttcttcaggacaaagatgtaattgccattaatcaggatccgcttggaaagcaggggtatcaacttaggcagggagataattttgaggtgtgggaaaggcccctttcagggttggcctgggcagtagcaatgattaatagacaagagataggcggtcccaggtcgtacacaatcgcggtcgcttcattgggaaagggagtcgcttgcaatccagcttgttttattacccaattattacccgttaagcgtaagttgggtttttacgagtggacgtccagactccgcagccatatcaaccctactggtaccgttctgctccaactagagaatacaatgcaaatgagccttaaggatttgttg

SEQ ID NO: 3648 - DNA, 1287 bp, Artificial Sequence
  derived and/or modified sequence
atgcagctgagaaacccggaactccacctgggctgtgccctggcgctccggttcctggccctggtgagttgggacattccgggagcccgcgcgctggacaacggactcgccagaacgccaactatgggatggctgcactgggagcggtttatgtgtaatctggattgccaagaggaaccggattcgtgtatctccgagaagctcttcatggaaatggccgagctgatggtgtccgaaggatggaaggacgccggatacgagtacctctgcatcgatgactgctggatggcgccgcagagggattccgaaggacgcctgcaagcggatccgcagcgcttccctcatggcattcggcaactggcgaattacgtccattcaaaggggctcaaattgggaatctacgctgacgtcggcaataagacttgcgcaggattcccggggtctttcggatactacgatatcgacgcgcaaaccttcgccgattggggcgtggatcttctgaaattcgacgggtgctactgcgattccctggagaaccttgccgacggctataaacacatgtcactggccctcaatcgcactggaagatccatcgtgtactcgtgcgagtggccgctctatatgtggcctttccagaagcccaattacaccgagatcagacagtactgcaaccactggcggaacttcgccgacatcgacgattcctggaagtcgatcaagtcgatcctggattggacttcatttaaccaagaacgcatagtggacgtcgcgggcccgggaggatggaatgacccagatatgcttgtgattggaaatttcggtctttcttggaaccaacaagttactcagatggcgctgtgggccattatggccgcgccactgttcatgtctaacgacttgcgccacatttccccacaagccaaggcgcttctgcaggacaaggacgtcatcgccatcaatcaggatcctctgggaaaacagggataccaactcagacaaggcgacaacttcgaggtctgggagcgacccctgtccggcctggcatgggcggtggctatgatcaaccggcaggagattggcggcccgaggagctacactatcgccgtcgcgtcgctgggaaagggggtggcatgcaacccagcctgtttcatcacccagctgctccctgtcaagcggaagctgggtttttacgaatggacctcgcgactgagatcacacattaaccctactggtacggtgctcctgcaactcgagaacacgatgcaaatgtcgctgaaagacttgctt

SEQ ID NO: 3649 - DNA, 1287 bp, Artificial Sequence
  derived and/or modified sequence
atgcagctccggaatccagaactgcacctgggatgcgccctggccctgcgcttcctggccctcgtctcgtgggatatcccgggtgcaagagcgctggacaacgggcttgcccggactccgaccatggggtggttgcattgggaacgcttcatgtgtaacctggattgtcaggaggaaccagacagctgcatctcagaaaaacttttcatggagatggccgagctgatggtgtcggagggatggaaggatgctggttacgagtacctctgtatcgacgactgctggatggctccacagcgcgactcggagggtagacttcaggctgacccccagcgcttcccgcatggaattagacagctggccaattacgtgcactcgaagggcctgaagctggggatttacgcagacgtgggaaacaagacctgcgcgggattcccaggctcgtttggctactacgacattgatgcccagaccttcgccgattggggagtcgatctcctgaaattcgacggatgctactgcgattcgcttgaaaacctcgcagacggatacaagcacatgtcgcttgccctgaaccgcaccggccggtccatcgtctattcctgcgagtggcccctgtacatgtggcccttccagaagccaaattacaccgaaatccggcagtactgtaaccattggcgcaacttcgcagacatcgacgactcgtggaaaagcatcaagtccatcctggattggacctccttcaatcaggagcggatcgtcgacgtggccggaccgggagggtggaatgaccctgacatgctggtcattggaaactttggactcagctggaaccaacaggtgacccagatggcactgtgggctatcatggccgcacctctctttatgtcgaacgacctgcgccatatttcccctcaagccaaggctcttctccaagacaaggacgtcattgctatcaaccaggacccgcttggcaaacaaggctaccagctgcgccaaggcgataacttcgaagtctgggagcggccgttgtcaggcctggcatgggcagtcgccatgatcaatcgccaagaaataggaggtccccggagctatactatcgccgtggcttccctgggaaagggagtggcttgtaaccctgcttgtttcatcactcaactcctgcccgttaagcggaaactcggcttctacgagtggacttccaggttgcgaagccacatcaatcctaccggaacggtcctgctgcagctcgaaaacaccatgcagatgtccctgaaggacctgctt

SEQ ID NO: 3650 - DNA, 1287 bp, Artificial Sequence
  derived and/or modified sequence
atgcagctgcgtaaccccgaacttcatctggggtgtgcattggcattgagatttttggctctggtgagctgggacatacccggcgcacgcgcactggacaatggcctcgcacgaaccccaaccatgggttggctccactgggaacgttttatgtgcaacctggactgtcaggaagaacctgattcgtgtatttccgaaaagctctttatggagatggctgaactcatggtgtcagaaggctggaaggatgccgggtacgagtacctttgtatcgacgactgttggatggcaccgcaaagagattccgaaggtcgtttgcaggctgaccctcagagattcccacatggaatcagacagcttgctaactacgtgcactctaagggactgaagctcgggatttacgcggatgtcgggaataagacttgcgcaggttttcccggatcatttggatactacgatattgacgcccaaacttttgccgattggggagtggatcttttgaaatttgatggatgttattgtgatagcctggaaaacctcgcagatgggtacaaacatatgtccctcgcacttaatcggacgggtcgttctatcgtctacagttgcgagtggccactgtacatgtggccttttcaaaagcctaactacaccgagattagacaatactgcaatcattggcggaatttcgcagatatcgacgattcgtggaaaagcatcaaatccattcttgactggacgtcctttaaccaggagcggatcgtggatgtcgcagggcctggcggatggaacgatccagatatgcttgtgatcgggaatttcggactgtcatggaaccaacaggtgactcagatggcgctttgggcgatcatggccgcaccccttttcatgtcgaacgatcttcggcatatttcgcctcaggccaaagcgcttctgcaagacaaggatgtcattgccattaaccaagatccactgggaaagcaaggctaccagcttagacaaggagacaatttcgaggtgtgggaacgcccacttagtgggctcgcatgggccgtggccatgataaaccgccaggagatcggcgggccccgttcctacactatcgctgttgcatcgttgggcaaaggtgtggcatgcaatccagcctgtttcataactcagctcctgccagtcaagcgtaagctcggattctatgaatggacctcccgtctgcgatcgcacattaaccccactggaaccgtgctgcttcaactcgagaacaccatgcaaatgagcctgaaggatctgctt

SEQ ID NO: 3651 - DNA, 1287 bp, Artificial Sequence
  derived and/or modified sequence
atgcagttgagaaatcccgagcttcacctggggtgcgccctggcgctgaggtttctcgccttggtcagctgggacatcccaggagcccgcgcgctggataatggacttgcgagaaccccgactatgggctggctccactgggagcgttttatgtgtaacctggactgccaggaggagccggattcgtgcatctcggaaaagctcttcatggagatggccgagctgatggtgtctgaaggctggaaagatgcaggctacgaatacctctgtatcgatgattgttggatggcaccacaacgcgacagcgagggccggctgcaggcggatcctcaacgttttcctcacggaatcaggcagctggcaaactacgtgcattcaaagggcctgaaattggggatctacgccgacgtcggtaacaagacctgcgccggattcccgggatctttcggatactacgatatcgacgcacaaacctttgccgactggggcgtagacctgctgaaattcgacggatgttattgtgactcacttgaaaacctggcagatgggtacaaacacatgtccctggccctcaacagaactggtcggagcatcgtttactcgtgtgaatggccactctacatgtggccgttccaaaagcctaattacaccgagatccggcagtactgcaatcattggcgcaacttcgctgacatcgacgattcctggaaaagcatcaaatcgatcctggactggacttccttcaatcaggaacggatcgtggatgtggccggacctggaggatggaatgacccagatatgctcgtgattgggaattttggattgtcctggaaccagcaggtgactcagatggccctctgggcgattatggctgccccgctgttcatgtcaaatgaccttcgccatatctcgcctcaagcgaaggcgctgttgcaggacaaggacgtcatcgccattaaccaggatccgctgggcaagcaaggataccagctccgccaaggagataacttcgaggtgtgggaacggccactgagcggactggcatgggctgtcgcaatgataaaccggcaagaaattggaggcccacgatcctacactatcgccgtggcctccctcggaaagggcgtagcctgcaacccagcgtgcttcatcacccagcttctccccgtcaagcgcaagctcggtttctatgaatggaccagccgcctgaggtcgcacataaatccgactggtacggtgctgttgcagcttgaaaacaccatgcaaatgtcactgaaggatctgctc

SEQ ID NO: 3652 - DNA, 1287 bp, Artificial Sequence
  derived and/or modified sequence
atgcagctgcgcaaccccgaactccatctgggctgcgcccttgcgttaaggttcctcgccctggtgtcatgggatattccgggggctagagcactcgacaacgggctggctcgcacccctacaatggggtggctgcattgggaacgctttatgtgcaacctggattgccaagaagaaccagatagctgcatctctgagaagctctttatggaaatggctgagctcatggtaagcgagggatggaaggatgccgggtacgagtacctctgcattgatgactgctggatggctccgcaaagggattcagagggcagactacaagctgatccccagcgattcccccatgggatccggcagctggccaattacgtgcacagcaagggcctgaagttaggaatctacgccgatgtgggtaacaagacgtgtgctggatttcccggctccttcggttattatgacatcgacgcacaaactttcgcagactggggcgtggatcttctaaagtttgatggatgttattgcgacagtctggaaaatctggccgatggatacaagcatatgtctttagcactgaaccgcaccggccgaagtattgtatactcttgtgagtggcctctgtacatgtggccatttcagaagcctaattacaccgaaattcgacaatattgcaatcattggcggaacttcgccgacatagacgactcctggaaatcaatcaaatctatcctggactggactagcttcaatcaggagagaatcgtagatgttgccggccccggtggatggaatgaccctgacatgctagtgattggaaatttcgggctgagttggaaccaacaagtcacccagatggccctgtgggctattatggctgcacctttgttcatgtctaatgatctgcgccacatctccccccaggccaaggcactattgcaagataaagatgtcatcgcgatcaatcaggatcctttaggcaagcaaggataccagctgcgccagggagataacttcgaagtctgggagcggcctctgagcgggctggcttgggctgtcgcaatgatcaataggcaagaaatcggtggtcctcgttcatacacgatcgcagtcgcctccttaggcaagggggtggcttgtaatcctgcctgctttattacccagctgctacctgtaaaacgcaaactaggcttctatgagtggacgtcgaggctccgatctcatattaatccaactgggaccgtccttcttcaactagaaaacactatgcagatgagtcttaaggacttactg

SEQ ID NO: 3653 - DNA, 1287 bp, Artificial Sequence
  derived and/or modified sequence
atgcagctcaggaaccctgaactgcacctgggatgcgcacttgccttgagattcctggctctcgtctcatgggacatacctggggcgagagcgctggataacggacttgcccgaacccccacgatgggttggctccactgggaaaggttcatgtgtaacctcgattgtcaagaagagcctgacagttgcattagtgaaaagctgtttatggaaatggcagaactcatggtgtctgagggctggaaagacgccggttacgagtacctgtgtattgacgactgttggatggcgccccagcgcgacagcgagggtcgtctacaggctgatccccagagatttccacacggcattaggcagctcgctaattatgtgcatagcaaggggctaaaactagggatctacgcagacgtggggaacaagacctgcgccggatttcccgggagctttgggtactacgatatcgacgcccagacgttcgctgattggggcgtggatttgcttaagtttgacgggtgctattgtgacagtctagaaaacttagccgacgggtataagcatatgtctttggcactgaataggacaggcagaagcatcgtatactcttgcgaatggcccctgtacatgtggccatttcagaaacctaattacacagaaattagacaatattgtaatcactggaggaactttgcagacatagacgactcttggaagtctatcaagagcatcctggattggacaagctttaaccaggagcgaattgtggatgtcgctggtccgggcgggtggaatgatcctgacatgctggtaattggaaatttcggactgagttggaatcaacaggtgacccaaatggctctgtgggcaattatggccgcgccattgtttatgtccaatgacttacgacacatctccccgcaagccaaggccctgctgcaggacaaggacgtgattgccatcaaccaagacccgctcggtaaacagggatatcagctgcgccagggggataattttgaggtgtgggaaaggccactaagcggactggcatgggccgtggcaatgattaaccgacaggaaatcggaggccctagatcctataccatagctgtggccagcctcggcaagggggttgcttgcaatccagcgtgtttcataacccagctcttaccagtgaaaaggaaactggggttctatgaatggacaagccgcttacgtagtcatatcaatcctacaggcaccgtgttgctgcaattggaaaataccatgcagatgtcactcaaggacctcctg

SEQ ID NO: 3654 - DNA, 1287 bp, Artificial Sequence
  derived and/or modified sequence
atgcagcttcgcaatccagaacttcacttgggctgcgccctggcccttagatttctcgccttagtgagctgggatatcccaggagcaagagctctcgataatggcctggccaggacacctaccatgggttggttgcattgggagagattcatgtgtaacctggattgccaggaggagcctgattcatgtatctctgagaaactgttcatggaaatggctgaactgatggtgtccgaggggtggaaggatgctggttatgaatacctctgcattgatgactgttggatggctccccaaagagattccgagggtaggctacaggccgacccacagagattcccccatggcattaggcagcttgcaaattatgttcactccaagggcctgaagcttggaatttacgcggacgtgggaaacaaaacctgtgcagggtttcccggctcttttggttattacgatattgatgctcagaccttcgcggattggggggtcgaccttttaaagtttgatggctgttactgtgatagcctggagaacctcgcagacggatataaacacatgagcttagctctgaataggactgggcgctctatcgtgtacagttgcgagtggcctttgtatatgtggccattccaaaaacccaattacacagagatccggcagtactgtaatcactggagaaattttgcagatattgatgatagctggaagagcatcaagtccatcttggattggaccagcttcaaccaggaacgcatcgtcgatgtcgccggccctggaggctggaacgacccagacatgctcgtgattgggaactttgggctgagctggaaccaacaagtgacccagatggccctatgggcaattatggcagcacctctgtttatgagcaacgacctgagacatatcagcccccaggccaaagcactgttacaggacaaggacgtgatcgccataaaccaagacccccttggaaaacaaggctatcagctgagacaaggtgataacttcgaggtttgggagagaccattgtcaggactcgcttgggctgtcgccatgatcaatagacaggagatcggcggacctagatcctacaccatcgcagtggcgagccttggaaagggcgtcgcttgcaaccccgcttgcttcatcacacaacttctgccagtgaagcggaagctcgggttttacgaatggacaagcaggctgaggagccacattaaccctactggaaccgtgctgctgcagttggaaaacacaatgcagatgagcctgaaggatctcctc

SEQ ID NO: 3655 - DNA, 1287 bp, Artificial Sequence
  derived and/or modified sequence
atgcaactgcgcaatcctgagttgcacctgggctgtgcactggcattgcggtttctcgcacttgtcagttgggatatcccgggggctcgcgcgctcgataatggcctcgcacgcacccctaccatgggctggcttcactgggaaagatttatgtgtaacctggattgtcaagaggagcccgacagctgcatctccgaaaagctgtttatggaaatggcggaactgatggtcagcgagggctggaaagatgcaggatacgaatatctttgcattgacgactgttggatggcgccccaaagagattcagagggccgcctccaggcagatccacagagattcccgcatggtattcgtcagctcgctaattacgtgcattccaaaggtctgaagctcggtatatacgcagatgtgggtaacaagacttgcgcaggctttcctggatccttcggttactacgacattgatgcccaaacgtttgcagattggggcgtggaccttcttaagtttgatggttgttattgcgacagcctcgaaaatcttgcggatgggtacaagcacatgtcgctggcacttaaccgcactggtcgttcaattgtgtattcatgtgaatggcccctgtacatgtggccttttcagaaaccgaactacaccgagattcgccaatactgcaaccactggcgcaacttcgcagatatagatgattcgtggaaatcgattaagtcgatcctggattggacttcattcaatcaggagcgaattgtggacgtggctggaccaggaggatggaacgacccagatatgctggtcatcgggaactttggtctttcctggaaccagcaggtcacccaaatggcactttgggcaatcatggccgcacccctgtttatgtcgaatgatcttagacatattagcccacaggccaaggctctccttcaggataaagatgtgattgccattaatcaggacccactgggaaagcagggataccaactcagacagggcgataactttgaggtgtgggaaaggcccctttctggtctggcatgggcagtcgccatgattaatcgccaagaaataggaggtccgagaagctacacgatcgctgtcgcatcgctggggaagggagtcgcctgtaacccagcctgctttatcactcagctgctgcctgttaagagaaagctgggcttttacgagtggacctcgcgactgaggagtcacataaatccaactggaactgtgctgctgcaattggaaaacacgatgcagatgtcgctgaaggaccttctg

SEQ ID NO: 3656 - DNA, 1287 bp, Artificial Sequence
  derived and/or modified sequence
atgcagcttcgtaatccagaactgcacctggggtgcgcccttgcactgagatttctcgcgcttgtctcctgggatatccctggggctagagcgcttgacaacggattggcgaggacccctaccatgggttggctccactgggagcgtttcatgtgcaatctggactgccaggaggaaccagattcctgtatcagtgaaaagctgtttatggagatggccgaattaatggtaagcgaaggttggaaagacgctgggtacgagtatctttgcatcgacgactgctggatggcaccccaacgagattccgagggaagactgcaggcggacccgcagcggtttcctcacggcattcgccaactggccaattacgtacattccaaaggcctaaagttaggtatctacgccgacgtgggcaacaaaacttgcgcagggtttcccggatcgttcgggtactatgacatagatgcccagacttttgcagactggggagtggatctgctcaagttcgatggttgctattgtgattcactcgagaacctcgccgacgggtataaacatatgtctctcgccctaaatcgaacaggccggagtatcgtatactcctgcgaatggcctctgtacatgtggccctttcagaaacctaattacaccgaaatcagacagtattgcaatcactggcgaaacttcgctgacattgatgatagttggaaaagtatcaaatctatattggattggacctcttttaatcaggaaagaatcgtagacgtggccggtcccggaggctggaatgacccagatatgctggtaataggaaactttggcctgagctggaatcaacaagtaacacagatggcgttatgggccatcatggcagctcccctttttatgtctaacgaccttcggcacatctcacctcaggccaaggcactcttacaggacaaggatgtgatcgctatcaaccaggaccccctcggaaaacaggggtatcagctgcgacagggtgacaattttgaggtgtgggagcgtccgctgtcagggctggcctgggcagtggccatgataaatcggcaggagatcggcggccctaggagttacactatcgccgtcgcctccctcggcaaaggtgtggcatgcaacccagcatgcttcattacccagttactccctgtgaagcggaaactcgggttctacgagtggaccagccgccttagatcgcacataaatccaacaggcaccgttctgctgcagttagaaaacacaatgcaaatgagtctgaaggacctctta

SEQ ID NO: 3657 - DNA, 1287 bp, Artificial Sequence
  derived and/or modified sequence
atgcagcttcggaacccggaattacatttgggttgcgcactggctttgcgcttccttgctcttgtctcctgggacatccctggtgcccgcgcccttgacaacggtctggcacgtaccccgacgatggggtggctgcactgggagcggttcatgtgcaatttagattgtcaggaagaacctgattcttgtatttccgaaaaactgtttatggaaatggcagagttaatggtctccgaaggttggaaggatgctggatacgaatatctctgcattgatgattgttggatggcgccgcagagggatagcgagggccgccttcaagctgacccgcaacgcttcccgcatggcattcgccagttggcaaattacgttcatagtaaggggttaaaactggggatctacgctgacgttggcaacaaaacttgtgcaggattcccgggcagctttgggtattatgatattgatgcacagacgtttgcggattggggtgttgatcttttgaaattcgatgggtgttattgcgatagcttagaaaatcttgcagacggctacaaacatatgagcctggctttaaataggacgggacgcagcatcgtctactcttgtgagtggccattatatatgtggccatttcaaaaaccgaattacacagagatccgacagtattgtaaccattggaggaactttgcggatattgatgattcgtggaaatcgattaaatctatactagattggacatcatttaatcaagaacgcatagtcgatgtcgcgggtccgggtggttggaatgacccggatatgttagtgattggcaatttcggcctatcatggaatcagcaggtaacccaaatggctctgtgggctataatggcagccccgctttttatgagcaatgatttgcgacatataagcccgcaggccaaagcactgctacaagacaaagatgtcatcgcgatcaaccaagacccgctgggcaaacaaggctatcagctcaggcagggagataattttgaagtctgggaacggccgttaagtggcctggcgtgggcagttgcaatgatcaataggcaagagatcggaggcccacgctcctatactatcgcagtcgcgtccctggggaaaggggtcgcgtgcaatccagcttgctttatcactcaactgctcccggtgaagagaaagctcggattttacgaatggacatcaaggcttagaagtcatatcaatccgacgggtacggtgttgctacagctggaaaatacaatgcagatgtcgttgaaagacttactg

SEQ ID NO: 3658 - DNA, 1287 bp, Artificial Sequence
  derived and/or modified sequence
atgcagctacggaatccagaacttcacttgggatgtgctctcgctctgcggttccttgccctcgtctcatgggacattccaggagctcgggctctggataatggacttgccaggacacccacaatgggatggttacattgggaaaggtttatgtgtaacctcgactgccaggaagaacctgattcatgcatatccgaaaaactcttcatggaaatggctgaactcatggtatctgaagggtggaaggatgcaggatatgagtatctgtgtattgatgattgttggatggcaccccagcgcgacagtgaagggcggctccaggctgatcctcagcgattccctcatggaatcagacagctagccaattatgtgcactcaaaggggctgaagctggggatatacgcagatgtgggaaataagacttgtgccggatttcccgggtccttcgggtactatgatatagatgcccagacatttgcagattggggagtggatctcctgaaattcgatgggtgctattgtgattcgctcgaaaacctcgcagatgggtataaacatatgtccctcgctttgaatagaacaggacgaagtatagtgtactcttgtgaatggccactgtatatgtggccctttcagaaacctaattatacagaaatacggcagtattgcaatcactggcggaattttgctgatatcgatgattcttggaagagtatcaaatccatcttggattggacttcctttaaccaggagcggatagtggatgttgctggaccgggagggtggaacgatcctgatatgctggtcatcgggaatttcggactctcctggaatcagcaagtgacacaaatggcactttgggccattatggcagctccccttttcatgtcaaatgatctacgacatatctctccacaggctaaggccctcttgcaggataaggacgttatagccatcaatcaggatcccttaggaaaacagggatatcagttgcggcagggggataacttcgaagtgtgggaacggcctctcagtggactcgcctgggccgtggctatgataaatcggcaggaaataggaggacctagatcttatacaatcgctgtagccagtcttggaaaaggagtggcttgcaatccagcctgctttatcacacagctgctcccagttaaacggaaactcggattctatgaatggacaagtagactcagatcgcatatcaaccctacagggactgtactccttcagttagaaaacacaatgcagatgagtttaaaagatcttctt

SEQ ID NO: 3659 - DNA, 1287 bp, Artificial Sequence
  derived and/or modified sequence
atgcaactccggaatccggaactgcacctgggctgtgcactggctttgcgcttcctggcactggtgtcgtgggacattccaggagcgcgcgctttggataacggactggcccggaccccaactatgggttggcttcactgggaaagattcatgtgcaatctggactgccaggaggagccggactcgtgtatctccgaaaaactcttcatggagatggccgaattgatggtgtcagagggatggaaagatgcggggtacgaatatctttgcattgatgactgctggatggcacctcagagagactcggaaggacgcctccaagcggaccctcaacggttcccacatgggattagacagttggcaaactacgttcacagcaagggcctcaagctgggcatctacgctgatgtgggcaacaaaacctgcgcgggattccctggatcattcggatattacgatatcgatgctcagacttttgcagattggggagtggatctcctgaaattcgacggatgctactgtgacagcttggagaacctggcggacggttacaaacatatgtccctcgcgctcaatcgcacgggaagatccatcgtgtactcatgcgaatggcccctgtacatgtggcccttccaaaagccaaattacaccgagatcaggcagtactgcaatcactggaggaatttcgccgatatcgacgacagctggaaatccattaagtcaatcctggattggacttccttcaaccaggagcgcattgtggatgtggccggaccgggaggatggaacgacccggacatgctcgttatcggaaatttcggtttgtcgtggaaccaacaagtcactcagatggcactgtgggcgatcatggccgcccctctgttcatgtcaaatgacctgcgccacatctcgcctcaggctaaagccctcctccaagacaaggacgtgatcgcaatcaatcaggatccactcggaaagcaagggtatcagctcagacaaggtgataacttcgaagtctgggaacggccgttgagcggactggcctgggcagtggcgatgatcaaccggcaagagattggcggcccacgctcctacactatcgccgtcgcttccctgggcaaaggagtcgcatgcaatccggcttgttttatcactcagctgctgccagtcaaacgcaagctcgggttttacgagtggacttcgaggcttcggtcacatatcaacccgactggcacggtgctgctgcaactggagaatactatgcagatgagcctcaaggacctcctg

SEQ ID NO: 3660 - DNA, 1287 bp, Artificial Sequence
  derived and/or modified sequence
atgcagttacgtaatcctgaactgcacttggggtgtgccttggcactgagattcttggcactggtgagttgggatattcccggcgcccgagctctggacaatggactggcccgtactcctaccatgggctggctgcattgggagcggtttatgtgcaatctggattgccaggaggagcccgactcctgtatatccgaaaagctgttcatggagatggccgagcttatggtctcagaaggctggaaggacgcaggatatgagtatttgtgcatcgacgactgctggatggcccctcagagggactccgaggggcgtcttcaggcggacccacaaaggtttccacatgggatcagacagttggcgaactacgttcacagtaaagggttgaagctgggtatctatgccgacgtgggcaataagacatgtgccggtttccccgggtctttcgggtattatgatatcgatgcccagacctttgcagattggggcgtcgatctgttgaagttcgacggatgttactgtgacagtctggagaatctggcagacggctacaagcatatgagtctagctcttaatcggactggacggtctatcgtttattcatgtgagtggcccttatacatgtggccgtttcagaagccaaactacactgagatccgacagtactgtaatcactggcggaacttcgctgacattgacgactcctggaagtcaattaagtccattctagattggacctcgttcaaccaggagcggatcgtggatgtggccggtcctggaggatggaacgatcctgacatgctagtaattggtaacttcggtctgtcttggaatcaacaggtgacccagatggctctgtgggcaatcatggctgccccacttttcatgtcaaatgatctcaggcacatttctccccaggctaaagcattgctgcaagataaagacgtcatcgccataaatcaggatccacttggaaaacagggataccagctgaggcagggagataattttgaggtttgggagagaccactgtctggtcttgcttgggcagtcgctatgatcaaccggcaggaaattggtgggcctcgttcttatactatcgctgtcgcatcgctggggaaaggcgtcgcctgcaaccccgcatgttttataactcaactgctgccagtgaagcgaaagctaggcttttacgaatggacgagcagattaagaagtcacattaatccgacgggaacagtcctgctgcagctggaaaacaccatgcaaatgtctctcaaggatttgcta

SEQ ID NO: 3661 - DNA, 1287 bp, Artificial Sequence
  derived and/or modified sequence
atgcagctgcgcaatccagagttgcacctgggttgcgctctggcccttcgcttcttggcactcgtgagctgggacattcctggagcaagggccctggataacggtctggctcgaacgcctactatgggctggctacactgggagcggtttatgtgcaatctggactgccaggaggagccagactcatgcatttctgaaaaactgttcatggaaatggctgagctgatggtttctgagggctggaaggacgcgggttacgaatatctgtgtattgacgactgctggatggccccacagcgtgacagcgaaggtcgcctgcaggctgaccctcagcggttcccacatgggattcgccagctggcgaactacgtccatagcaaaggtctcaaactgggtatttatgcagacgtcggcaataagacctgcgctggttttccaggcagctttggctattatgatattgatgctcagacctttgctgattggggagtcgatttgctaaagtttgatggttgctactgcgacagcctggaaaatttggcggacggctataaacacatgagcctggcgctcaatcgcaccgggcgcagcatcgtctacagctgcgagtggccactgtacatgtggcccttccaaaagcctaactatacggagatcagacagtactgtaaccattggagaaacttcgcagacatagacgactcttggaagtccatcaaatcgattctggactggaccagctttaaccaagaacgtattgttgacgtggccggcccgggtggttggaatgaccccgacatgctggtgatcggcaactttggcctgagttggaatcagcaagttacccagatggcgctatgggctatcatggcggcaccactgtttatgtccaatgacctgcgccacatctcccctcaggcaaaggcactgttgcaggacaaggacgtcatcgccattaaccaggaccctctgggaaaacagggctatcaactgcggcaaggcgataatttcgaggtctgggaacgtccgctgtcaggcctggcatgggccgtggcgatgattaacagacaagagatcggcggccctcgctcctacaccattgccgtcgctagcctgggcaagggtgtggcttgcaatcctgcctgcttcatcacgcaattactgcccgtgaaacgcaaattgggattctatgagtggaccagcagactgcgctcccacatcaaccctactggtaccgttctgctacagctggaaaatactatgcaaatgagtctgaaggatctgctg

SEQ ID NO: 3662 - DNA, 1287 bp, Artificial Sequence
  derived and/or modified sequence
atgcagttgcgtaacccagaactgcacctcggctgtgcgctggccttgcgatttctggctctggtgtcctgggacatccctggagcccgagcgctggataatgggctcgcccgcactcccaccatgggttggctccactgggagcggttcatgtgtaacctggattgccaggaagaaccggatagctgtatcagcgaaaaactgttcatggaaatggccgagctcatggtgtcggaaggttggaaggatgccgggtacgagtacctctgtatcgacgactgctggatggcgccgcaacgggactccgaaggaaggttgcaagctgacccgcaacggttcccgcacggtatccgccagctcgctaactacgtgcactcgaagggactcaagttgggaatctacgcagatgtgggcaacaaaacgtgcgccggcttcccggggtcatttggctactacgatattgatgcccaaacttttgcggactggggagtcgacctgctgaagttcgacggctgttactgtgatagcctggaaaacctggcggatggttacaagcatatgagtctggcccttaaccgcactggacgctccatcgtgtactcctgcgagtggcctctctacatgtggccattccaaaaaccgaactataccgagatccgccagtactgcaaccattggaggaattttgctgacattgatgactcgtggaaatccataaagtcgatcctggattggacttcgttcaatcaggaaaggattgtggatgtcgccggtccggggggatggaatgatccagacatgctcgtcatcggcaattttggcctttcgtggaatcagcaagtgacccagatggctttgtgggccatcatggctgctccgctgttcatgtccaacgatctgagacacataagcccccaagcgaaggcactgctgcaggacaaggacgtaatcgccatcaatcaagatccgctgggaaagcagggatatcagctgagacagggggacaacttcgaagtgtgggaacgcccgttgagcggactggcttgggccgtggccatgatcaaccggcaagagatcgggggcccacgcagctacaccatcgcagtggcatcactggggaaaggggtggcctgcaacccagcctgcttcatcactcaactgctgccagtcaagcgcaagctcggattctacgaatggacttcgagactccggtcgcatatcaatccgaccggcaccgtgttgctgcagctcgagaacactatgcagatgagcctgaaagacctcttg

SEQ ID NO: 3663 - DNA, 1287 bp, Artificial Sequence
  derived and/or modified sequence
atgcagctgcgcaacccggagctgcacctcgggtgcgctctcgcactgcggtttcttgccctggtgtcttgggatatcccgggtgcccgcgcactcgataatggcctcgcccggaccccgactatgggctggctccattgggaacgctttatgtgcaacctcgactgtcaggaggaaccggatagctgcatctcagagaagttgttcatggaaatggcggaactgatggtgtcagaaggttggaaggacgcaggatacgagtacctttgcattgatgactgttggatggccccacaacgcgacagcgaaggacgcctccaggcagaccctcagcgattcccgcacggaatccggcaactcgccaactacgtacattcgaagggactgaaattgggaatatacgccgacgtgggcaacaagacctgcgcgggattccccggctccttcggatactacgatatcgatgcccaaacttttgcagactggggagtggacctgttgaagttcgacggatgctattgcgatagcctggaaaacctggcggatggatacaagcatatgagcctcgcactcaatagaaccggacggtcgatcgtctactcgtgtgagtggccgctgtacatgtggccatttcaaaagccaaactacaccgagatccgacagtattgcaatcactggcgaaacttcgcagacatcgacgactcgtggaaaagcatcaagtccatcctggactggactagcttcaaccaggaaagaatcgtcgacgtcgcaggccccggcgggtggaatgacccagatatgttggtgatcggaaacttcggcctctcctggaaccaacaggtgacccaaatggcgttgtgggccatcatggcagccccccttttcatgagtaacgacctgcgccacatctcaccccaggccaaagctctcctgcaggacaaagacgtgatagctattaaccaggatcctctcggtaaacagggctaccaactccggcaaggggacaacttcgaagtctgggaacgtccgttgagcgggctggcttgggcggtggctatgattaacagacaagagatcggaggccctaggtcatacacgatcgcggtggcatcgctcggaaagggtgttgcttgcaatcctgcctgtttcattactcagctgctgccggttaagcggaagttgggattttacgagtggacttcaaggctgcggagccatatcaatccaactggaactgtgctccttcaactcgagaatacgatgcagatgtccctcaaggatctgctc

SEQ ID NO: 3664 - DNA, 1287 bp, Artificial Sequence
  derived and/or modified sequence
atgcaacttaggaacccggaacttcaccttggttgtgcgctggcactccgatttctcgcactggtgtcctgggacattccgggtgcgcgtgctcttgataatggccttgcacgcacccctaccatgggttggctgcactgggaacggtttatgtgtaacctggactgtcaggaagaaccagacagctgtatttcggaaaagctgttcatggagatggcggagctcatggtgtcggaagggtggaaggatgccggatacgaatacctttgtattgatgattgttggatggcaccccagcgcgactccgaaggccggttgcaagcagaccctcaacgcttcccccatgggataaggcaactcgcaaattacgtgcattcgaagggactgaagctgggaatctacgcagacgtgggaaacaagacttgcgcaggattcccaggatcatttggctactatgatatcgatgcccaaacctttgccgactggggagtggacctgctcaaatttgatggttgttactgcgattcccttgagaacctggctgacggttataagcacatgtccctggcccttaatcggaccggtagaagcatagtctactcatgcgaatggccgctttacatgtggcctttccaaaagccaaattacactgaaataagacaatactgtaaccactggcgcaacttcgcggacatcgatgattcgtggaagtcgatcaagtcaattctggactggactagtttcaaccaagagaggattgtggacgtggcgggtcctggggggtggaatgaccctgatatgctggtgatagggaactttgggctttcgtggaaccaacaggtgactcaaatggccctgtgggcaataatggcagcccctctgtttatgtcgaacgatttgaggcatatttcacctcaggcaaaggcgcttctgcaagataaggatgttatcgcgattaatcaagaccctctcggaaagcaaggctaccagctgagacagggagataacttcgaagtctgggaaagaccattgtcaggattggcatgggcggtggccatgattaatcgacaagagatcggtggacctcggtcgtacaccattgccgtcgcaagcctgggaaagggcgtggcctgtaacccagcctgctttatcacccaactgttgcccgtgaagcgcaaacttggcttttacgaatggacctcaaggctgcgctcccatatcaatcccaccggaaccgtgctgcttcagctggaaaacaccatgcaaatgtcgcttaaggatcttctt

SEQ ID NO: 3665 - DNA, 1287 bp, Artificial Sequence
  derived and/or modified sequence
atgcagctccggaaccctgagctccacctggggtgtgccctcgccctgaggttcctggccctggtcagttgggacattcctggcgcccgcgctctggacaacgggcttgcgaggacacctaccatgggttggctccattgggagaggttcatgtgtaatctggactgtcaagaagagcccgactcttgcatcagcgagaagctttttatggagatggcagaactcatggtttcagaggggtggaaagatgccgggtacgaatatctttgcattgatgactgctggatggccccgcagagagactccgagggccgactgcaggcagacccccagagatttccccatggcatcagacagctggcgaattacgtccattccaaaggactgaaacttggaatctacgctgatgtgggcaacaagacctgtgccgggttccctggatcttttggctattatgacattgacgcccagacatttgctgattggggggtggatctgttgaaatttgatggatgttattgcgactcactggagaaccttgccgacggctataaacacatgagtcttgccctgaatcgaaccggacggtcaattgtatatagctgtgagtggcccctctacatgtggccctttcagaagccgaactataccgaaatccggcaatactgcaaccattggcggaacttcgctgatattgacgactcctggaaatctattaaaagtatcttggattggacttcgttcaatcaggaaaggatagtcgatgtagccggtccagggggatggaacgatcccgacatgctggtcatcgggaatttcggactgagttggaaccaacaagtcacgcagatggccctgtgggctatcatggctgctcctctctttatgagcaatgatttgcgacatatatcccctcaggctaaggctctgctgcaggacaaagacgtgatcgccatcaatcaggaccctctcggcaaacagggataccagttgcgccagggggacaatttcgaagtgtgggaacgccccctgagtggcctggcgtgggcagttgcaatgatcaacagacaagagattggtgggccgcgctcttatacgatcgccgtggcatctttaggaaaaggcgtagcctgcaatcctgcgtgctttatcacccagctgcttcctgttaagcgtaaattaggattctacgaatggacatccagactccggtcccacattaatcccactgggaccgttttgttacagctcgaaaataccatgcaaatgtccctgaaggacctgctg

SEQ ID NO: 3666 - DNA, 1287 bp, Artificial Sequence
  derived and/or modified sequence
atgcaactgcgcaatccggaactgcacctgggctgtgctttggccctcaggtttctggccttggtgagctgggacataccgggagccagagctctggacaatggcctggcccggactccaacgatgggatggcttcactgggaacgatttatgtgtaacctcgactgccaagaagaaccggattcctgcatctcagagaaactattcatggagatggccgaactgatggttagtgaagggtggaaggacgcgggatacgaatacctttgcatcgacgattgctggatggctccccagcgggactcagaaggtcggctgcaggcagacccacagaggttccctcatggtatccgtcagctcgccaattatgtacacagtaaggggctcaagctgggtatttatgcagacgtaggtaataagacctgcgccggattcccgggaagcttcggatactatgatatagacgcccaaacctttgccgactggggcgtcgatttgttgaagttcgacggctgctactgtgactccctcgagaacctggcggatggctacaagcatatgtctctagcactcaacaggaccggcaggagcattgtctattcctgtgaatggccgctctacatgtggcctttccagaagccgaactatactgaaatccggcagtactgcaatcactggagaaatttcgcagatatcgatgacagctggaagtcaattaaatctatcttggattggacaagctttaaccaggaaagaatcgtcgacgttgctggccccggcggatggaacgaccccgatatgttggtcatcggtaatttcggactctcgtggaaccaacaggttacccagatggcactctgggcaatcatggcagcgcctctgttcatgtcaaacgacttgcggcacatttctcctcaagcgaaggccctgcttcaggacaaagacgtgatcgccatcaaccaggatccgctcggaaagcagggttatcagttaaggcagggggataatttcgaggtttgggaacggccactgtcaggactggcatgggcagtcgcaatgatcaatcgccaggagattgggggccctaggagttacaccattgctgtggcgagtctgggcaagggggtggcatgtaacccagcctgtttcatcacacagcttctgcctgtgaaacggaaattaggattctacgaatggacttctaggctgcggtctcacatcaacccaacagggactgtgctgcttcaactagaaaatacgatgcaaatgagtctaaaggacctgctg

SEQ ID NO: 3667 - DNA, 1287 bp, Artificial Sequence
  derived and/or modified sequence
atgcagctaagaaatccggagcttcatctgggctgcgcgctcgcacttcggtttttggccttggtgagctgggacatccctggcgcacgagcgctagataatggcctggcaagaacaccaaccatggggtggttgcactgggagcgttttatgtgtaatcttgattgccaggaggagcccgactcctgtataagtgagaaactattcatggaaatggctgaactgatggtgagcgagggctggaaagacgctggctatgagtatctgtgtatagacgattgctggatggctccccagagagattccgagggccgactacaggctgatcctcagcgctttccccatggaattaggcaactagccaattatgttcattctaagggtcttaagctagggatatatgctgacgtaggcaataagacctgcgcgggcttcccaggctctttcggttactacgatatcgatgctcagacctttgccgactggggagtagatctcctgaagtttgatgggtgctattgcgactcacttgagaacctggcggacggatacaagcatatgagcctggccctgaaccgtaccggaaggagcatagtgtattcttgcgagtggccactgtacatgtggccattccagaaaccgaattatacagagattcgacagtactgcaatcactggagaaatttcgcagatatagatgactcttggaaatcaattaaatctatcctcgactggactagtttcaatcaggagagaatcgtggacgtggccggccctggcggctggaacgaccccgacatgctggtgatcggtaatttcggtctcagctggaaccagcaggttactcagatggcactttgggcgatcatggcggcccctttgtttatgtccaatgacctccgtcacatctcccctcaggctaaagccctgctccaagacaaggacgtgattgccatcaatcaggaccctctgggaaagcaggggtatcagctacgccaaggagataatttcgaagtgtgggagaggccgctctcagggcttgcatgggcagtcgcaatgatcaataggcaagaaattggcggcccacgctcatataccatcgccgtggcgtccttggggaagggtgttgcatgtaacccggcctgtttcattactcagctccttccagttaaacggaaattaggcttttatgaatggacatctagattgcgcagtcacatcaatcccactggtaccgtccttttgcagttggagaacaccatgcaaatgtcattaaaagatctgctc

SEQ ID NO: 3668 - DNA, 1287 bp, Artificial Sequence
  derived and/or modified sequence
atgcagctccggaaccctgagctgcaccttggatgtgctttggcccttcgcttcctcgcgcttgtgtcatgggatatccccggtgcaagagcacttgataacggtcttgcacggacccccacgatgggatggctgcattgggaacggttcatgtgtaatctggattgccaggaggaaccagattcctgtatttccgaaaaacttttcatggaaatggcagagcttatggtgtcggagggctggaaggatgcaggatatgaatatctttgtattgatgactgttggatggcaccgcaacgcgactcggagggtcgccttcaggccgaccctcaacgttttccacacggaatcagacaacttgcgaactacgtgcactcgaaggggctcaaactcggtatttacgcagatgtgggtaataagacttgcgcaggtttccctggttcctttggttattacgatatcgatgctcaaacctttgccgattggggtgtggatctgctgaaatttgacgggtgctactgcgactcattggagaatctggctgacggctacaaacatatgagccttgcacttaacagaacgggacgctccatagtgtactcgtgtgaatggcccctctacatgtggccattccaaaagccaaactacaccgaaattcgccagtactgtaaccattggcgtaacttcgcggacattgatgattcgtggaaatcgatcaaaagcatacttgactggacctcgtttaatcaagaacgaattgtggatgtggccggtcctggcggttggaatgacccagatatgctggtcatcggaaactttgggctgtcatggaatcaacaggtcactcaaatggctctgtgggcaattatggcggcgcctttgtttatgtccaatgatctgcgacatattagcccacaagctaaggcactcttgcaggataaggacgtgattgccatcaaccaagatccgctgggtaaacaaggctaccagcttcggcaaggtgacaatttcgaagtctgggaacgccctctgtccggtcttgcctgggcagtggcgatgatcaacagacaagaaatcgggggtccccgttcgtatactatcgcagtggcctctctgggtaagggagtcgcatgtaacccagcatgcttcatcactcaactgcttccagtcaagcggaagctgggtttttacgagtggacctctcgactgcggtcacatatcaacccgactgggactgtgctcctgcaacttgagaataccatgcagatgtcccttaaggacttgctc

SEQ ID NO: 3669 - DNA, 1287 bp, Artificial Sequence
  derived and/or modified sequence
atgcaactgaggaacccggaactccacctggggtgcgctctggctttgcgatttctggcgctcgtgagctgggatatcccgggggccagagcactcgataatggcctcgctagaactcctactatggggtggcttcattgggaacggtttatgtgcaatctggactgtcaggaggagccagattcttgcatttcagaaaaacttttcatggagatggctgagcttatggtctctgaaggatggaaagatgcgggatatgagtatctgtgcatcgatgactgttggatggcacctcaacgagacagcgaggggcgcctccaggctgaccctcagcggtttcctcacggtattcgccagttggcgaattacgtgcatagcaagggcctcaagctgggtatctacgccgacgtaggtaacaagacatgtgcaggattcccagggtcttttggttactatgacatcgacgcccagaccttcgccgattggggtgtggatctgctgaaatttgatggttgttactgtgacagcttggaaaacctcgcagatgggtacaagcacatgagtctggccctcaaccggacaggaagaagcattgtgtacagttgcgagtggccgctgtatatgtggccgtttcagaagcccaattatactgagattagacagtactgcaaccattggagaaatttcgcggatatcgatgattcatggaagtccatcaagagcattctggattggacaagctttaatcaggaacggattgtggatgtggctggcccgggaggctggaacgacccagatatgcttgtaatcggcaactttggcctgagctggaaccagcaggtgacccagatggccctgtgggctataatggctgctccactgttcatgtcaaacgatctgcgccacatcagccctcaggctaaggctctgcttcaggacaaggacgttatcgccatcaatcaggatccactgggaaaacaggggtaccagctgagacaaggggataacttcgaagtgtgggagcgcccgctctccggactcgcgtgggctgttgcgatgatcaatcgacaggaaatcggcgggcctagatcttacacgatcgctgtagcttcattggggaagggggttgcatgtaatccagcctgcttcatcactcaactgttgcccgtgaagcgcaagctggggttctacgaatggaccagcagactgcggagtcatatcaaccccactggcactgttctgttgcagctggaaaatacaatgcaaatgagtctgaaagacttgctg

SEQ ID NO: 3670 - DNA, 1287 bp, Artificial Sequence
  derived and/or modified sequence
atgcagcttcgaaatcctgagcttcaccttggatgcgctctcgcccttcgattcctcgcgctggtgtcttgggatatcccaggggcacgggcactggacaatggactcgcgcgtactccgactatgggatggctccattgggaacgatttatgtgtaatctcgattgtcaagaagaaccagattcctgcatcagcgaaaaactttttatggagatggctgagttgatggtgagtgaaggctggaaagatgctggctacgaatacctgtgtattgatgattgctggatggctccgcaacgggattcagaaggacgtcttcaagccgatcctcaaagatttccgcatggaataaggcagcttgccaattatgtacactcaaagggactgaaacttggtatttacgctgatgtaggtaataagacatgcgcaggattccctggatccttcggttattatgacatcgatgctcaaacctttgctgattggggagtcgatctcctcaagtttgatggctgctactgtgactccctcgagaatctcgctgatggctacaaacatatgagtctcgccctcaatcggacaggccgtagtatagtctatagttgcgaatggcctctgtatatgtggcctttccaaaaaccaaactatactgaaataagacagtactgcaatcattggaggaacttcgctgatatagacgattcgtggaagagcatcaagagtattctagattggacatcattcaaccaagaaagaattgttgacgtagctggtccaggaggatggaatgatccggatatgttagttattggtaattttggattgtcatggaatcaacaggtgacccaaatggcgctttgggctatcatggcagcccctctctttatgtctaatgatcttcggcatatttcgccacaagcaaaggcactcctacaagataaagatgtgattgctatcaatcaagatccactgggaaagcaaggatatcagctccgtcaaggagataacttcgaggtttgggaaagaccactgagtggactggcttgggccgttgccatgattaaccgccaagagattggaggtccgcggtcgtacacaatcgcagtggcttcactcggaaaaggtgtcgcttgtaatccggcgtgtttcatcacacaactacttccagtgaagcgaaagcttggtttttacgaatggacgtcacgtttgagatctcatatcaatccaactggtacagtcctcttacaattggaaaacaccatgcaaatgtcattaaaggatttactt

SEQ ID NO: 3671 - DNA, 1287 bp, Artificial Sequence
  derived and/or modified sequence
atgcaacttagaaacccagagctgcacctgggctgcgccctggcgctgcgcttcctggcgcttgtgtcatgggacatcccaggcgcccgggccctggataatgggctggcccgcactccgactatgggatggttgcactgggaaagatttatgtgcaatctggactgccaggaagaacctgattcgtgtatctcggagaagctgtttatggagatggctgaacttatggtgtcagagggatggaaagacgctggatacgaatacctgtgcatcgacgattgctggatggccccgcagcgcgactccgaagggcgcctccaggccgatcctcaaaggttcccgcatggaatccggcagctggccaactacgtccattcaaagggcttgaagctcggaatttacgcggacgtgggaaacaagacttgtgcgggatttccaggatccttcggctactacgatattgatgcgcaaaccttcgcagactggggggttgaccttctcaagttcgacggctgctactgtgattcgcttgagaatctggccgatgggtacaaacacatgagcctcgcactcaacaggactggacggtcgatcgtctacagctgtgagtggccgctgtacatgtggccgttccagaaacccaactacaccgagatccggcaatactgcaatcactggagaaactttgccgatatcgacgacagctggaagtccatcaaatccatcctcgactggaccagcttcaatcaggagaggattgtggatgtggcaggcccaggcgggtggaatgacccagacatgctcgtcatcggaaacttcggtctgtcctggaaccagcaagtcacccagatggcgctctgggctatcatggccgccccgctgttcatgtctaatgacctccggcacatcagccctcaggctaaggcgctgctgcaggacaaggacgtgatcgctataaaccaagatcccctcggcaagcagggatatcaactgcggcagggagataatttcgaagtctgggaacgcccgctgtcaggtctggcgtgggccgtggctatgatcaacagacaagaaatcggaggaccccgctcgtacactatcgcagtggcatcgttgggtaagggtgtggcctgcaaccctgcatgcttcatcacccagttgctcccggtgaagcgaaagctgggattttatgagtggacctcacgcttgcgttcgcatattaacccgacgggaacggtgctcctgcagctcgaaaacaccatgcagatgtccctgaaagacctgctc

SEQ ID NO: 3672 - DNA, 1287 bp, Artificial Sequence
  derived and/or modified sequence
atgcaactcaggaaccctgaactgcatctgggctgtgcactggcactgcgttttcttgccttggtgtcctgggatatccccggcgcacgggctctggataatggacttgcccgtaccccaaccatgggatggctccattgggagagattcatgtgtaacctggattgccaggaggaacccgactcgtgtatatcagaaaagctgtttatggaaatggcggagctcatggtatccgaaggctggaaggacgcaggttacgagtacctgtgcattgacgactgttggatggccccacaacgggactccgaaggccgcctgcaggcagacccccaacgatttccacatggaattagacagcttgccaattacgtgcactcaaaaggtcttaaactggggatctacgcagatgtcggaaataagacctgtgcaggttttccagggtcgttcggatactacgacattgacgcacagacctttgcagattggggagtggatctcctcaagttcgacggttgctactgtgatagcctcgaaaacctcgcggatgggtacaagcacatgtctcttgccctcaaccgtactggacgctcaattgtctactcgtgtgaatggccactgtacatgtggccatttcaaaagccaaactacacggagatcagacaatactgcaatcattggaggaactttgccgatattgacgatagctggaaatcgatcaagtcgatccttgactggacctcgttcaaccaggagcgaatcgtggatgtggcgggtcctgggggttggaatgatcctgatatgttggtgatcggtaactttgggctgtcatggaatcaacaggttacccagatggccttgtgggccatcatggccgcaccactgtttatgtccaacgatctgcgccatataagccctcaggcgaaggcactgctgcaagataaggacgtgattgccatcaaccaagaccctcttggtaagcaaggttatcagctccgtcaaggagataacttcgaagtgtgggaacgtcctctttcgggactcgcatgggcagtggccatgatcaatagacaggaaattggaggacctcggtcgtacaccatcgcagtggcttcccttggtaaaggcgtggcctgcaatccggcatgtttcattactcaactccttcccgtgaagcgcaaactgggattctacgagtggacttcacgtcttagaagccacattaatcctaccggaacggtgttgcttcaactggaaaataccatgcagatgagcctgaaggacctgctg

SEQ ID NO: 3673 - DNA, 1287 bp, Artificial Sequence
  derived and/or modified sequence
atgcagcttcgtaaccctgagcttcacctcggatgcgccctggcgctccgtttcctagctctcgtctcttgggatattccgggtgcacgggccctggacaatgggttggcccggacccccactatgggatggctccattgggaacgcttcatgtgcaatctcgattgccaggaggaacctgacagctgcatctctgagaagctgtttatggaaatggctgagctgatggtgtccgaggggtggaaggatgccggctacgagtacctgtgcatcgatgattgctggatggcacctcagagggattcagaaggacggcttcaggctgacccgcagcgatttcctcacgggatccggcagttggctaactatgtccactctaaaggtcttaaactggggatctatgctgatgtcggtaacaagacatgcgcaggctttcctggaagtttcgggtattatgacatcgatgcgcagactttcgcagattggggcgtggacttgctgaagttcgatgggtgttattgcgactcactcgagaacctggccgacgggtataagcatatgtccctcgccctaaatcgtacaggtaggagcattgtctactcctgcgaatggcctctgtacatgtggcctttccagaagcctaattacacagagatcaggcagtactgtaatcactggcggaacttcgcagacatagatgatagctggaagagcatcaagtcaatccttgattggacttcttttaatcaggaacgcatagtagacgtggccggcccagggggatggaacgaccctgacatgctagtgattgggaatttcggtcttagctggaatcagcaggtgacgcagatggccctgtgggccatcatggcagctccgctgttcatgagtaatgatttgaggcacatctctccgcaagccaaggccctgctacaggataaggatgtgatagctataaaccaggatccgttggggaagcagggttaccagctccgtcagggggataacttcgaagtgtgggaaaggcctttgagcgggttagcatgggccgtggcaatgatcaaccgccaggagatcggcggacccagatcttatactatcgctgtggcctccttagggaaaggagtcgcctgtaatccagcctgcttcatcacacagctgctgcctgtaaagcgtaagctcggtttttatgagtggacctccaggctcagatcacatatcaatcctactggcacagtgctgctgcagctcgaaaacactatgcagatgtcacttaaggatttactt

SEQ ID NO: 3674 - DNA, 1287 bp, Artificial Sequence
  derived and/or modified sequence
atgcagctgcgtaacccggaacttcatctgggatgcgcacttgcacttaggttccttgcacttgtctcttgggacattcctggcgcccgagctcttgataacggtcttgcgagaactcctaccatgggttggctccattgggaaagatttatgtgtaatctcgattgtcaagaagagcctgactcgtgcatttccgagaagctctttatggaaatggcagaactcatggtgtcagaaggctggaaagatgcaggttacgaatacctgtgtatagatgactgttggatggcaccgcagcgggacagcgaaggaagattgcaggcggatcctcaaagattccctcatgggatacgacaacttgcaaattacgtgcattccaagggtcttaagctgggcatttacgcagatgtgggtaataagacttgtgcgggctttcctgggagctttggttactatgatattgacgcacagaccttcgccgactggggagtcgatctcctgaaatttgatggatgttactgtgactcgctggaaaaccttgcagatggctacaagcatatgagcctggcgctgaacaggactggcagatcgatcgtgtacagctgtgaatggccactttacatgtggccgttccagaagccgaactacaccgaaatcaggcaatactgtaaccactggaggaacttcgcagacatagatgactcatggaagtcgataaagtcgattttggattggacctccttcaaccaagaacggatcgtggatgtggctggacctggtgggtggaacgatccagacatgcttgtgattgggaacttcggactgtcctggaaccaacaagtcacccaaatggccctttgggcaatcatggcggccccactctttatgtcaaacgatctgagacatatctcaccacaggccaaggcccttcttcaagataaggacgtcattgcaataaaccaggaccctcttgggaagcaaggctaccaactccgccaaggagataacttcgaggtctgggagcggcccttgagcggtcttgcttgggcagtggcaatgattaacagacaggagattggcggtcctcggagctacactattgcggtagcatcccttggaaaaggcgtcgcatgtaatcccgcctgtttcattactcagcttttgccagtgaagcgaaagctgggattttacgaatggacctcccgcctccgctcccacatcaaccccaccggtaccgtgcttctgcagttggagaacaccatgcaaatgtcgctgaaggatctgctg

SEQ ID NO: 3675 - DNA, 1287 bp, Artificial Sequence
  derived and/or modified sequence
atgcaattacgtaatccagaattgcatcttggatgtgctcttgcacttagatttttagcacttgtatcatgggatattccaggtgcacgtgctttagataatggtcttgctagaacaccaactatgggttggctacattgggaaagatttatgtgtaatttagactgtcaagaggaaccagattcgtgtataagtgaaaagctttttatggaaatggctgaattaatggtttctgaaggttggaaagatgctggttatgaatatttgtgtattgacgattgttggatggcaccacaacgagactcagaaggtcgtttacaagcagatccacaacgttttcctcatggtatcagacaattagctaattatgttcattctaaaggtttaaaattgggaatttacgcagatgttggaaataaaacatgcgcaggattccctggatcatttggatattacgacattgatgcacaaacttttgctgattggggtgtagatttacttaaatttgatggttgttattgtgattcattagaaaatcttgctgatggatataaacatatgtcattagcattaaatagaactggacgatccatagtctattcatgtgaatggccattatacatgtggccatttcaaaaacctaactatacagaaatcagacaatattgcaatcattggaggaatttcgcagatattgatgattcatggaaatcaattaaatctattcttgactggacttctttcaatcaagagagaattgtagatgtggcaggacctggaggttggaatgatccagatatgttagttattggaaattttggattatcatggaaccaacaagttacacaaatggctttatgggcaattatggcagctccattatttatgagtaatgatcttagacatatttctccacaagctaaagcacttttgcaagataaagatgttattgcaattaatcaagatccattaggaaaacagggatatcaacttcgtcaaggtgataattttgaagtttgggaaagacctctttcaggattagcttgggcagttgctatgattaatagacaagaaataggaggaccaagatcttatacaatagctgtagctagtttaggtaagggagttgcatgcaaccctgcatgtttcattactcaacttttaccagtaaagagaaaattaggattttatgaatggacttcaagacttagaagtcatattaatccaactggaactgttttattacaacttgaaaatactatgcaaatgtcacttaaggatcttttg

SEQ ID NO: 3676 - DNA, 1287 bp, Artificial Sequence
  derived and/or modified sequence
atgcagctacgcaatccagagctgcatttggggtgcgcactggcattgcgcttcctagcattggtgtcttgggacatccccggcgctcgcgcgctggataatggattggccaggacccccaccatggggtggttacattgggaaaggttcatgtgcaacttggattgtcaggaggaacccgatagctgcatttccgaaaagctgttcatggaaatggcagagttaatggtaagcgagggctggaaggacgccggctacgaatacctgtgcatagacgattgctggatggccccccagcgggattcagaaggcaggctccaggctgatccgcaacgttttccgcacggcatcaggcagcttgcaaactacgtgcacagcaaaggtcttaagctgggtatttatgctgacgtggggaataagacctgcgctggctttccgggctcctttgggtactatgatatcgacgcccagactttcgccgactggggggtagacctcctgaaattcgacggctgttactgcgactccctggaaaacctcgctgacggttacaagcacatgagcctggctctgaacaggacgggacgctcaatcgtatatagctgcgagtggccactttatatgtggccctttcagaaaccaaactataccgagatccgccagtattgtaaccactggagaaactttgcggatatcgacgactcttggaaatctattaagtccatactggactggacgtccttcaaccaggaacgcatcgtggatgtggctggcccgggaggatggaacgaccctgatatgctggttattgggaacttcggcctgtcatggaaccagcaggtcactcagatggccctctgggccataatggccgcccctctgttcatgtccaacgacctgcgccacatctccccccaggctaaagccttgcttcaggataaagatgtcattgcaatcaaccaagaccctttaggaaagcagggctatcagctgagacagggagataatttcgaagtttgggaaaggcccctaagcggcttggcctgggccgtagctatgataaatcggcaagaaatcggcggccctcgatcatacacgatcgctgtggcttctctcggcaagggcgttgcgtgcaaccctgcgtgcttcattactcagcttctgcccgtcaagcggaaactgggattttatgagtggaccagtagactgcggtcccacatcaaccctaccggcacggtccttctccaattggaaaatacaatgcagatgtccctgaaggacctcctg

SEQ ID NO: 3677 - DNA, 1287 bp, Artificial Sequence
  derived and/or modified sequence
atgcagttgcgcaaccctgagttgcacctgggttgcgccctggccctaagattcctcgctcttgtgagttgggatattccaggagcccgggctttggacaacggacttgctcggacacccacaatggggtggctgcactgggagaggtttatgtgcaatttagattgtcaggaggaaccagattcgtgcatcagcgagaaactgtttatggagatggcagaattaatggtgtcagaaggctggaaagacgccgggtatgagtatctctgcattgacgactgctggatggccccacagagggattcagagggcagactacaggcagacccccaaaggttcccgcatgggattcgacaactggcgaattacgtgcattcaaaggggctgaagttggggatttatgctgacgtgggcaacaagacctgcgcaggattccctgggagtttcggctactatgatatcgacgcacaaactttcgcggattggggggtagacctcctcaagttcgatggatgctattgcgactcccttgagaacctcgccgatgggtacaaacatatgagcctcgctttgaaccgcactggcagatccatcgtttacagctgtgaatggccactttacatgtggcccttccagaagcccaattatacagaaattcgtcaatattgcaaccactggaggaattttgctgacatcgatgatagttggaaatccatcaaatccatcctggactggacatcctttaaccaagagagaatcgtcgacgtggcagggccgggaggatggaacgatcctgacatgctggtgatcggcaattttggtctgtcttggaatcaacaggtcactcagatggccttgtgggcaataatggccgcaccactctttatgagtaacgacctgcgccacatctccccccaggccaaggccctgctccaggataaggatgtcatcgctataaaccaggaccccctgggtaagcaaggatatcagcttcgccagggagataattttgaagtctgggaacgacctctctcgggactggcctgggcggtggccatgattaacaggcaggagatcggagggccccggtcctacaccatcgccgtggcgtcactgggcaaaggggtcgcctgcaaccctgcctgctttatcacccagttacttcccgtgaaacgtaaattgggattctatgaatggacgtcccgattgcgatcacatatcaatcctactggtaccgtgttgcttcagctggaaaacactatgcaaatgtccctgaaggacttactt

SEQ ID NO: 3678 - DNA, 1287 bp, Artificial Sequence
  derived and/or modified sequence
atgcagctgaggaacccggaactccatctggggtgcgccctcgcactgcggttcctggcgctcgtgagctgggacatcccaggagcgcgtgccctggacaacggactggcgcgcactccgactatgggatggctccattgggaacgcttcatgtgcaaccttgattgtcaggaggaacctgactcctgtatttcagaaaagctgttcatggagatggcggaactcatggtgagcgaaggttggaaggatgcggggtatgaatacctctgcatcgatgattgctggatggccccacaacgcgactccgagggtagactgcaggccgatccacagcgcttcccgcacgggattcgccagctcgccaattacgtccattccaaagggctcaaacttggcatttacgcagacgtcggtaacaagacttgcgctgggttccctggatcgttcggatactacgatatcgacgcgcaaaccttcgccgactggggagtggacctcctgaagttcgacggatgctactgcgacagcctggagaatctggcagatggatataaacacatgtccctggcgctgaaccgtaccggtcgcagcatcgtctactcatgcgaatggcctctgtacatgtggccgttccagaagcctaactacacggagattcggcagtactgtaaccattggagaaacttcgccgatatcgatgactcctggaagtcgatcaagtccatcttggactggacctcattcaatcaagagcggattgtggacgtcgcagggccaggtggatggaatgacccggatatgctggtcattggcaatttcggcctgtcgtggaatcagcaggtcacccagatggccctgtgggccatcatggcagcgccgctcttcatgtccaatgacctcagacacatctcaccccaagcgaaggctctgctccaggataaagacgtgattgcgatcaaccaagatccgctgggaaagcaaggataccagctgcggcagggcgacaacttcgaggtctgggagcggccactttcgggactggcgtgggctgtcgcgatgatcaacagacaggagatcggagggccacgcagctacactatcgccgtggctagcctgggaaagggagtggcgtgtaatccagcctgctttatcactcaactgctcccggtgaagcggaaactcggattctacgaatggacctcaaggctccggtcccatatcaatccgactggtactgtgcttctgcaacttgagaatactatgcagatgtccctgaaggaccttctg

SEQ ID NO: 3679 - DNA, 1287 bp, Artificial Sequence
  derived and/or modified sequence
atgcaactccggaaccccgaacttcacttgggatgtgccctggcgttgagatttctcgccctggtgtcgtgggatatacctggcgcacgcgcacttgataacgggttggcgcggactcctactatgggatggctgcattgggaacgcttcatgtgcaacctcgattgtcaggaggaacctgactcgtgtatctccgaaaaacttttcatggagatggctgaacttatggtgtccgaagggtggaaggatgcaggctacgagtatctgtgtatcgatgattgctggatggccccccagagagacagcgaaggacgacttcaggcagacccccaaagattcccccacggaattagacaactggctaactacgtccattccaagggtttgaagctgggcatttacgcggatgtgggaaataagacgtgcgctggctttcctggtagctttggatactacgatattgatgcacaaacctttgctgactggggcgtggatctccttaagtttgacggatgctactgtgattcgctcgaaaatcttgcagatgggtacaagcatatgtccctcgcattgaaccggaccggtcggagcattgtgtactcgtgtgagtggcctctgtacatgtggccgtttcagaaacccaactatactgaaatccgtcaatactgtaaccattggcggaattttgcagacatcgatgactcatggaagtcaattaagtcaattcttgattggactagctttaaccaggaaagaattgtggatgttgcaggcccaggaggctggaacgaccctgatatgcttgtgataggaaactttgggctctcatggaatcagcaagtgacccaaatggcactctgggcaattatggccgctccactgttcatgtccaatgacctccgccacatttcgcctcaggcaaaagcactgcttcaggacaaggatgtgatcgccattaaccaagatcccctcgggaaacaaggctatcaactgcgtcagggtgataactttgaggtgtgggaaaggcctctgtccgggctggcatgggccgtggcaatgattaacagacaagaaataggtgggcctaggtcgtacacgatagctgtcgcatcactcggaaagggcgtcgcatgtaatccagcatgcttcatcacccaacttctccctgttaaaagaaaacttggcttctacgaatggacctcccgcctcagatcacatatcaacccaaccggaacggtgcttctccaactggaaaatactatgcaaatgagccttaaggaccttctt

SEQ ID NO: 3680 - DNA, 1287 bp, Artificial Sequence
  derived and/or modified sequence
atgcaacttcgcaacccggaactgcatctcggatgcgccttggccttgcgctttcttgccctcgtgtcgtgggatattccgggggcgcgcgctcttgacaatggcctggcccgtactccgactatgggatggctgcactgggaacgattcatgtgcaacctcgactgtcaagaagagccagatagctgcattagcgagaaactctttatggagatggccgaacttatggtgtccgaaggatggaaggatgcgggatatgaatacctgtgcatcgacgattgctggatggcgccgcagcgggactcagaaggccggctccaggccgacccgcagcggttcccccatggcattcggcagctggccaactacgttcacagtaagggactgaagctgggtatctacgcagacgtcggaaataagacctgcgccggatttcctggatcattcggttactacgatatcgatgcgcagactttcgcggactggggcgtggatctgctgaaatttgacggctgttactgtgattcactcgagaatctcgcggacggctataagcacatgtccctcgcgctgaacaggaccggtcggtccatcgtgtactcgtgtgaatggccgctgtacatgtggccattccaaaagccgaattacaccgaaatcagacaatactgcaatcactggagaaatttcgcagacatagacgattcttggaagtctatcaaatcgatcctcgactggacctctttcaaccaagagcgaatcgtggacgtggcggggcctggtggatggaacgacccggacatgcttgtgatcggcaatttcggcctgtcatggaatcagcaggtcacgcagatggcactctgggccatcatggccgctcctcttttcatgtcgaatgacctgagacacatcagcccgcaggcgaaggcattgctccaagacaaggacgtcatcgcaattaaccaggatcctctgggaaagcagggatatcagcttcgccaaggggataactttgaagtgtgggagcggccactctccggacttgcatgggctgtggccatgatcaacaggcaggaaatcggaggccctaggtcgtatactatagccgtcgcgtcactgggtaagggggtggcttgtaacccagcatgtttcatcacccaactgttgccagttaaacgtaaactggggttctatgagtggacctcacgcctgcgctcccatatcaaccccactggaaccgtcctgctgcaactcgagaacactatgcaaatgtcgctcaaggacctcctc

SEQ ID NO: 3681 - DNA, 1287 bp, Artificial Sequence
  derived and/or modified sequence
atgcagctgcgcaatcccgagctgcatctgggctgcgcactggccctccggttcctcgccttggtttcctgggatataccaggagctcgggcactggacaatggactagcccgaactccgactatggggtggcttcattgggaacgctttatgtgcaatctggattgccaggaggagccagattcgtgtatctcagagaagctgttcatggagatggcagagctgatggttagcgagggatggaaggatgctgggtatgaatacttatgcatcgatgattgctggatggcccctcagagagattccgagggacgtctgcaagccgacccacagcgcttcccccatggaatcagacagctggctaactacgttcactccaaagggctgaagctgggaatttacgctgatgtaggcaacaagacttgcgcaggatttcccggctcatttgggtattacgacatcgatgcccagacgtttgctgactggggagttgatcttctcaaattcgacggatgttactgcgattccctggagaatctggctgatggttacaaacacatgagtttggctctcaatagaacaggacgttctattgtgtattcctgtgagtggccactgtatatgtggccttttcagaaacctaactatactgagatcagacagtattgcaatcactggaggaatttcgctgatattgacgacagttggaagtctatcaaaagtattcttgattggacctcatttaaccaagaacgcattgtcgacgtggccggacccggcggctggaacgaccctgatatgctggttattggaaacttcgggctgtcatggaaccagcaagtcactcagatggcattatgggcaattatggccgctcctctcttcatgagcaacgacctgaggcatatctccccgcaggctaaagccctcctacaggataaggatgtgatcgccattaatcaggaccccctgggcaaacagggataccagctccgccaaggagataattttgaagtgtgggagcggccactcagcggcctggcctgggcagtagcaatgattaaccgccaagagataggaggacccagatcttacaccatagctgttgcttcactgggtaaaggtgtggcctgcaatcccgcctgctttataactcaactcctaccagttaagcggaaactcggtttctacgaatggacgtcaagactgagatctcatatcaatcccaccggcactgtcctgctccagctggagaacaccatgcagatgtccttgaaggatctgtta

SEQ ID NO: 3682 - DNA, 1287 bp, Artificial Sequence
  derived and/or modified sequence
atgcaactacgaaatccggaattacatttaggttgtgcgttagcgttacgatttttagcgttagtttcgtgggatataccgggtgcgcgtgcgctagataatggtctagcgcgaacgccgacgatgggttggttacattgggaacgatttatgtgtaatttagattgtcaagaagaaccggattcgtgtatatcggaaaaactatttatggaaatggcggaattaatggtttcggaaggttggaaagatgcgggttatgaatatctatgtatagatgattgttggatggcgccgcaacgagattcggaaggtcgtctacaagcggatccgcaacgttttccgcatggtatacgacaattagcgaattatgtacattcgaaaggtttaaaactaggtatatatgcggatgtaggtaataaaacgtgtgcgggttttccgggttcgtttggttattatgatatagatgcgcaaacgtttgcggattggggtgtagatttactaaaatttgatggttgttattgtgattcgttagaaaatctagcggatggttataaacatatgtcgttagcgctaaatcgaacgggtcgttcgatagtatattcgtgtgaatggccgctatatatgtggccgtttcaaaaaccgaattatacggaaatacgacaatattgtaatcattggcgtaattttgcggatatagatgattcgtggaaatcgataaaatcgatattagattggacgtcgtttaatcaagaacgaatagtagatgtagcgggtccgggtggttggaatgatccggatatgctagtaataggtaattttggtctatcgtggaatcaacaagtaacgcaaatggcgctatgggcgataatggcggcgccgctatttatgtcgaatgatttacgtcatatatcgccgcaagcgaaagcgctattacaagataaagatgttatagcgataaatcaagatccgttaggtaaacaaggttatcaactacgacaaggtgataattttgaagtatgggaacgtccgctatcgggtctagcgtgggcggtagcgatgataaatcgacaagaaataggtggtccgcgttcgtatacgatagcggtagcgtcgttaggtaaaggtgtagcgtgtaatccggcgtgttttataacgcaactattaccggtaaaacgaaaactaggtttttatgaatggacgtcgcgactacgatcgcatataaatccgacgggtacggttttattacaattagaaaatacgatgcaaatgtcgctaaaagatctatta

SEQ ID NO: 3683 - DNA, 1287 bp, Artificial Sequence
  derived and/or modified sequence
atgcagcttcggaaccccgagctgcacctgggctgcgccctggctctgcggttcctggctcttgtatcttgggatatacctggtgctagggcattggataatggcttggctaggacacccaccatgggttggctgcactgggagcgctttatgtgcaatctggactgtcaggaagagcccgactcctgcatttctgagaagctgtttatggagatggctgaattgatggtaagcgagggttggaaggacgctgggtacgagtatctttgcatagatgattgctggatggctcctcaacgagatagcgaaggcagactccaagcagatcctcagcgctttcctcatggcattagacaattggctaattatgtgcacagtaagggcctcaagttgggaatctatgcagatgtgggtaataagacttgcgcgggtttcccaggaagcttcggctactatgatatcgacgcccagacttttgctgactggggcgtggacctccttaagtttgatgggtgctattgtgatagcctcgaaaatctggccgatggatataaacatatgtcactggccctgaaccgcaccggaaggtccatcgtgtactcatgtgagtggcctctctacatgtggccctttcaaaagcccaattataccgaaatccggcagtactgcaaccattggagaaacttcgctgatatcgacgacagttggaagtccatcaaatcaatcctggattggacaagctttaatcaggaacgcatagtcgacgtcgctggcccagggggatggaacgacccagacatgctcgtcatcgggaattttggactgagctggaatcagcaagtgacccagatggctctgtgggcaatcatggcggcgcccctctttatgagtaatgacctgaggcacataagccctcaagctaaggcactgcttcaagataaggacgtcatagcaataaatcaggatcccctggggaagcagggttatcagcttcgccagggggataactttgaggtctgggaacgccccttgtccggacttgcgtgggccgttgccatgatcaataggcaggagatcggcggccctcgatcatatacaatcgccgtggcttccctgggcaagggggttgcctgcaatcccgcttgctttattactcagctgctcccggtgaaacgaaagctgggattctacgagtggacatcacgcttgaggagccacatcaatcctacaggaactgtcctgctgcagctcgaaaataccatgcaaatgtccttgaaggatctcctc

SEQ ID NO: 3684 - DNA, 1287 bp, Artificial Sequence
  derived and/or modified sequence
atgcagttgcgaaaccctgaacttcaccttggttgcgcactcgcactcagattccttgcactcgtctcctgggacatccctggtgcacgagcactggataacggcctggcaaggacgcccactatgggatggctgcactgggagcgattcatgtgcaatcttgattgccaagaggagccagatagctgtatcagcgaaaagctgtttatggaaatggcagaacttatggtgtcggagggatggaaggacgcagggtacgagtacctttgcattgatgattgttggatggcaccccaacgagatagcgaagggagacttcaagcagaccctcagaggtttccccacggaatccggcaactcgccaactacgtccactcgaaaggactgaagctcggtatatacgcggatgtgggaaataagacctgtgcaggttttcctggctcatttggctactacgacatcgacgctcaaacttttgccgattggggcgtggatcttctcaagtttgacggttgttactgtgattcgctggaaaatctggcagatggctacaaacatatgtcgcttgcgcttaaccgcactggtagatctatcgtgtactcgtgtgaatggcctctgtatatgtggcccttccaaaaaccaaactacactgagattcgtcagtactgtaatcactggcgtaactttgcggatattgacgattcatggaaatccatcaagtcgatccttgactggacctcatttaaccaggaacggatagtggacgtcgcgggaccaggggggtggaatgatcctgatatgctggtgataggtaacttcggtttgtcgtggaatcaacaggtgactcaaatggcactttgggcaatcatggcagcacctctgtttatgtcgaacgacctccgccatatatcgccacaggcaaaggcacttcttcaagataaggatgtcatagcaattaaccaggacccactgggcaagcagggctaccagttgaggcaaggagacaacttcgaggtgtgggaacgtccgctgtccggtctggcatgggccgtggctatgattaacagacaagagattggtggaccacgcagctacactattgcagtcgcgtcccttggaaaaggcgtggcgtgtaatccagcttgcttcataacccagctcctcccagtgaagcggaagttgggtttctatgaatggacttcgcggcttcgctcccatatcaacccaacggggaccgttctcctgcaactggagaacaccatgcaaatgtctctgaaggatctgctg

SEQ ID NO: 3685 - DNA, 1287 bp, Artificial Sequence
  derived and/or modified sequence
atgcaactcaggaacccagaactgcatcttggttgcgcacttgccctgagatttcttgcacttgtctcatgggatatccctggagcaagggctcttgataatggactggcgcggacgcctactatgggatggcttcattgggaaaggtttatgtgtaatctggattgccaggaagaaccagactcgtgcatttcagaaaaactcttcatggagatggcagaacttatggtgtcggagggatggaaagacgcgggatacgagtacctttgtattgatgattgttggatggcacctcaacgggattccgaaggccggcttcaagcagatcctcaaaggttcccacatggcatcagacagttggcaaactacgtgcactcgaagggactgaagctcggcatctacgcagatgtgggaaacaaaacctgtgcggggtttcctggttcctttggctattacgatattgacgcacagacgtttgcagattggggtgtcgatctcttgaagtttgacggctgttactgcgatagcctcgagaatctggcggacggatacaagcacatgtcacttgcccttaataggaccggaagatctattgtgtactcgtgtgagtggcccctttacatgtggccgttccaaaagccaaactataccgagattcgacaatactgtaaccattggcggaatttcgcagatattgatgactcatggaagtccattaagagcatactggattggacgtcattcaatcaagaaaggattgtggatgtcgcagggcctggaggatggaacgatccagacatgcttgtgattgggaactttggactgtcatggaatcaacaggtgacccagatggcgctttgggcgataatggcagctcctctgtttatgtcgaatgaccttcggcacatatccccacaggccaaggcactgcttcaggataaggatgtcattgccatcaaccaagatcctcttggcaagcaaggctatcagcttaggcaaggggataacttcgaagtgtgggaacgtccgctgagcgggcttgcatgggcagtggccatgattaacagacaggaaataggaggacctagatcctacaccattgcggtggcatcccttggaaaaggagtggcatgtaatccagcatgtttcattacccagctgctgcctgtgaagcgcaaactgggattttacgaatggacttcccgcttgagatcgcacatcaacccaaccggaactgtgctccttcaactcgaaaacactatgcagatgagcctcaaggacctgctg

SEQ ID NO: 3686 - DNA, 1287 bp, Artificial Sequence
  derived and/or modified sequence
atgcaactgagaaacccagaactgcatcttggttgtgcgctggctctccgttttctggcgcttgtgagctgggacattcctggggctcgcgcactggataacggactcgcaagaacgccaactatgggatggctgcactgggagcggtttatgtgtaatctggactgtcaagaggagccggactcgtgtatcagcgaaaagctgttcatggagatggcagaactgatggtgtccgaaggttggaaagacgcgggatacgaatacctttgtattgatgattgctggatggcgcctcaacgcgatagcgaaggacgtctccaagctgatccacaacggtttcctcacggaattaggcaactcgcaaactacgtgcattcgaagggcctgaagctgggaatatacgccgacgtcggaaacaaaacttgtgcagggttcccagggagcttcggatattacgacattgatgcacagaccttcgcagactggggcgtggaccttctcaagtttgatggttgctactgtgactccctcgaaaacttggcggatggatacaaacatatgagcctggcgctgaatcgcaccgggaggtcgatcgtgtactcatgtgaatggccactttacatgtggccttttcagaaacccaactacacggaaattagacaatactgcaatcattggagaaactttgccgatattgatgattcctggaagtctataaagtccattctcgattggactagctttaatcaagaacggatagtggatgtggcaggacctggaggttggaacgaccctgatatgctggtgattgggaacttcgggctctcctggaatcaacaagtcacccaaatggcgctctgggcaatcatggcagctccactgtttatgtcaaatgatcttagacacatctcccctcaggccaaggccctccttcaagataaagacgtcattgcaatcaaccaggaccctctgggtaaacaggggtaccaacttagacagggtgacaattttgaggtgtgggagcggccactttcgggcctggcatgggcagtggcaatgatcaacaggcaagaaatcggtggtcctcgctcgtataccattgcagtagcatcacttggtaagggggtcgcctgcaatccagcctgcttcattacgcagttgcttcctgtcaagcgaaagttgggcttttacgaatggacctcgaggctgcgctcccacatcaaccctactggtactgtgctgctgcaacttgaaaacaccatgcaaatgtccctcaaggaccttctg

SEQ ID NO: 3687 - DNA, 1287 bp, Artificial Sequence
  derived and/or modified sequence
atgcaactccggaaccccgagctgcaccttggatgcgcccttgctctgcggttcctggcgctggtgagttgggacatcccgggcgcccgagcactagacaacggactcgcccgtaccccaacaatgggatggctccactgggaaagatttatgtgtaacttagactgtcaagaggagccagattcttgcatcagcgaaaagctatttatggaaatggccgagctcatggtgtctgagggatggaaagatgccggatacgagtacttgtgtatcgacgactgctggatggcgccacagagagactcagaaggcagactgcaagctgatcctcagagattcccccatggcatacggcagctcgcaaattacgtacatagcaagggcctgaaattgggaatctacgcagacgtggggaacaaaacatgtgctggctttccaggcagttttggctactatgacattgacgcccagacgtttgcggactggggggttgatctgttgaagttcgacggctgttactgtgattcgctggagaatctggccgatggctataaacacatgagtcttgctcttaacaggacaggaagatctattgtctactcttgcgagtggcccctgtacatgtggccctttcagaaacctaactacacagagattagacagtattgtaaccattggcgaaatttcgccgatattgacgactcatggaagtccatcaaatccatcttagactggacatcgttcaatcaggagcgaatcgtagacgttgctggccctggggggtggaatgaccccgacatgctcgtaatcgggaatttcggattgtcatggaaccagcaggtgacccagatggccctttgggctattatggctgccccactgtttatgtctaatgacctgaggcacatttctccccaggcaaaggccctactgcaggacaaagatgtcatagccatcaaccaggaccctttgggcaaacagggataccagcttaggcagggcgataacttcgaggtgtgggagcggccattatccggccttgcctgggccgttgccatgatcaacagacaggaaatcggtggcccccgctcctatacaatcgccgtggcgagcctaggaaaaggcgttgcgtgcaaccctgcatgtttcattacccagctactgccagttaaaagaaaattgggattctacgagtggacgtctcgcctgagaagccatatcaatcctactggcacagttctattacaattggagaatacgatgcagatgtctttaaaggatctcctg

SEQ ID NO: 3688 - DNA, 1287 bp, Artificial Sequence
  derived and/or modified sequence
atgcagctccgcaatcccgagctgcacctgggctgtgctcttgccttgcgctttctcgcacttgtatcatgggacatcccaggagctcgcgcgcttgataatggcctcgccagaacccctactatgggttggcttcactgggagagatttatgtgcaatctggactgtcaggaagagccagactcttgtatttcagagaagctgtttatggagatggcagaactgatggtgtccgagggatggaaggatgccggatacgaatatctgtgcatcgacgactgttggatggccccacagagggacagcgagggacgcttgcaggccgacccccagaggttcccgcatggcattaggcagcttgcaaactatgtgcactctaagggattgaaacttggtatatatgctgatgtcggtaacaagacttgcgccggcttcccaggatctttcggttactacgacattgacgcccagacattcgctgattggggagtggatctcctgaaattcgacggctgctattgtgattcattggaaaacctcgctgatggatacaagcacatgtctctcgcattgaaccgcaccggtcgcagcattgtgtactcatgcgaatggcccctctatatgtggcctttccagaaaccaaactatacagagatcaggcaatactgtaatcactggcgcaatttcgcagatatcgatgattcatggaaatcaattaaatctatcctggactggacttctttcaatcaggagaggatcgtcgacgttgccggccccggcggatggaatgatccggatatgttggttattggcaacttcggcctgagctggaaccaacaggtgacacagatggcactctgggctatcatggcggccccactgttcatgtctaacgatcttaggcacatctccccgcaggctaaggcacttttgcaggacaaggacgtaatagccatcaaccaagacccacttggaaagcagggataccaactgcgccaaggcgacaattttgaagtttgggagagaccactgagtggcctggcatgggcagttgctatgattaatagacaggaaatcggcggccctaggagttacacgatcgcagtggcttctctcggaaaaggtgttgcttgcaaccctgcctgctttatcactcaactgttgccggtgaaaaggaaattgggattctacgaatggacctcccgcctccgctcacatatcaaccccacaggtactgttctgctccaactggagaatactatgcagatgagcttgaaggatcttctg

SEQ ID NO: 3689 - DNA, 1287 bp, Artificial Sequence
  derived and/or modified sequence
atgcagctccggaaccctgagcttcacctgggatgtgctcttgcgttgagatttcttgcacttgtgtcctgggatatacctggagcccgggcgctcgataacgggctcgcaaggacgcctactatgggttggcttcactgggagaggttcatgtgcaacctcgattgtcaagaggagcccgattcctgtatttccgagaagctctttatggaaatggcggaattgatggtgagcgagggatggaaagacgcgggctacgaatatctgtgtatagacgattgttggatggctccccagcgtgacagcgagggtcgcctgcaggccgatccgcaacgcttcccgcacgggattagacagttggccaattatgtccattccaagggtctgaaacttggcatttacgccgatgtggggaacaaaacttgtgccggtttcccagggtcgtttggatactacgatattgatgcacaaacttttgcagattggggggtggacctgctgaagtttgacggatgctattgcgattccctggagaatctggcagatggttacaagcatatgagcctggcactgaaccggactggacgctcgattgtgtactcctgcgagtggccgctctacatgtggccatttcaaaagccaaattacaccgagatccgacagtactgtaatcactggagaaacttcgccgacatagatgattcatggaagagcattaagtccatcctggactggactagcttcaaccaagagcgtattgtggacgtggccggaccgggtgggtggaacgaccctgacatgcttgtcattgggaattttggactttcctggaaccaacaagtgacgcaaatggcattgtgggcaattatggccgccccactgttcatgtcgaacgatcttcgacacatcagcccacaagcaaaggcacttctgcaggataaggacgtcattgcgattaatcaggatccactcggtaagcaaggataccagctgagacaaggagataacttcgaagtgtgggaacggccgctgtcgggacttgcatgggcggttgcaatgattaacaggcaagagatcggcggcccaaggtcctacactatcgcggtcgcatctctgggcaagggtgtggcctgtaaccctgcctgttttatcactcagcttctgcctgtgaagagaaaactcgggttctacgagtggacttcgcgcctgagatcacacatcaacccaaccggtaccgtgcttctgcaacttgaaaacaccatgcagatgtccctcaaagatttgctt

SEQ ID NO: 3690 - DNA, 1287 bp, Artificial Sequence
  derived and/or modified sequence
atgcagttgcgtaatcccgagttacacctgggctgtgcgctggctctcaggtttctcgcactcgtgtcttgggacatcccaggggcacgcgctctggataacggcctggccagaactcccaccatgggttggctgcattgggaacgatttatgtgtaacttagactgtcaggaggagccagactcttgcattagcgagaagctcttcatggagatggccgagctcatggtgagcgaggggtggaaggatgccgggtatgaatacctgtgcatagacgactgttggatggcgccccaaagagactctgaaggaagactgcaggccgacccccagagatttcctcacggcattaggcaactcgctaactacgtacactcgaagggtctgaaactcggcatctacgcagacgtgggcaacaagacttgtgccggtttccccggcagcttcggctattacgacattgatgcgcagacatttgccgattggggtgttgatctgctgaagtttgacggatgctactgcgattcgttggagaatctggcggatgggtacaaacacatgtctttggcactgaatcgaactggcaggagtatcgtgtactcttgtgaatggccactgtacatgtggccttttcagaaacctaactacacagagattaggcagtattgcaaccattggagaaattttgccgacattgacgattcatggaaatcgatcaagtcgattctcgactggacaagcttcaatcaagaaaggatcgtcgatgttgccggcccagggggctggaatgatcccgacatgctggtgatcggaaactttgggttgagttggaaccagcaggttacacaaatggccctgtgggccatcatggcagcacccctgttcatgtctaacgacctgaggcatatcagccctcaagccaaagcccttctgcaggacaaggatgtcatcgccataaatcaggaccccctgggtaaacagggctatcagctgagacagggagataacttcgaggtctgggaacggcctctctcggggcttgcctgggcggtcgctatgatcaaccgacaggaaattggcggaccacgcagctataccattgctgtggcctctctgggaaaaggtgtcgcctgcaatccagcttgctttatcacccaattactgcccgtgaaaaggaaactgggattttacgagtggacaagtagactccgctctcacattaaccccactggtacagtactgttgcagctggagaataccatgcagatgtcactcaaggatctgctg

SEQ ID NO: 3691 - DNA, 1287 bp, Artificial Sequence
  derived and/or modified sequence
atgcagctaaggaatcccgaactgcatctagggtgcgccctggccctgcgctttttggcactggtaagttgggacatccctggggctagggctcttgataatggcttggcgcgcacgccaactatgggctggctccactgggagaggttcatgtgtaacctcgattgccaggaagaaccagattcttgtatctccgagaagttgttcatggaaatggcagagctgatggtctcagaagggtggaaggatgccggatacgagtacctctgcattgacgattgctggatggctccgcagcgcgattcagaaggtcggctccaggcagacccccagcgatttccccatggaattcgacagttggccaactacgtgcattccaagggtctgaaactgggcatctacgccgatgtcggtaacaagacatgcgcagggttcccgggcagtttcggatattatgacatcgacgcacagaccttcgctgactggggagtggatcttcttaagtttgacggttgttactgcgattccctggagaacttggctgatggctataaacacatgagcttggcgttgaaccggacaggtcgatccattgtctactcgtgtgagtggccgttatatatgtggccctttcaaaaacccaactacactgaaatcagacagtattgcaatcactggcgaaactttgcagacattgacgacagttggaagagtatcaaatccatcctagactggacgtctttcaaccaggaaaggattgtggacgtggccggaccaggcgggtggaacgatccggacatgcttgtgatcggcaacttcggactgtcctggaaccagcaggtaacacagatggcgctgtgggcaattatggcagctcctctatttatgagcaacgaccttcgtcatatttctccccaagctaaggccctgctgcaggataaagacgtgatcgctatcaaccaggacccccttggaaaacagggataccagctgagacaaggcgataacttcgaggtgtgggaacggccattaagcggcctcgcatgggctgttgctatgataaacaggcaggaaattggcggccctcggagctacactatcgcagtggcaagtctggggaagggcgtagcatgtaacccagcttgtttcattactcaactgctgcccgtgaaacgcaagcttgggttctacgaatggaccagccgactgaggtcccacataaaccctaccggaactgtcctactgcagcttgagaataccatgcaaatgtccctcaaagacttgttg

SEQ ID NO: 3692 - DNA, 1287 bp, Artificial Sequence
  derived and/or modified sequence
atgcaactgcgtaatcctgagctgcacctcggttgtgcgctcgcgctgcgatttcttgcactcgtctcgtgggacatacccggcgcccgcgctttggataatggcctggcccgcaccccaaccatgggatggctgcattgggagcgctttatgtgcaatcttgattgtcaggaggagccagacagctgcatttccgagaagctcttcatggagatggccgaacttatggtgagtgaaggctggaaggacgcgggctatgagtatctttgcatcgatgattgctggatggccccacagagggacagcgagggtagactgcaggcagacccccaacgatttccccacggcattagacagttggccaattatgtccacagcaagggcttgaagttgggcatctacgccgacgtgggcaataagacttgcgctggattcccgggctcttttggatactatgacatcgatgcccagactttcgctgattggggagtagacctactcaagttcgatggctgctactgtgattcgctggaaaatttggccgacggttacaagcacatgtcgctagctctgaatcgaaccggacgatcaatcgtgtattcctgtgaatggccactgtacatgtggccgtttcaaaagccaaattacacggagattagacaatactgcaaccactggcggaacttcgccgacatagatgattcatggaagtcgatcaagagcatactagactggactagctttaatcaggagcgtattgtggatgttgctggccccggaggatggaacgaccccgacatgctggtgattggcaatttcggcctgtcgtggaatcagcaggtgacccaaatggccttatgggcgattatggcagcgcccctgtttatgagcaatgatttgcgtcacatctccccgcaggccaaagcgcttttgcaagataaggatgtcattgctattaatcaggatccgttgggtaaacaaggctatcagctgagacaaggcgataatttcgaggtgtgggaacggccgctcagtggactcgcctgggctgtcgcgatgattaatcgccaggagatcggtggaccgcgctcctacacgatcgcggtagcatccttaggcaaaggcgtggcgtgcaaccccgcatgctttatcacccagctgctgccagtcaaacgtaagctgggattttacgaatggacttcgcgcctgcgtagccacataaatcccacaggcaccgttctgctgcagctggagaacactatgcaaatgagcctgaaggacctcctc

SEQ ID NO: 3693 - DNA, 1287 bp, Artificial Sequence
  derived and/or modified sequence
atgcaactgcggaaccccgagctgcacttgggctgtgccctggcccttcgcttcctcgcactcgtctcctgggacatcccaggcgctcgcgctttggataatggattggccaggacacccaccatgggttggctgcattgggagaggttcatgtgcaacctcgactgccaggaggaaccagattcctgcatctctgagaaactgttcatggaaatggccgagcttatggtttccgaagggtggaaggacgctggatacgagtacctgtgtatcgacgactgctggatggccccccaacgagatagcgagggcagacttcaggcagacccacaaagatttccgcacgggatccgccagctggccaactacgttcacagcaaggggctcaagctggggatttacgccgacgtgggaaataagacttgtgccggcttccccggaagctttggctattacgatatcgatgcgcagacattcgcagattggggggtcgacctactgaaatttgacggttgctattgtgacagtctcgaaaatctggcggacgggtataaacacatgtccctggcgttgaatcgcacaggccgtagtattgtgtattcatgcgaatggccactttacatgtggccctttcagaagcccaattacacagagattaggcaatattgtaatcactggcggaattttgcagacatcgacgatagttggaagagcattaaatctattctcgactggacgtctttcaaccaggaacgcatcgtcgacgtagccggcccaggaggatggaacgaccccgatatgttggtgatcggcaacttcggccttagttggaaccagcaggtgacccagatggccctatgggcaatcatggccgcaccccttttcatgagcaacgatttgcgacatatctcacctcaagctaaggccctactccaggacaaggacgttattgctatcaatcaggacccactgggcaaacagggctaccagcttagacagggagacaatttcgaagtgtgggaaagacccctgagtggccttgcttgggccgtggcaatgatcaaccgacaagagattggaggtcccagatcatataccatcgcagtagcttctctaggaaagggggtagcctgtaatccagcttgcttcatcactcagttattacctgttaagcgtaagctcggtttctacgaatggacttccaggctcaggagtcatatcaaccctactgggacggtcttgttgcagctggaaaataccatgcagatgagcctgaaagacttgctg

SEQ ID NO: 3694 - DNA, 1287 bp, Artificial Sequence
  derived and/or modified sequence
atgcagttaaggaacccagaactgcatctggggtgtgcgcttgccctgagattcttggcactggttagctgggatattcctggagcccgggcactggacaatgggctagctagaacccctacaatgggctggctgcactgggagaggttcatgtgcaatctggattgccaggaggagcctgactcctgtatctccgagaaactttttatggaaatggccgagctgatggtgagcgaaggctggaaggacgccgggtacgagtacttgtgcattgatgattgctggatggctcctcagcgggattcagaagggaggctccaggctgaccctcagcggttccctcatgggattcggcagttagcaaattatgtgcactctaaaggtttgaaactggggatctatgccgacgttggcaataaaacgtgcgccgggttccccggatcttttggctattacgatattgacgctcagacttttgcagattggggcgtggatttgcttaagttcgatggatgctactgtgatagtctggagaacttggctgacggctataagcatatgagtctggcgctgaacagaaccgggcggtccatcgtgtactcctgcgagtggcctctttacatgtggcctttccagaagcctaattatacggagattagacagtattgtaatcactggcgcaactttgcagacattgatgattcttggaagagtataaagtccattttggactggacgtcttttaaccaagaacgcattgtggatgtggccggacccggcggatggaatgaccctgacatgctggttatcgggaattttggactctcatggaaccagcaagttacacagatggcgctttgggccatcatggctgctcccctctttatgagtaacgatctgcggcatataagcccccaggcaaaggctctgctacaggacaaagacgtgattgctatcaaccaggatccgctggggaaacaggggtaccagcttagacagggggataatttcgaagtgtgggagaggcccctaagcggattggcgtgggcagtggccatgatcaacagacaggagatcggaggcccccgtagctacacaattgctgtggcatcattgggaaagggagtagcctgtaatcccgcttgcttcattacacagttactgcctgtgaaacggaaattaggattctacgaatggaccagccgactgcgttctcacatcaaccccacaggaacagtgctcttgcagctcgaaaacaccatgcagatgtcgctcaaggatctcctg

SEQ ID NO: 3695 - DNA, 1287 bp, Artificial Sequence
  derived and/or modified sequence
atgcagttgcgaaacccagagttgcatctgggctgcgccctggctctgcggttcttggccctggtgtcttgggacattcctggggctcgggcgcttgacaacggactggctaggacaccaaccatgggctggctgcactgggagagatttatgtgcaacttggattgtcaggaagaacccgactcttgtattagcgaaaagttgtttatggagatggctgaactgatggtgtctgaagggtggaaagacgctggatatgagtatctgtgtatcgatgactgttggatggcccctcaaagggattcagaagggcggctgcaagctgatccgcagagattccctcacggcatacgccagttagcaaactatgtacactctaagggtctcaaacttgggatctatgctgatgtagggaacaaaacatgcgccggctttcctggttcctttggctactatgatatcgacgcccagacgttcgcggattggggggtcgacctgctgaaatttgatggttgctattgcgattctcttgaaaacctggccgacggctacaagcacatgagcctggccctgaataggaccggccgttcaattgtatattcctgcgagtggcccctatacatgtggccattccagaaaccgaactacactgaaatccgccagtattgcaatcattggagaaacttcgccgacattgacgactcatggaaaagcattaagtcgatcctagactggacaagtttcaatcaggagcgtatcgtggacgtggctggccctggaggttggaatgaccccgacatgctggtgatcgggaacttcggactgagctggaaccaacaggtgacccagatggccctttgggcgatcatggccgcacctctctttatgtcgaatgatctcagacatatttccccgcaggcaaaggccctgcttcaggacaaggatgtcatcgccatcaaccaagatccgctcggcaaacaaggttatcagcttcggcaaggagacaatttcgaggtgtgggaaaggcctctatctggcttagcatgggcggtggccatgattaataggcaggaaattggaggaccccggagctacacaatcgcggtcgccagcctcggaaaaggggtggcctgtaaccccgcgtgcttcatcacacagcttctgccagttaaaaggaaactgggattctacgaatggacatcaagactgcggagccatatcaaccccacaggcaccgttctgcttcagctggagaacaccatgcagatgtctctcaaggatctgctg

SEQ ID NO: 3696 - DNA, 1287 bp, Artificial Sequence
  derived and/or modified sequence
atgcagctgcggaaccctgaattgcatctggggtgtgctctggcactgcgcttccttgcccttgtgagctgggatattcccggcgccagggcccttgacaatggacttgcacgtaccccgacaatgggttggctacattgggagagattcatgtgtaatctcgattgccaggaggagcccgactcatgcatcagcgaaaagctgtttatggaaatggctgagctgatggtgtctgaaggctggaaggatgccgggtatgaatacctgtgcattgatgattgttggatggctcctcagcgggactctgagggacggttgcaggcagacccgcaacggttcccccacggcatccgacagctcgctaattacgttcactccaagggccttaagctggggatttatgcagatgtgggaaacaagacctgcgccggattcccgggctccttcgggtactatgatatagatgctcaaactttcgctgattggggcgtcgatctgcttaaattcgatggatgttactgcgacagcctcgaaaaccttgcggatggatacaaacacatgtctttagctcttaataggaccgggcgctccatcgtgtactcttgtgaatggccactgtatatgtggccttttcagaagcctaattacaccgagatcagacagtactgtaatcactggcgtaactttgctgacatcgacgactcctggaagagtattaagtctatcttagattggacaagtttcaaccaggagcgcattgtggacgtggcaggacctgggggctggaacgatccagatatgcttgttattggaaattttggactaagctggaatcaacaggtgacacagatggctctgtgggcaataatggccgctcccctgtttatgagcaacgatctgcggcacataagcccccaggccaaagcactgctgcaagataaggatgtgattgcaattaatcaggaccctctggggaagcagggttaccagctaaggcagggggataacttcgaggtgtgggagagacctttgtctgggctcgcctgggcggtggctatgatcaatcgccaggaaatcgggggcccaagatcctataccatagcagttgcatcactgggcaagggagtggcctgtaatcccgcttgcttcattacacagttgctgcccgtgaaacggaagttaggcttctacgagtggacttcacgtctgcgatcacacataaatccaactggcacagtgctgctgcagctggagaatacgatgcagatgagtctgaaagacctgttg

SEQ ID NO: 3697 - DNA, 1287 bp, Artificial Sequence
  derived and/or modified sequence
atgcagttgcgcaacccggagctgcacctggggtgcgctctggcgctcaggtttttggctctggtgtcgtgggacatcccgggagccagggccttggacaacggattggcgagaaccccgaccatgggttggctccattgggagcgatttatgtgcaacttggattgccaggaggaacccgacagctgtatttcggagaaactgttcatggaaatggctgagctcatggtgtcagagggatggaaggatgcgggctacgaatacctctgtatcgacgactgttggatggcgccgcagcgcgacagcgaaggacgcctccaggccgatccgcagcggttcccacacggaattagacaacttgccaattatgtacactcgaagggactgaagctgggaatctatgccgatgttggtaacaagacttgcgccgggttcccgggatccttcggctactacgacattgacgcccaaactttcgcggattggggagtggatctgctgaaatttgacgggtgctactgcgactctctggaaaacctcgctgacggctacaagcacatgagcctggccctcaacagaacgggtcggtcgatcgtgtactcctgcgaatggccactctacatgtggccgtttcagaagccaaactacaccgagatacgccagtactgtaatcattggcgcaatttcgccgatatcgatgactcctggaagtcaatcaagtcgattctggactggactagcttcaaccaagagcggatcgtcgatgtcgcaggtcctggcggctggaacgatccggatatgctcgtcatcggaaactttggattgtcgtggaatcaacaggttactcaaatggccctctgggcaatcatggcagcacccttgttcatgagtaacgacctccgacacatctcgccgcaggctaaggccctgctccaggataaagacgtgattgctatcaatcaagatcctctgggaaaacagggctaccaactgaggcaaggcgacaatttcgaggtgtgggaaagacccctgagcggactggcctgggccgtggcgatgatcaaccgccaggaaattggtggaccgcggagctacaccatcgcggtggcctctctcgggaagggcgtggcgtgcaatccagcatgcttcatcactcagcttctgccggtgaagaggaagctgggcttctacgaatggacgtcccgcctccggtcgcatatcaacccaaccggcaccgtactgctgcagctcgaaaatacgatgcagatgtcacttaaggaccttctc

SEQ ID NO: 3698 - DNA, 1287 bp, Artificial Sequence
  derived and/or modified sequence
atgcagctccggaaccccgaactgcatttagggtgtgctctcgcccttagattcctcgctctcgtctcgtgggacatccccggggccagagcacttgataacggactcgctaggacaccaactatgggatggcttcactgggaacgcttcatgtgtaacctcgattgtcaggaagagcccgattcatgtatatcagaaaagctcttcatggaaatggccgaactcatggtatcagaagggtggaaagatgccggatatgaatacctgtgtatagatgactgttggatggccccccagcgagacagtgaagggcgactgcaggcagatccacagcgcttccctcacgggatcagacagctcgccaattatgtccactcgaagggactcaagttagggatatacgccgatgtcggaaacaagacatgtgccggatttccaggatcctttgggtattacgatattgatgctcagacatttgccgattggggggtggatctccttaagtttgatgggtgctactgtgactcactggagaacctcgccgacgggtacaaacacatgagtctggcattgaatcggactggacggtcaattgtgtactcatgtgaatggcctctgtatatgtggccattccagaaacctaattacacagagatacggcagtattgtaaccactggcggaattttgctgatatagatgacagttggaaatctataaagtcaatactcgactggactagttttaatcaggagcgaattgttgacgtggccgggccagggggatggaatgatcccgatatgctggttatcggaaattttggactgtcttggaaccagcaggtgacacaaatggcactgtgggcaataatggctgcccctctctttatgtctaacgatcttaggcatatctcccctcaggccaaagcccttcttcaggacaaagatgtgatcgctattaatcaggatcctctcgggaaacaggggtatcagctgaggcagggagacaacttcgaagtgtgggagaggcccctctctggactagcctgggccgtagccatgataaaccggcaggagattgggggaccacgatcttatacaatagccgtcgcctcactggggaaaggagtcgcatgtaatccagcctgctttataactcagctactcccagtcaaaaggaaattggggttttacgagtggacttctcgactgcgatcccacatcaaccccactggaacagtgctcctgcagctggagaacactatgcagatgtccctcaaggacttgctc

SEQ ID NO: 3699 - DNA, 1287 bp, Artificial Sequence
  derived and/or modified sequence
atgcagctgcgtaaccctgagctgcacctcggttgcgcacttgcgcttcgatttctcgccctggtcagctgggacattccaggtgcacgcgcgcttgataacggacttgcaagaacccctactatgggttggcttcattgggaaagatttatgtgtaacctggactgtcaagaagaaccagattcgtgtataagcgaaaagctgtttatggagatggccgaacttatggtcagcgagggctggaaagatgcaggatacgaatacctgtgtattgacgattgttggatggctcctcaaagggattcagagggaaggcttcaggcagaccctcagcggtttccccatggtatacgacagcttgcgaactacgtgcattcaaaggggcttaaacttggaatttacgctgacgtgggaaataagacttgtgcaggatttccaggtagctttggttactacgatattgacgcccaaacgttcgcagattggggtgtggatctgctcaagttcgatggctgttactgtgattcgcttgagaatctggcagatggttacaagcatatgtcgcttgcattgaaccgcaccggtagaagcattgtgtactcatgtgaatggcccctctacatgtggccttttcagaaacctaactacactgaaataagacagtactgtaaccactggaggaattttgcggatattgatgactcgtggaagtcgattaagtcaattctcgattggacttcatttaaccaggagaggattgtcgatgtggccggccctggagggtggaatgatcccgatatgcttgttattggaaactttggccttagctggaaccaacaagtgactcagatggcgctctgggcgattatggcagcccccctgttcatgagtaacgatctcagacacatttcccctcaggcgaaggcacttcttcaagataaggatgtgatcgcaatcaatcaggatccactcggaaaacaaggatatcaactccgacagggcgacaactttgaagtctgggaacggccactgtccggtctggcatgggcggtagcaatgatcaatagacaggagatcggagggccaaggtcctacactattgccgtcgcatcgcttgggaagggagtggcgtgcaatcctgcatgcttcataactcaactgctgcctgtgaagcggaaacttgggttctacgaatggacctccagactgagatcgcatatcaatcctactggtaccgtccttctgcaactcgaaaacactatgcagatgtcgctcaaggatctcctg

SEQ ID NO: 3700 - DNA, 1287 bp, Artificial Sequence
  derived and/or modified sequence
atgcagctgcgtaaccccgaactgcaccttggttgtgcacttgctttgcgtttcctcgccctcgtatcttgggatatcccaggcgcccgcgcactcgataacggactcgcacgcactcccacaatgggatggctccactgggaacgtttcatgtgtaatctggactgccaggaagagccagatagttgcatcagcgagaagttgtttatggagatggctgaactgatggtttctgagggttggaaggatgcaggatatgaatacctctgtatcgacgactgctggatggccccacagcgcgatagcgaaggtaggctccaggctgatccccaacgcttcccacacggcattagacagttggccaactacgtgcactctaagggtctcaagctgggtatctatgctgacgtgggaaacaagacatgcgctggtttcccaggttcctttggctattacgatatcgacgctcaaactttcgccgactggggtgtggatctgttgaaattcgatggctgctactgtgactcacttgagaatctggctgatggatacaagcatatgtcattggctttgaatagaaccggacgttccatcgtctatagctgcgagtggccactgtacatgtggcctttccagaaaccaaactacaccgaaatacgtcaatactgcaaccactggaggaacttcgctgatattgatgacagctggaagtctatcaaatctatacttgactggactagttttaatcaggaaaggatagtcgatgtagccggaccaggtggctggaacgatcccgacatgcttgtaatcggtaactttggattgtcttggaaccagcaggttacacagatggcactttgggctattatggctgctccactgttcatgtctaacgatttgcgccatatttctccccaggcaaaagctcttctgcaggacaaggatgtcatcgccatcaatcaggaccccctgggtaagcaaggataccaactccgccagggagacaattttgaggtctgggagaggcccctttcaggcctggcctgggctgtagccatgatcaacaggcaggagatcggtggccccaggtcttacacaatcgctgtggcctctctgggcaaaggcgtggcctgcaacccagcttgctttatcacacaactcctgcccgtaaagaggaaattgggattttacgagtggacctccaggctgagatctcacattaaccccacaggtacagtgctcctccagcttgaaaatactatgcagatgtccctcaaggacctgttg

SEQ ID NO: 3701 - DNA, 1287 bp, Artificial Sequence
  derived and/or modified sequence
atgcagctccgcaaccccgaattacacttggggtgcgcactggccctgcgtttcctcgctttagtgagctgggatatccccggagcccgtgcacttgataacggtctcgcaaggactcccaccatggggtggctgcattgggaacgcttcatgtgcaatctggattgtcaggaagagcctgattcttgcatcagcgaaaaactgttcatggaaatggcggagttgatggtcagtgagggctggaaagacgcgggctacgagtatctctgcatcgatgattgctggatggccccacagcgcgactccgagggtaggctgcaagccgaccctcagcgcttcccacatggcattcggcagctggccaactacgtgcatagcaagggattaaagctcgggatctacgctgatgttggtaacaagacgtgtgccggttttcctggaagcttcggctactacgatattgacgcccagacctttgccgattggggtgtcgaccttctgaagtttgatggctgttactgcgatagtctggagaatttggctgacggatacaagcatatgtccctcgcgctgaataggaccggtcggtccatagtttacagttgcgaatggcccctgtatatgtggcccttccagaagccgaactatacagagatcagacagtattgcaatcattggcgaaacttcgcggatatagacgattcctggaaatccattaagtccatcctggactggacctcctttaatcaagaaagaatcgtagacgtggcaggtcctggcgggtggaatgaccctgatatgctggttatcggcaactttgggctgtcttggaaccagcaggtcacacagatggccctctgggcgattatggcagcccccctgttcatgtcaaatgatctgcgccacatctctcctcaggcgaaggccctgctacaggacaaggatgttatagctattaatcaggatccactcgggaagcaggggtatcagctgcggcaaggagacaacttcgaggtttgggaacggcctctctcgggcctggcgtgggccgtggcgatgatcaaccgacaggaaataggtggacctaggtcctataccatcgctgtggcatctctaggtaagggtgtggcctgcaatccagcctgcttcattactcagctcctacccgttaagaggaagctcggattttatgaatggacatcacggctaagatcccacatcaacccaactggcactgtcctgcttcagctcgagaataccatgcagatgagcctcaaagaccttctt

SEQ ID NO: 3702 - DNA, 1287 bp, Artificial Sequence
  derived and/or modified sequence
atgcagctgcggaatcctgaactccacctgggttgtgccctcgctctgcggtttctggccctggtcagttgggatattcccggagcacgcgcactggacaacggcttggccaggacgcctactatgggctggctccattgggagcggttcatgtgcaacctggattgccaggaggaacctgactcctgcatctcggaaaaactgttcatggaaatggccgagctgatggtatccgaaggctggaaggatgccgggtatgagtacctttgcatagacgattgttggatggcgccacagagagactcggaaggacgcctgcaagcagacccgcagagattcccccacgggatccgacagctggccaactacgtgcactcgaagggactgaagttggggatctacgctgatgtgggtaacaaaacctgcgcgggtttcccgggatcgtttggatactacgacattgatgctcagacgtttgcagattggggcgtcgacctgcttaagttcgatggatgctactgcgactctctcgagaatctcgccgatggttacaaacatatgtccctggctctgaaccgaaccggaagatcaatcgtgtactcatgtgaatggccactgtacatgtggccgtttcaaaagccaaattacactgaaattcggcagtactgtaatcattggagaaacttcgcggacatcgatgacagctggaagtccatcaagtccatactggactggacttccttcaatcaggaacgaattgtggatgtggcggggccagggggctggaatgacccggacatgctcgtcattggaaatttcggtctgagctggaaccaacaggtgacccagatggcgctttgggccatcatggcagcgccgctgttcatgtcaaacgatcttcgccacatctcccctcaggcaaaggcgcttctccaggacaaagacgttatcgcgattaaccaagatcctctgggtaagcaggggtaccagctgcggcaaggagacaacttcgaagtgtgggaacggccgttgagcggtcttgcctgggccgtggcgatgatcaatcgccaagaaatcggaggcccccgctcctacaccatcgccgtggcctcactggggaaaggagttgcctgcaacccagcttgcttcattacccagttgctcccggtgaagcgcaaactcggattctacgagtggacgagtcggctcaggagccacatcaaccctactggaaccgtcctgctgcagctggagaacaccatgcagatgagcctgaaggatttgctg

SEQ ID NO: 3703 - DNA, 1287 bp, Artificial Sequence
  derived and/or modified sequence
atgcagctccgtaatcccgaactgcatctgggctgcgctttggctctgcggtttctcgcgctggtctcctgggacataccaggtgctagggctttggacaacggactcgcacgaaccccgaccatgggatggctgcattgggagaggttcatgtgtaatcttgactgccaggaagagcctgattcttgcataagcgagaaattattcatggaaatggccgagttgatggtgagtgaaggttggaaggatgcagggtacgagtacctctgcattgatgactgctggatggcgccacaacgggatagcgaaggtcgcctccaggctgacccgcagcggttccctcatggaatccgccaactggcaaactacgttcactcgaaaggattgaagctcggcatatacgccgatgtgggcaataaaacttgcgctggcttccccgggtcatttggatactatgatattgacgctcagacctttgccgattggggggtggatctactcaagttcgacgggtgttattgtgattctttggagaaccttgcagatgggtacaaacatatgtctctcgccctcaatcgaacaggcagaagtattgtttactcctgtgaatggcccttatatatgtggccattccagaagcctaactatacggaaattcgtcagtattgcaatcactggaggaatttcgctgatatcgacgactcctggaaatcgatcaagagtatccttgactggacttcttttaaccaggaacgcatagtggacgtagcaggcccagggggctggaacgaccccgacatgcttgtgataggaaactttggcctgagctggaatcagcaggtaactcaaatggctctctgggcgattatggcagccccgctattcatgagcaacgacctgcggcacatctcgccgcaggccaaggccctcctgcaagataaagacgttatcgctataaaccaggaccccctggggaaacagggataccaactccgccagggagacaactttgaagtatgggaaagaccactgtccggcctcgcttgggccgtggccatgataaaccgtcaagaaattggtggccccaggagctacaccattgcggtcgcgtccctaggtaaaggagtggcctgcaacccggcatgctttatcactcagctgctgccggttaagcgcaagctaggattctacgaatggaccagtcgcctccgatcgcatataaaccctaccggaaccgtgctgctccagcttgagaatacgatgcagatgtctcttaaggacctccta

SEQ ID NO: 3704 - DNA, 1287 bp, Artificial Sequence
  derived and/or modified sequence
atgcaattgagaaatccagagctacacctcggttgcgcacttgcactcagattcctcgcactggtgagttgggatatcccaggggctagggcacttgacaatggcctggcgagaactcccactatgggttggctccactgggagcggttcatgtgcaacctagattgtcaggaggaacccgatagctgtatcagcgaaaagctgttcatggagatggccgagctgatggtgagtgagggctggaaggatgctggatacgagtatctctgtatcgatgattgctggatggcgccgcaaagagactcggagggccgacttcaagccgatccacagcggttccctcacgggattcggcagttggccaattacgtgcactccaagggtctgaaactgggaatttatgctgacgttggcaacaaaacatgcgcgggctttccaggatcttttggctactatgacatagacgcccagacgtttgctgattggggcgtcgatcttttgaagttcgatgggtgttactgcgacagcttagagaacctggcggatggatacaagcacatgtccctggcactgaaccgcacagggcgcagtattgtgtacagctgcgagtggcccttgtacatgtggcccttccagaaacccaattacacagagatacgccagtattgcaaccactggcggaacttcgcagatatagatgacagctggaagtctatcaagagtattctggattggacgtccttcaatcaggagagaatcgtggatgtcgctgggccaggaggctggaatgaccccgacatgcttgtgatcggcaactttggcttgtcctggaatcagcaggttacccaaatggccttgtgggctattatggccgccccactctttatgagcaatgatctgcgacacatatcccctcaagcgaaagcgctgctccaggataaggacgtgatagctatcaatcaggacccactgggcaagcagggctatcagctgagacagggggacaactttgaggtatgggagcggccgctaagtgggctcgcctgggctgtagctatgattaaccgccaagagatcggcggcccaagaagttatactatagccgtcgctagtcttggtaagggagtggcttgcaatccagcatgtttcatcacgcagctgcttccggtgaagcgtaagttgggtttctacgagtggacctcccggctccgcagccatataaacccaacaggcacagtactgttgcaattggaaaataccatgcagatgagtcttaaggatctcctg

SEQ ID NO: 3705 - DNA, 1433 bp, Artificial Sequence
  derived and/or modified sequence
gggaaataagagagaaaagaagagtaagaagaaatataagagccaccatgcagcttcggaatccagaactccatttggggtgcgcgctcgcactgcggtttctcgcgctggtgtcatgggacattccgggagcgcgagccctggacaacgggttggcgagaactccgacaatgggttggctccattgggagcggtttatgtgcaaccttgattgtcaggaggagcccgattcgtgtatctccgaaaaactcttcatggaaatggcggagcttatggtgagcgagggttggaaggacgcagggtacgagtatttgtgcatcgacgattgctggatggccccacagagggactccgaaggacgcctccaagcggacccgcagcggttcccgcacggtatccggcagctcgctaactacgtacacagcaaagggcttaagctgggtatctacgcggacgtagggaacaagacgtgtgcagggttccccggctcattcggatattacgatattgacgcccagacgtttgcggactggggcgtcgatcttctgaagtttgacggatgctactgcgacagcctcgaaaatcttgctgatggatacaaacacatgtccctggcactgaacaggacgggtcgctccatcgtgtattcgtgtgaatggcccttgtatatgtggccatttcagaagcccaactacacggaaatcagacagtattgtaaccactggaggaatttcgcggacattgatgatagctggaagtcgatcaaatcaattttggattggacatcgttcaaccaggagcgcatcgtggacgtcgcgggtcccggagggtggaatgacccggatatgttggtaattggaaactttggcctttcgtggaatcagcaagtgacccagatggccttgtgggcgattatggcagcgcccttgttcatgtcgaatgatttgagacatatttcgccgcaggccaaggcgttgcttcaagataaggacgtgatcgccatcaatcaggaccccttgggaaaacagggataccaactccgccaaggagataacttcgaggtctgggaaaggcccctttcgggacttgcttgggccgtggcgatgatcaacagacaagagattgggggtcctcggtcctatactatcgccgtggcatcacttggtaaaggagtcgcatgtaatcccgcgtgcttcatcactcagctccttcctgtcaagcgaaaattggggttttatgagtggaccagccgcctgcggtcgcacatcaatccaacagggactgtgctcttgcagctcgaaaacacaatgcagatgtccctcaaagatttgctgtaatgagctgccttctgcggggcttgccttctggccatgcccttcttctctcccttgcacctgtacctcttggtctttgaataaagcctgagtaggaag

SEQ ID NO: 3706 - DNA, 1318 bp, Artificial Sequence
  derived and/or modified sequence
atgctgtccggtcaccgtgacaatgcagctgaggaacccagaactacatctgggctgcgcgcttgcgcttcgcttcctggccctcgtttcctgggacatccctggggctagagcactggacaatggattggcaaggacgcctaccatgggctggctgcactgggagcgcttcatgtgcaaccttgactgccaggaagagccagattcctgcatcagtgagaagctcttcatggagatggcagagctcatggtctcagaaggctggaaggatgcaggttatgagtacctctgcattgatgactgttggatggctccccaaagagattcagaaggcagacttcaggcagaccctcagcgctttcctcatgggattcgccagctagctaattatgttcacagcaaaggactgaagctagggatttatgcagatgttggaaataaaacctgcgcaggcttccctgggagttttggatactacgacattgatgcccagacctttgctgactggggagtagatctgctaaaatttgatggttgttactgtgacagtttggaaaatttggcagatggttataagcacatgtccttggccctgaataggactggcagaagcattgtgtactcctgtgagtggcctctttatatgtggccctttcaaaagcccaattatacagaaatccgacagtactgcaatcactggcgaaattttgctgacattgatgattcctggaaaagtataaagagtatcttggactggacatcttttaaccaggagagaattgttgatgttgctggaccagggggttggaatgacccagatatgttagtgattggcaactttggcctcagctggaatcagcaagtaactcagatggccctctgggctatcatggctgctcctttattcatgtctaatgacctccgacacatcagccctcaagccaaagctctccttcaggataaggacgtaattgccatcaatcaggaccccttgggcaagcaagggtaccagcttagacagggagacaactttgaagtgtgggaacgacctctctcaggcttagcctgggctgtagctatgataaaccggcaggagattggtggacctcgctcttataccatcgcagttgcttccctgggtaaaggagtggcctgtaatcctgcctgcttcatcacacagctcctccctgtgaaaaggaagctagggttctatgaatggacttcaaggttaagaagtcacataaatcccacaggcactgttttgcttcagctagaaaatacaatgcagatgtcattaaaagacttactttaaaatgtt

SEQ ID NO: 3707 - DNA, 1290 bp, Artificial Sequence
  derived and/or modified sequence
atgcagcttaggaaccccgaactccacttagggtgtgccctcgcccttagatttctcgcactggtctcttgggacatccctggcgcacgcgccctcgacaacggacttgcccgaactcccacaatgggctggctgcactgggagcgcttcatgtgcaacctcgactgtcaagaagagccagacagttgcatcagcgaaaagcttttcatggagatggcggaactaatggtgtcggaagggtggaaagacgcgggttatgaatacttatgcattgacgattgttggatggcaccacaaagggactccgagggaaggttacaggccgaccctcaacggtttcctcacgggattaggcagcttgcaaactatgtccactccaaaggcctcaaactgggtatttatgccgatgtcggaaacaaaacctgtgcaggctttcccggcagttttggatactatgatatagacgcccaaactttcgctgactggggtgtggatttattgaagttcgatgggtgttattgtgatagtctcgagaatctcgccgatggatataagcacatgtccctggccttgaaccgaacagggagatctatcgtttatagctgtgaatggcctctttacatgtggccatttcagaagcccaactatacggaaatcaggcagtattgtaaccactggcgcaacttcgctgacatcgacgattcctggaagtctattaaatcaattctggattggacaagtttcaaccaggagcgcatagtcgatgtagcaggcccaggtgggtggaatgatcccgatatgttggtgatcggtaatttcggactgtcatggaatcagcaggtgacccagatggcactgtgggccatcatggcagccccactgttcatgagtaatgatttgagacacatatcaccacaggcaaaggcccttttgcaggacaaagacgtcattgctataaaccaggatcctctcgggaagcagggctaccagttgcgccagggggacaactttgaagtgtgggagaggcccttgtccgggctcgcatgggctgtcgccatgatcaacagacaggagattgggggtcctcgttcctacactatcgcggtggcatcactgggcaagggcgttgcttgcaaccccgcctgttttatcactcagctcctcccggtcaagcggaaactgggcttctacgaatggacatccagattacggtctcatatcaaccccacaggaactgttctactgcagctagaaaataccatgcaaatgagcctgaaagatctactttag

SEQ ID NO: 3708 - DNA, 1290 bp, Artificial Sequence
  derived and/or modified sequence
atgcagctgaggaaccctgagctgcacctgggctgtgccctggccctgcgcttcctggccctggtgtcctgggacatccctggggcccgggccctggacaatggcctggcccggacccccaccatgggctggctgcactgggagcgcttcatgtgcaacctggactgccaggaggagccagacagctgcatcagcgagaagctgttcatggagatggccgagctgatggtgtctgagggctggaaggatgctggctatgagtacctgtgcattgatgactgctggatggccccccagagggacagcgagggccgcctgcaggccgacccccagcgcttcccccacggcatccggcagctggccaactacgtgcacagcaagggcctgaagctgggcatctatgcagatgtgggcaacaagacctgtgccggcttccctggcagctttggctactatgacattgatgcccagacctttgctgactggggcgtggacctgctgaagtttgatggctgctactgtgacagcctggagaacctggctgatggctacaagcacatgagcctggccctgaacagaacaggccgcagcatcgtgtacagctgtgagtggcccctgtacatgtggcccttccagaagcccaactacacagagatccggcagtactgcaaccactggaggaactttgctgacattgatgacagctggaagagcatcaagagcatcctggactggaccagcttcaaccaggagagaattgtggatgtggccggccctgggggctggaatgaccctgacatgctggtgattggcaactttggcctgtcctggaaccagcaggtgacccagatggccctgtgggccatcatggccgcccccctcttcatgagcaatgacctgcggcacatcagcccccaggccaaggccctgctgcaggacaaggatgtgattgccatcaaccaggaccccctgggcaagcagggctaccagctgcggcagggcgacaactttgaggtgtgggagcggcccctgagcggcctggcctgggccgtggccatgatcaaccggcaggagattggaggccccaggagctacaccatcgctgtggccagcctgggcaagggcgtggcctgcaacccagcctgcttcatcacccagctgctgcctgtgaagaggaagctgggcttctatgagtggaccagccggctgcggagccacatcaaccccaccggcaccgtgctgctgcagctggagaacaccatgcagatgagcctgaaggacctgctgtag

SEQ ID NO: 3709 - DNA, 1290 bp, Artificial Sequence
  derived and/or modified sequence
atgcagctgcggaaccccgagctgcacctgggctgcgccctggccttgaggtttctcgccctggtgtcctgggatatcccaggggcccgggcattagataatggcctcgcacggactcctactatggggtggctgcattgggagcgctttatgtgtaatctagactgccaggaagaacctgattcttgcatttcagagaaactatttatggagatggctgaactgatggtatctgagggatggaaggacgcaggctatgaatatctgtgtatcgatgactgttggatggctcctcagagagatagcgaaggaaggctgcaagccgatccacagagattcccgcatggcattcgtcagctggcaaattacgtacactccaaagggctgaaactcggtatttatgcagacgtgggcaacaaaacatgtgcgggttttcccggatcgtttggctactatgacatcgacgcccaaacgttcgctgactggggcgtggatctgctgaaattcgacggctgttattgtgattctctagagaatctggctgatgggtacaaacatatgtcacttgctcttaaccggacaggacgctctatcgtttactcatgtgaatggccattgtatatgtggcccttccaaaaaccgaattataccgaaatcaggcagtattgcaaccattggaggaatttcgctgatatagacgactcctggaaatctattaaaagtatactggactggacttctttcaaccaggaacgtatcgtcgatgtagcaggacctggcggttggaacgatcccgacatgctagtgatcggaaatttcggtctttcatggaaccagcaagttacacagatggcgctgtgggccatcatggccgcacccttatttatgtcaaacgatctcagacacatatcacctcaagccaaggcgctgcttcaagacaaagacgtaatcgccatcaaccaggacccattggggaagcagggttaccagctcaggcagggcgacaacttcgaggtttgggagcgtcctttgagtggacttgcctgggccgtcgctatgatcaatcgccaggaaattggtggccctagatcatacacaatcgccgttgcttccctcgggaagggcgtggcctgtaatcctgcgtgctttataacgcagctgctccccgtcaagcggaaactgggcttctatgaatggacctcgaggctacgaagtcacatcaaccctacgggaacagttctgctgcagctcgaaaatactatgcagatgtccctcaaagacctgctgtag

SEQ ID NO: 3710 - DNA, 1290 bp, Artificial Sequence
  derived and/or modified sequence
atgcagctgaggaaccccgaacttcatcttggatgtgctctcgctcttaggttcctggctctagtaagctgggacataccaggagccagagctctcgacaacggcctggctagaacccccaccatgggctggcttcattgggaaagatttatgtgtaacctggactgccaggaagaacccgactcatgtatttccgaaaagctgtttatggaaatggccgagcttatggttagtgaagggtggaaagatgctggctacgagtatctgtgtattgatgattgttggatggctccgcagcgcgactcagaagggcgtctgcaagccgatccccagagatttccgcacggcatacgccagttggcgaactatgtgcattcaaaaggattgaagctgggcatttatgctgacgttggcaacaagacttgtgctggattcccgggatcctttgggtattacgacatagatgctcaaactttcgccgattggggcgtagatctactgaaatttgatggctgttactgtgactctctggaaaatctcgccgatggctataagcacatgtccctggccctcaaccggaccgggagaagcattgtgtactcatgtgaatggccattatacatgtggccttttcaaaagccaaactacaccgaaatccgtcaatactgcaatcactggcggaattttgcagatatcgacgattcatggaagtccatcaagtctatcctcgattggacatcgttcaatcaggaacgaattgtcgatgtggcaggaccaggaggatggaacgatcccgatatgttagtgattgggaacttcggactctcatggaatcagcaggtgacacagatggccctttgggcgattatggccgcaccgttgttcatgtccaatgacctacgacacatatctcctcaagcaaaggcactactgcaggataaagatgttatcgctatcaaccaggacccactcggtaagcaagggtatcagctgcgccagggcgacaattttgaagtttgggagcggcctctgtcagggctggcctgggctgtggccatgatcaatcgacaagaaatcggcggacccagaagctacactatcgccgtggcatccctggggaaaggggtcgcttgtaaccccgcatgcttcattacccagctcctgcccgttaaaagaaaattaggattttacgagtggacatcacgactcaggagtcatattaatccaacggggaccgtcctgctacaactggaaaatactatgcagatgtccttgaaggacctgttatag

SEQ ID NO: 3711 - DNA, 1290 bp, Artificial Sequence
  derived and/or modified sequence
atgcaactgcggaaccccgagctgcatctgggctgtgcactcgccttgcgatttctggccttagtctcttgggatattcccggcgcccgcgctttagacaatggcctagctaggacccctacaatgggttggctgcactgggagcggttcatgtgcaacctcgactgccaggaggaaccagactcttgtatttctgaaaaattattcatggaaatggccgaattaatggtcagcgaaggctggaaggatgctgggtacgagtatctctgcattgacgattgctggatggcaccgcaaagagactcagaggggaggttacaggccgatccacaacgcttcccacatggcatcaggcagttggctaattacgtgcacagcaaaggcctgaagctgggcatctatgccgacgtcggaaacaaaacttgtgccggcttccccggctcattcggatactatgatatcgatgctcaaacatttgccgactggggagttgacttacttaaattcgacggttgctattgcgacagtctcgagaacctcgcagatggctacaaacacatgtccctcgccctcaatcgtactggccggtcaattgtttatagctgtgagtggcccctctatatgtggccgtttcagaaacccaattatacagagataagacagtactgtaatcattggaggaattttgccgatattgatgatagctggaaatcgataaagagcatcctagattggacatcattcaaccaagagagaattgtggacgttgctggtcctggcggatggaatgatccggatatgctggtaattggcaatttcggcctctcctggaaccagcaggtcacccagatggccttgtgggccattatggcagcccccctgtttatgagcaacgacctcagacacatttccccgcaggcaaaggcattgttgcaggacaaggacgttatagcaatcaaccaagatccactgggaaagcagggttaccaactgcgtcaaggagataatttcgaagtgtgggaacgtcccttgagtgggctcgcatgggctgttgctatgattaatagacaggagatcggtggtcctcgctcatacactattgcggttgccagcctgggcaaaggggttgcgtgtaatcccgcatgcttcataacacagctgttgccggtgaagcgcaaactgggcttctatgagtggaccagcaggctccggtctcacatcaatcctacaggcaccgttctcctgcagctagagaatacaatgcagatgtcactgaaagacctgctgtag

SEQ ID NO: 3712 - DNA, 1290 bp, Artificial Sequence
  derived and/or modified sequence
atgcagctgcgaaatcctgaacttcatctcgggtgtgcccttgcacttagattccttgcattagtgagctgggacataccaggggcccgcgctctcgacaatggattagccaggacacccactatgggatggttacattgggagagatttatgtgtaacctggattgtcaggaagagccggactcttgtatcagcgagaagctcttcatggaaatggccgagctgatggtgtcagagggctggaaagatgccggatatgaatatttgtgtattgacgattgctggatggctccacagcgggactccgaaggcagactccaggccgatccacaaaggtttccccatgggattagacagctcgctaactacgttcacagtaaaggactgaagctgggcatctacgcagacgttggtaataaaacctgcgctggttttccaggctcctttggctattatgacattgatgcacaaaccttcgcggactggggagtagacctattgaagtttgacgggtgttattgcgattccctcgagaacttggctgacggttacaaacacatgtcccttgccctgaaccgcaccggccgcagtatagtttacagttgcgaatggcctctctacatgtggccctttcaaaagcccaactacacagaaatacgacagtattgtaaccactggagaaatttcgctgatatcgatgactcctggaagagtatcaagtccattttagactggacatcatttaatcaagaaaggatagttgatgttgccggtcctggcgggtggaatgatccagatatgctagtcattgggaattttggcctatcctggaaccaacaggtcacgcagatggcactgtgggcgattatggccgctcccctatttatgagtaacgaccttcgacacatatctcctcaggctaaagcattactgcaggacaaggacgtcattgccatcaatcaggatcccttaggaaagcagggataccagttgagacaaggggataattttgaagtctgggaaaggcccctgtcaggcttggcatgggcagtggctatgattaataggcaagaaatcggcggtccgcggagttatactattgctgtggcgtctctagggaagggagtggcttgcaacccggcatgcttcatcacccaactcctcccagtgaagcggaaacttggcttttatgaatggacatctagactcagaagccacattaatccaacaggcacagtactgctgcagctcgagaacactatgcaaatgtcactcaaagacctgctttag

SEQ ID NO: 3713 - DNA, 1290 bp, Artificial Sequence
  derived and/or modified sequence
atgcagctgagaaaccccgagctgcacctgggctgcgccctggccctgagattcctggccctggtgagctgggacatccccggcgccagagccctggacaacggcctggccagaacccccaccatgggctggctgcactgggagagattcatgtgcaacctggactgccaggaggagcccgacagctgcatcagcgagaagctgttcatggagatggccgagctgatggtgagcgagggctggaaggacgccggctacgagtacctgtgcatcgacgactgctggatggccccccagagagacagcgagggcagactgcaggccgacccccagagattcccccacggcatcagacagctggccaactacgtgcacagcaagggcctgaagctgggcatctacgccgacgtgggcaacaagacctgcgccggcttccccggcagcttcggctactacgacatcgacgcccagaccttcgccgactggggcgtggacctgctgaagttcgacggctgctactgcgacagcctggagaacctggccgacggctacaagcacatgagcctggccctgaacagaaccggcagaagcatcgtgtacagctgcgagtggcccctgtacatgtggcccttccagaagcccaactacaccgagatcagacagtactgcaaccactggagaaacttcgccgacatcgacgacagctggaagagcatcaagagcatcctggactggaccagcttcaaccaggagagaatcgtggacgtggccggccccggcggctggaacgaccccgacatgctggtgatcggcaacttcggcctgagctggaaccagcaggtgacccagatggccctgtgggccatcatggccgcccccctgttcatgagcaacgacctgagacacatcagcccccaggccaaggccctgctgcaggacaaggacgtgatcgccatcaaccaggaccccctgggcaagcagggctaccagctgagacagggcgacaacttcgaggtgtgggagagacccctgagcggcctggcctgggccgtggccatgatcaacagacaggagatcggcggccccagaagctacaccatcgccgtggccagcctgggcaagggcgtggcctgcaaccccgcctgcttcatcacccagctgctgcccgtgaagagaaagctgggcttctacgagtggaccagcagactgagaagccacatcaaccccaccggcaccgtgctgctgcagctggagaacaccatgcagatgagcctgaaggacctgctgtag

SEQ ID NO: 3714 - RNA, 1433 nt, Artificial Sequence
  derived and/or modified sequence
gggaaauaagagagaaaagaagaguaagaagaaauauaagagccaccaugcagcuucggaauccagaacuccauuuggggugcgcgcucgcacugcgguuucucgcgcuggugucaugggacauuccgggagcgcgagcccuggacaacggguuggcgagaacuccgacaauggguuggcuccauugggagcgguuuaugugcaaccuugauugucaggaggagcccgauucguguaucuccgaaaaacucuucauggaaauggcggagcuuauggugagcgaggguuggaaggacgcaggguacgaguauuugugcaucgacgauugcuggauggccccacagagggacuccgaaggacgccuccaagcggacccgcagcgguucccgcacgguauccggcagcucgcuaacuacguacacagcaaagggcuuaagcuggguaucuacgcggacguagggaacaagacgugugcaggguuccccggcucauucggauauuacgauauugacgcccagacguuugcggacuggggcgucgaucuucugaaguuugacggaugcuacugcgacagccucgaaaaucuugcugauggauacaaacacaugucccuggcacugaacaggacgggucgcuccaucguguauucgugugaauggcccuuguauauguggccauuucagaagcccaacuacacggaaaucagacaguauuguaaccacuggaggaauuucgcggacauugaugauagcuggaagucgaucaaaucaauuuuggauuggacaucguucaaccaggagcgcaucguggacgucgcgggucccggaggguggaaugacccggauauguugguaauuggaaacuuuggccuuucguggaaucagcaagugacccagauggccuugugggcgauuauggcagcgcccuuguucaugucgaaugauuugagacauauuucgccgcaggccaaggcguugcuucaagauaaggacgugaucgccaucaaucaggaccccuugggaaaacagggauaccaacuccgccaaggagauaacuucgaggucugggaaaggccccuuucgggacuugcuugggccguggcgaugaucaacagacaagagauuggggguccucgguccuauacuaucgccguggcaucacuugguaaaggagucgcauguaaucccgcgugcuucaucacucagcuccuuccugucaagcgaaaauugggguuuuaugaguggaccagccgccugcggucgcacaucaauccaacagggacugugcucuugcagcucgaaaacacaaugcagaugucccucaaagauuugcuguaaugagcugccuucugcggggcuugccuucuggccaugcccuucuucucucccuugcaccuguaccucuuggucuuugaauaaagccugaguaggaag

SEQ ID NO: 3715 - protein, 1020 aa, Artificial Sequence
  derived and/or modified sequence
MQSCARAWGLRLGRGVGGGRRLAGGSGPCWAPRSRDSSSGGGDSAAAGASRLLERLLPRHDDFARRHIGPGDKDQREMLQTLGLASIDELIEKTVPANIRLKRPLKMEDPVCENEILATLHAISSKNQIWRSYIGMGYYNCSVPQTILRNLLENSGWITQYTPYQPEVSQGRLESLLNYQTMVCDITGLDMANASLLDEGTAAAEALQLCYRHNKRRKFLVDPRCHPQTIAVVQTRAKYTGVLTELKLPCEMDFSGKDVSGVLFQYPDTEGKVEDFTELVERAHQSGSLACCATDLLALCILRPPGEFGVDIALGSSQRFGVPLGYGGPHAAFFAVRESLVRMMPGRMVGVTRDATGKEVYRLALQTREQHIRRDKATSNICTAQALLANMAAMFAIYHGSHGLEHIARRVHNATLILSEGLKRAGHQLQHDLFFDTLKIQCGCSVKEVLGRAAQRQINFRLFEDGTLGISLDETVNEKDLDDLLWIFGCESSAELVAESMGEECRGIPGSVFKRTSPFLTHQVFNSYHSETNIVRYMKKLENKDISLVHSMIPLGSCTMKLNSSSELAPITWKEFANIHPFVPLDQAQGYQQLFRELEKDLCELTGYDQVCFQPNSGAQGEYAGLATIRAYLNQKGEGHRTVCLIPKSAHGTNPASAHMAGMKIQPVEVDKYGNIDAVHLKAMVDKHKENLAAIMITYPSTNGVFEENISDVCDLIHQHGGQVYLDGANMNAQVGICRPGDFGSDVSHLNLHKTFCIPHGGGGPGMGPIGVKKHLAPFLPNHPVISLKRNEDACPVGTVSAAPWGSSSILPISWAYIKMMGGKGLKQATETAILNANYMAKRLETHYRILFRGARGYVGHEFILDTRPFKKSANIEAVDVAKRLQDYGFHAPTMSWPVAGTLMVEPTESEDKAELDRFCDAMISIRQEIADIEEGRIDPRVNPLKMSPHSLTCVTSSHWDRPYSREVAAFPLPFVKPENKFWPTIARIDDIYGDQHLVCTCPPMEVYESPFSEQKRASS

SEQ ID NO: 3716 - DNA, 3063 bp, Artificial Sequence
  derived and/or modified sequence
atgcagtcatgtgcccgcgcctgggggctaaggttgggccggggcgtcggaggtggccggcgccttgcaggtgggtctggaccttgttgggccccccgtagcagggattcctcctctggcggcggcgactccgctgcagcgggagcatctagactgctggagaggctgttaccccggcatgacgattttgcccggcggcacatcggtccgggagataaggaccagagagagatgctgcagacgctcgggcttgccagcatagatgagctaattgagaagaccgtcccagccaacatccggctgaagcgaccactaaagatggaggatccagtatgtgaaaatgaaattctcgccactttgcatgcgatctcaagtaagaaccagatttggcggagctatatcgggatgggatactacaattgttcggtaccgcaaaccatccttagaaacttattggaaaactccgggtggataactcagtacaccccataccagccagaagtgtctcagggccgccttgagagtctgctgaactatcagactatggtgtgcgatattactggcctggatatggccaacgcatcactgctggacgagggaaccgccgctgccgaggccctgcagctttgctatagacacaataaacgccgaaaatttctcgtggaccctaggtgtcacccacagaccatagcggtcgtacagacccgggctaagtatacgggcgtgcttaccgagctcaagctgccctgcgagatggattttagcgggaaagacgtctctggcgtgctgtttcagtatcctgacaccgaaggtaaagtggaggattttacagaactggtggaaagggctcaccagagtgggagtttggcctgctgcgcgaccgatttactggccctctgtatcctgcgcccccctggcgagtttggcgtggatattgctctggggagctcacagcgattcggggtgcccctgggctatggaggtcctcacgccgctttctttgcagtgcgagagagcctggtcagaatgatgccagggaggatggtgggagtgacaagggatgccacagggaaggaggtgtacaggctcgctctgcagacaagggagcagcacatcaggagagacaaggccacttctaatatctgtactgcccaggctctcctcgcaaatatggccgctatgtttgctatctatcacggctcccacggtctggagcacattgcgcgacgagtccataatgcgacacttattctgtcggaggggctgaagcgagcaggccaccagttgcagcatgatctgttcttcgataccctgaagatccagtgtgggtgctcagtgaaagaggttctgggacgggccgcacagcggcaaatcaattttcggttgttcgaagatggcaccctgggtattagtcttgatgagaccgtgaacgagaaagatcttgacgacttgctgtggatttttggctgcgagtcttcagccgaactcgtcgcagagtctatgggggaagagtgtcgaggcatcccagggtccgtgttcaagagaacctccccgtttctgacccaccaggtcttcaattcgtatcattccgaaactaatattgtgaggtacatgaaaaaactggagaacaaagatattagcctggtacattcaatgatacctttaggctcgtgtactatgaaactgaactctagtagcgagttagcgccaattacgtggaaagagttcgcgaatatacatccttttgttcctctggaccaagctcagggctaccagcagctctttagggagttagagaaagatttgtgcgagttgactggctacgaccaggtgtgcttccagccgaactctggagcccagggggaatatgccgggctggccactattcgcgcgtacctgaaccagaaaggagaaggtcataggactgtgtgtttgatccccaagtcggcacacggaactaatcccgcatcggcccatatggccgggatgaagattcagccggtggaagtcgacaagtacggaaacatcgacgccgtgcatctcaaagctatggttgataaacataaggagaacctcgcggcaatcatgatcacgtacccatccaccaacggagtcttcgaggaaaacatatcagatgtttgtgatcttattcatcagcacggaggccaggtgtatctggacggagcaaatatgaatgcccaggtggggatctgtcgcccaggggattttggatccgacgtgtcccacctcaatttgcataaaactttttgcattcctcacggggggggcggccctggcatgggccccataggcgtaaagaagcatctagcaccctttcttcctaaccatcccgtgatcagtctcaaacgtaatgaggacgcatgccccgtaggaaccgtgagcgctgccccctggggatctagtagcatcctgcccataagctgggcatacattaagatgatggggggtaagggtcttaagcaagcaactgaaactgcaatccttaatgctaactacatggctaagcgtctagagacccactatcgtatattatttcgcggcgcacggggctacgtgggacacgagttcatcctcgatactcgcccatttaaaaaaagcgccaatatagaggccgtggatgtcgccaagagactccaggattacgggttccatgcgccaacgatgtcgtggcctgtggctggtaccctgatggttgagccgacagagagcgaagataaggcggagttagatcgattctgtgatgctatgattagtattagacaggaaatagccgatattgaagaggggcgaatcgatcctagggtcaatcccctgaagatgagcccccactcattgacctgtgtgacatcctctcattgggataggccatattctcgtgaggtggccgccttcccacttccatttgtgaagcccgagaataaattttggccaaccatcgctagaatagatgacatctacggagatcagcacttagtctgcacctgtcctcccatggaggtgtacgaaagcccatttagcgaacagaaacgcgctagttcatag

SEQ ID NO: 3717 - DNA, 3767 bp, Artificial Sequence
  derived and/or modified sequence
cccgcgagcgtccatccatctgtccggccgactgtccagcgaaaggggctccaggccgggcgcagccgccacccgggggaccgaggccaggagaggggccaagagcgcggctgacccttgcgggccggggcaggggacggtggccgcggccatgcagtcctgtgccagggcgtgggggctgcgcctgggccgcggggtcgggggcggccgccgcctggctgggggatcggggccgtgctgggcgccgcggagccgggacagcagcagtggcggcggggacagcgccgcggctggggcctcgcgcctcctggagcgccttctgcccagacacgacgacttcgctcggaggcacatcggccctggggacaaagaccagagagagatgctgcagaccttggggctggcgagcattgatgaattgatcgagaagacggtccctgccaacatccgtttgaaaagacccttgaaaatggaagaccctgtttgtgaaaatgaaatccttgcaactctgcatgccatttcaagcaaaaaccagatctggagatcgtatattggcatgggctattataactgctcagtgccacagacgattttgcggaacttactggagaactcaggatggatcacccagtatactccataccagcctgaggtgtctcaggggaggctggagagtttactcaactaccagaccatggtgtgtgacatcacaggcctggacatggccaatgcatccctgctggatgaggggactgcagccgcagaggcactgcagctgtgctacagacacaacaagaggaggaaatttctcgttgatccccgttgccacccacagacaatagctgttgtccagactcgagccaaatatactggagtcctcactgagctgaagttaccctgtgaaatggacttcagtggaaaagatgtcagtggagtgttgttccagtacccagacacggaggggaaggtggaagactttacggaactcgtggagagagctcatcagagtgggagcctggcctgctgtgctactgaccttttagctttgtgcatcttgaggccacctggagaatttggggtagacatcgccctgggcagctcccagagatttggagtgccactgggctatgggggaccccatgcagcattttttgctgtccgagaaagcttggtgagaatgatgcctggaagaatggtgggggtaacaagagatgccactgggaaagaagtgtatcgtcttgctcttcaaaccagggagcaacacattcggagagacaaggctaccagcaacatctgtacagctcaggccctcttggcgaatatggctgccatgtttgcaatctaccatggttcccatgggctggagcatattgctaggagggtacataatgccactttgattttgtcagaaggtctcaagcgagcagggcatcaactccagcatgacctgttctttgataccttgaagattcagtgtggctgctcagtgaaggaggtcttgggcagggccgctcagcggcagatcaattttcggctttttgaggatggcacacttggtatttctcttgatgaaacagtcaatgaaaaagatctggacgatttgttgtggatctttggttgtgagtcatctgcagaactggttgctgaaagcatgggagaggagtgcagaggtattccagggtctgtgttcaagaggaccagcccgttcctcacccatcaagtgttcaacagctaccactctgaaacaaacattgtccggtacatgaagaaactggaaaataaagacatttcccttgttcacagcatgattccactgggatcctgcaccatgaaactgaacagttcgtctgaactcgcacctatcacatggaaagaatttgcaaacatccacccctttgtgcctctggatcaagctcaaggatatcagcagcttttccgagagcttgagaaggatttgtgtgaactcacaggttatgaccaggtctgtttccagccaaacagcggagcccagggagaatatgctggactggccactatccgagcctacttaaaccagaaaggagaggggcacagaacggtttgcctcattccgaaatcagcacatgggaccaacccagcaagtgcccacatggcaggcatgaagattcagcctgtggaggtggataaatatgggaatatcgatgcagttcacctcaaggccatggtggataagcacaaggagaacctagcagctatcatgattacatacccatccaccaatggggtgtttgaagagaacatcagtgacgtgtgtgacctcatccatcaacatggaggacaggtctacctagacggggcaaatatgaatgctcaggtgggaatctgtcgccctggagacttcgggtctgatgtctcgcacctaaatcttcacaagaccttctgcattccccacggaggaggtggtcctggcatggggcccatcggagtgaagaaacatctcgccccgtttttgcccaatcatcccgtcatttcactaaagcggaatgaggatgcctgtcctgtgggaaccgtcagtgcggccccatggggctccagttccatcttgcccatttcctgggcttatatcaagatgatgggaggcaagggtcttaaacaagccacggaaactgcgatattaaatgccaactacatggccaagcgattagaaacacactacagaattcttttcaggggtgcaagaggttatgtgggtcatgaatttattttggacacgagacccttcaaaaagtctgcaaatattgaggctgtggatgtggccaagagactccaggattatggatttcacgcccctaccatgtcctggcctgtggcagggaccctcatggtggagcccactgagtcggaggacaaggcagagctggacagattctgtgatgccatgatcagcattcggcaggaaattgctgacattgaggagggccgcatcgaccccagggtcaatccgctgaagatgtctccacactccctgacctgcgttacatcttcccactgggaccggccttattccagagaggtggcagcattcccactccccttcgtgaaaccagagaacaaattctggccaacgattgcccggattgatgacatatatggagatcagcacctggtttgtacctgcccacccatggaagtttatgagtctccattttctgaacaaaagagggcgtcttcttagtcctctgtccctaagtttaaaggactgatttgatgcctctccccagagcatttgataagcaagaaagatttcatctcccaccccagcctcaagtaggagttttatatactgtgtatatctctgtaatctctgtcaaggtaaatgtaaatacagtagctggagggagtcgaagctgatggttggaagacggatttgctttggtattctgcttccacatgtgccagttgcctggattgggagccattttgtgttttgcgtagaaagttttaggaactttaacttttaatgtggcaagtttgcagatgtcatagaggctatcctggagacttaatagacatttttttgttccaaaagagtccatgtggactgtgccatctgtgggaaatcccagggcaaatgtttacattttgtataccctgaagaactctttttcctctaatatgcctaatctgtaatcacatttctgagtgttctcctctttttctgtgtgaggtttttttttttttaatctgcatttattagtattctaataaaagcatcttgatcggaagaa

SEQ ID NO: 3718 - DNA, 3063 bp, Artificial Sequence
  derived and/or modified sequence
atgcagagctgtgcccgggcctggggcctgcggctgggccggggcgtgggcggcggccggcggctggccggcggcagcggcccctgctgggcccccaggagccgggacagcagcagcggcggcggggacagcgctgctgctggggccagccggctgctggagcggctgctgcccaggcatgatgactttgcccggcggcacatcggccctggggacaaggaccagcgggagatgctgcagaccctgggcctggccagcattgatgagctgattgagaagacagtgcctgccaacatccggctgaagaggcccctgaagatggaggaccctgtgtgtgaaaatgagatcctggccaccctgcacgccatcagcagcaagaaccagatctggaggagctacatcggcatgggctactacaactgcagcgtgccccagaccatcctgaggaacctgctggagaacagcggctggatcacccagtacaccccctaccagcctgaggtgtcccagggccgcctggagagcctgctgaactaccagaccatggtgtgtgacatcaccggcctggacatggccaatgccagcctgctggatgagggcacagctgctgctgaggccctgcagctgtgctaccgccacaacaagaggaggaagttcctggtggacccccgctgccacccccagaccatcgctgtggtgcagacccgggccaagtacacaggagtgctgacagagctgaagctgccctgtgagatggacttcagcggcaaggatgtgtctggagtgctcttccagtacccagacacagagggcaaggtggaggacttcacagagctggtggagcgggcccaccagagcggcagcctggcctgctgtgccacagacctgctggccctgtgcatcctgcggcccccaggagaatttggagtggacatcgccctgggcagcagccagcgcttcggcgtgcccctgggctacggcggcccccatgctgccttctttgctgtgcgggagagcctggtgaggatgatgcctggccgcatggtgggcgtgaccagagatgccaccgggaaggaggtgtaccgcctggccctgcagacccgggagcagcacatcagaagagacaaggccaccagcaacatctgcacagcccaggccctgctggccaacatggccgccatgtttgccatctaccacggcagccacggcctggagcacatcgccaggagagtgcacaatgccaccctcatcctgtctgagggcctgaagagagctggccaccagctgcagcacgacctcttctttgacaccctgaagatccagtgtggctgcagcgtgaaggaggtgctgggccgggccgcccagaggcagatcaacttccggctgtttgaagatggcaccctgggcatcagcctggatgaaacagtgaatgagaaggacctggatgacctgctgtggatcttcggctgtgagagcagcgctgagctggtggccgagagcatgggagaggagtgccggggcatccctggctctgtgttcaagaggaccagccccttcctgacccaccaggtgttcaacagctaccacagcgagaccaacatcgtgcgctacatgaagaagctggagaacaaggacatcagcctggtgcacagcatgatccccctgggcagctgcaccatgaagctgaacagcagcagcgagctggcccccatcacctggaaggagtttgccaacatccacccctttgtgcccctggaccaggcccagggctaccagcagctgttccgggagctggagaaggacctgtgtgagctgaccggctatgaccaggtgtgcttccagcccaacagcggggcccagggcgagtatgccggcctggccaccatccgggcctacctgaaccagaagggggagggccacaggacagtgtgcctgatccccaagagcgcccacggcaccaacccagccagcgcccacatggccggcatgaagatccagcctgtggaggtggacaagtatggcaacattgatgctgtgcacctgaaggccatggtggacaagcacaaggagaacctggccgccatcatgatcacctaccccagcaccaatggagtgtttgaggagaacatcagtgatgtgtgtgacctgatccaccagcacggcggccaggtgtacctggatggagccaacatgaatgcccaggtgggcatctgcaggcctggggactttggaagtgatgtgagccacctgaacctgcacaagaccttctgcatcccccacggcggcggcggccctggcatgggccccatcggcgtgaagaagcacctggcccccttcctgcccaaccaccctgtgatcagcctgaagagaaatgaagatgcctgccctgtgggcaccgtgtctgctgccccctggggcagcagcagcatcctgcccatctcctgggcctacatcaagatgatgggcggcaagggcctgaagcaggccacagaaacagccatcctgaatgccaactacatggccaagaggctggagacccactaccgcatcctcttccggggggcccggggctacgtgggccacgagttcatcctggacacccggcccttcaagaagagcgccaacatcgaggccgtggatgtggccaagaggctgcaggactatggcttccacgcccccaccatgtcctggcctgtggccggcaccctgatggtggagcccacagaaagtgaggacaaggccgagctggaccgcttctgtgatgccatgatcagcatccggcaggagattgctgacatcgaggagggcagaattgacccccgggtgaaccccctgaagatgagcccccacagcctgacctgtgtgaccagcagccactgggaccggccctacagccgggaggtggccgccttccccctgccctttgtgaagccagagaacaagttctggcccaccatcgccagaattgatgacatctatggagaccagcacctggtgtgcacctgcccccccatggaggtgtatgagagccccttcagcgagcagaagagggccagcagctag

SEQ ID NO: 3719 - DNA, 3063 bp, Artificial Sequence
  derived and/or modified sequence
atgcagagctgcgcccgggcctggggcctgcggctgggccggggcgtcgggggtggacgaagactggcagggggatcaggcccctgctgggctcctagaagtagagacagttcctccggcggcggggatagtgcagccgcaggcgcttcgcggcttctggagcggctgcttccaagacatgatgacttcgcccggcgccatataggccccggcgataaggatcagcgagagatgctgcaaactcttggactggcttctattgacgagctcatcgagaaaactgtgccagccaatatccggcttaagagacccctgaaaatggaggaccccgtctgcgaaaacgagatcctggccactctccacgcaataagcagcaagaaccaaatttggagatcgtatattggcatgggttactacaattgttctgttccacagactatactgcgcaacttgttggagaacagtggctggatcacccaatacactccttaccagcccgaggtcagccaggggcgtctggagtcactcttgaattatcaaaccatggtgtgcgatattacagggctggacatggctaatgctagcctgctggacgaaggcacggctgccgcagaagctctccagctgtgttatcgccataacaagaggaggaagttcctggtcgatcccaggtgccatccacagactattgccgtcgtgcagacccgggcaaagtatacaggagtgttaactgaactcaaacttccatgcgaaatggacttttctgggaaagacgtatccggggtactattccagtaccccgatacggaaggaaaggtggaggatttcacagagctggtagaacgtgcacaccagagtggctctctcgcatgctgtgcgacagatctgctggccctctgcatccttcgaccccctggggaattcggcgttgacattgcactcgggtctagtcaaaggttcggtgttccacttggatacggaggacctcacgcagccttctttgccgtgcgggagtctttagtgagaatgatgcccggacggatggtcggggtgactcgtgatgccactgggaaggaagtataccgattggccctccaaactagggaacaacatatacggcgcgacaaagccacatcaaatatctgtacagcacaggccttactcgccaatatggcagccatgtttgctatatatcacggcagccatggcctcgagcacattgccaggagagtccataacgcaactctcatcctctctgagggtttgaaaagagcgggccatcagttgcagcatgatctgttctttgacactttgaagattcagtgtggctgttctgttaaggaagttttggggcgcgccgcccagagacagataaacttccggcttttcgaagacggaactttaggaatatcccttgacgagaccgtgaacgaaaaagatcttgatgatctcctgtggatatttggctgtgaaagcagcgcagagttggtcgcggagtccatgggcgaggagtgtagaggtatccctgggtccgtcttcaaaaggacatccccctttttgacgcaccaggtcttcaattcctatcacagcgagacgaatattgtacgctatatgaagaaactcgaaaacaaagatatcagccttgttcattccatgattcccctgggaagttgtacaatgaagctcaatagcagtagtgaactggcacccatcacatggaaagaatttgccaatatccatcccttcgttcccctggatcaggctcagggctaccagcagttgttccgcgagctcgagaaggatttgtgcgaattgacaggatacgaccaagtgtgtttccagccaaatagtggagcccagggcgagtacgctggcctggccacaattcgcgcctacctgaaccagaagggcgagggtcaccgaactgtatgtctcatccccaagagcgcacatgggactaatcccgctagcgcccacatggccgggatgaaaattcagccagttgaagtcgacaaatacggaaatattgatgcagttcacctgaaagccatggtggataagcacaaggagaatctcgccgctattatgataacctacccatccacaaatggcgtgtttgaagaaaatattagcgacgtgtgcgatctgattcaccagcatggcggccaagtgtacctggacggagcaaacatgaacgcccaggtgggcatttgcagaccaggcgatttcggcagcgatgtctctcatttgaatctgcacaagacattttgtattccccacggcggagggggacctggtatgggccctattggagtgaagaagcaccttgctccattcctgcctaatcatccagtgatctcactgaaaagaaacgaggatgcttgtcctgtaggtacggtctccgccgctccttgggggagcagtagcatcctgccgatttcctgggcctatattaagatgatgggaggtaagggactgaagcaagccactgagacagctattcttaacgctaattacatggccaaacgccttgaaactcactatagaatcctgttccgcggcgcacgcgggtatgtcggtcatgagttcatcctggatactaggcccttcaagaagtctgcgaacattgaggcagtggatgtggccaaacggttgcaagactacggattccatgcccccacaatgtcatggccggtcgcagggaccttgatggtggagcccacagagtccgaagacaaagccgaactggaccgattctgtgacgctatgatcagtatccgccaggaaatagcggacatagaagaaggacgtatagaccctagggttaatcccttgaagatgtcccctcacagtctcacatgcgtcacgtctagccattgggacaggccatattcccgagaagttgctgccttcccccttccgttcgtcaagccagagaacaagttctggccaacgatcgcccgcatcgacgacatatatggggaccagcacctggtctgcacatgtccccctatggaggtatacgagtcacctttttcagagcagaagagggcctctagctag

SEQ ID NO: 3720 - DNA, 3063 bp, Artificial Sequence
  derived and/or modified sequence
atgcaaagctgcgccagagcgtggggtctgagactcggtcgaggagttgggggtggccgacggcttgccggtggcagtggcccttgttgggcccctagaagccgggactcatcttctgggggaggggattcagccgctgctggtgcctccaggctccttgaacgcctcctgcctcggcatgacgattttgcaaggcgccacatagggcctggggataaggaccagcgcgaaatgcttcaaaccttgggccttgcctctattgatgagctgattgaaaagaccgtgcccgcaaatatccggctgaagcggcctctcaagatggaggacccagtttgtgagaatgaaatcttggctacactgcacgcaatctcaagcaagaaccagatttggaggtcctatattggtatgggatactacaactgctccgtgccccaaaccatcctgcgcaacttgctggaaaattccggttggataacccaatacaccccgtatcaaccagaggtcagtcaaggcaggctggagtcactcctgaactaccagaccatggtgtgcgatattacaggcctcgatatggccaacgcatctcttttggatgagggcacggccgctgccgaggcactgcagctgtgttatcggcacaataaaaggagaaagtttctggtggatcctcgctgccatccacagacgatcgctgtggttcagacccgggcaaaatacactggtgtacttactgaactcaaactgccgtgtgagatggactttagcggtaaagacgtgtcaggcgttctttttcagtacccagatacagagggaaaagtggaggactttactgaactcgtggaacgtgcccaccagtcggggagcttggcctgctgcgcaaccgatttgcttgcattgtgcattctccgcccaccaggcgagtttggtgtggacatagctctgggctctagccaaagatttggagtccccctgggttatggtggacctcacgcggcattcttcgcagttcgtgaatcactcgtcaggatgatgcccggacggatggtgggggtgacaagagacgctaccggcaaagaggtctaccgcctggccttacaaactcgggagcagcacattcgacgagataaggccacatcaaacatctgtacagcccaagcgctgcttgcaaacatggcggctatgtttgccatctaccacggatcccacggccttgagcatatagcccgacgagtccacaacgccactctgatactcagcgagggccttaagagagctggacaccagctgcagcacgacctattctttgatacactaaaaatacagtgtgggtgtagcgtgaaagaggtgctcgggagagctgcccagagacagatcaactttcggctctttgaagacggtactcttggaatcagcttggacgagactgttaatgaaaaggacctggatgacctgctgtggatttttggatgtgaaagttcagctgaactggtcgccgagtccatgggagaagaatgtcgcggtattcccggttctgtgttcaaacggacgtctcccttcctaacacatcaggtgttcaattcttatcactcggaaactaacattgtccgatatatgaaaaagctagagaataaagacatcagcctggtgcattccatgatccctctagggtcgtgtactatgaagttgaatagtagtagcgagctggctcctataacttggaaggaatttgcaaacatacacccattcgtcccactcgaccaagcacagggctatcagcagctcttccgcgaactcgagaaggatctctgcgaactcactggctatgatcaagtttgcttccaacctaacagcggtgcccaaggagagtacgcgggattagctacgatcagggcctatctgaatcagaagggggagggccaccgaacagtgtgccttattcctaagtcagcacacggcacaaatccagcgagcgcccacatggcgggaatgaaaattcagcccgtagaggttgacaagtacggcaacatagatgccgtgcatctaaaagcgatggtcgataaacataaggagaacctagcagccatcatgataacctatccttctaccaatggggtttttgaagagaatatcagcgatgtctgcgacctgatacaccagcacgggggacaggtctacttagacggcgctaacatgaatgcgcaggtgggcatttgcagaccaggcgatttcggaagcgacgtgtcacacctcaacctccataagacattttgcatacctcacggtgggggagggcctggaatgggtcccatcggcgtgaaaaagcacctggccccattcctccccaatcacccggtgatttccctaaagcgtaatgaggatgcctgtcccgtaggaaccgtgagtgctgcaccgtggggctctagcagtattctgccaatttcttgggcctatattaaaatgatggggggaaagggccttaaacaggccaccgaaaccgctatccttaatgcgaattatatggccaaacgcctcgagacccattatagaattcttttccggggagcgcgtggatacgttggccacgaattcatactcgacacaagaccctttaaaaagtcagctaatatagaggccgtggacgttgccaagcgcctacaggattacgggtttcatgccccaacgatgagctggccagtggcgggaaccctgatggttgagcctaccgaaagcgaggacaaagcagagctggatagattctgtgacgcgatgatctccattaggcaggaaatagcagacattgaggaaggaagaatcgatcccagggttaatcccctgaaaatgagcccccactctctgacatgcgtaacgtcttcacactgggataggccgtactctcgggaggtcgcagcctttcccctgccttttgtaaaacctgagaataagttctggccaacaatcgctagaatcgacgacatctacggagaccagcacttggtgtgcacatgtcctcccatggaggtgtacgagtcaccattcagcgagcagaagcgagcctcgtcctag

SEQ ID NO: 3721 - DNA, 3063 bp, Artificial Sequence
  derived and/or modified sequence
atgcagagctgcgccagagcctggggcctgagactgggcagaggcgtgggcggcggcagaagactggccggcggcagcggcccctgctgggcccccagaagcagagacagcagcagcggcggcggcgacagcgccgccgccggcgccagcagactgctggagagactgctgcccagacacgacgacttcgccagaagacacatcggccccggcgacaaggaccagagagagatgctgcagaccctgggcctggccagcatcgacgagctgatcgagaagaccgtgcccgccaacatcagactgaagagacccctgaagatggaggaccccgtgtgcgagaacgagatcctggccaccctgcacgccatcagcagcaagaaccagatctggagaagctacatcggcatgggctactacaactgcagcgtgccccagaccatcctgagaaacctgctggagaacagcggctggatcacccagtacaccccctaccagcccgaggtgagccagggcagactggagagcctgctgaactaccagaccatggtgtgcgacatcaccggcctggacatggccaacgccagcctgctggacgagggcaccgccgccgccgaggccctgcagctgtgctacagacacaacaagagaagaaagttcctggtggaccccagatgccacccccagaccatcgccgtggtgcagaccagagccaagtacaccggcgtgctgaccgagctgaagctgccctgcgagatggacttcagcggcaaggacgtgagcggcgtgctgttccagtaccccgacaccgagggcaaggtggaggacttcaccgagctggtggagagagcccaccagagcggcagcctggcctgctgcgccaccgacctgctggccctgtgcatcctgagaccccccggcgagttcggcgtggacatcgccctgggcagcagccagagattcggcgtgcccctgggctacggcggcccccacgccgccttcttcgccgtgagagagagcctggtgagaatgatgcccggcagaatggtgggcgtgaccagagacgccaccggcaaggaggtgtacagactggccctgcagaccagagagcagcacatcagaagagacaaggccaccagcaacatctgcaccgcccaggccctgctggccaacatggccgccatgttcgccatctaccacggcagccacggcctggagcacatcgccagaagagtgcacaacgccaccctgatcctgagcgagggcctgaagagagccggccaccagctgcagcacgacctgttcttcgacaccctgaagatccagtgcggctgcagcgtgaaggaggtgctgggcagagccgcccagagacagatcaacttcagactgttcgaggacggcaccctgggcatcagcctggacgagaccgtgaacgagaaggacctggacgacctgctgtggatcttcggctgcgagagcagcgccgagctggtggccgagagcatgggcgaggagtgcagaggcatccccggcagcgtgttcaagagaaccagccccttcctgacccaccaggtgttcaacagctaccacagcgagaccaacatcgtgagatacatgaagaagctggagaacaaggacatcagcctggtgcacagcatgatccccctgggcagctgcaccatgaagctgaacagcagcagcgagctggcccccatcacctggaaggagttcgccaacatccaccccttcgtgcccctggaccaggcccagggctaccagcagctgttcagagagctggagaaggacctgtgcgagctgaccggctacgaccaggtgtgcttccagcccaacagcggcgcccagggcgagtacgccggcctggccaccatcagagcctacctgaaccagaagggcgagggccacagaaccgtgtgcctgatccccaagagcgcccacggcaccaaccccgccagcgcccacatggccggcatgaagatccagcccgtggaggtggacaagtacggcaacatcgacgccgtgcacctgaaggccatggtggacaagcacaaggagaacctggccgccatcatgatcacctaccccagcaccaacggcgtgttcgaggagaacatcagcgacgtgtgcgacctgatccaccagcacggcggccaggtgtacctggacggcgccaacatgaacgcccaggtgggcatctgcagacccggcgacttcggcagcgacgtgagccacctgaacctgcacaagaccttctgcatcccccacggcggcggcggccccggcatgggccccatcggcgtgaagaagcacctggcccccttcctgcccaaccaccccgtgatcagcctgaagagaaacgaggacgcctgccccgtgggcaccgtgagcgccgccccctggggcagcagcagcatcctgcccatcagctgggcctacatcaagatgatgggcggcaagggcctgaagcaggccaccgagaccgccatcctgaacgccaactacatggccaagagactggagacccactacagaatcctgttcagaggcgccagaggctacgtgggccacgagttcatcctggacaccagacccttcaagaagagcgccaacatcgaggccgtggacgtggccaagagactgcaggactacggcttccacgcccccaccatgagctggcccgtggccggcaccctgatggtggagcccaccgagagcgaggacaaggccgagctggacagattctgcgacgccatgatcagcatcagacaggagatcgccgacatcgaggagggcagaatcgaccccagagtgaaccccctgaagatgagcccccacagcctgacctgcgtgaccagcagccactgggacagaccctacagcagagaggtggccgccttccccctgcccttcgtgaagcccgagaacaagttctggcccaccatcgccagaatcgacgacatctacggcgaccagcacctggtgtgcacctgcccccccatggaggtgtacgagagccccttcagcgagcagaagagagccagcagctag

SEQ ID NO: 3722 - protein, 449 aa, Artificial Sequence
  derived and/or modified sequence
MYSFNTLRLYLWETIVFFSLAASKEAEAARSAPKPMSPSDFLDKLMGRTSGYDARIRPNFKGPPVNVSCNIFINSFGSIAETTMDYRVNIFLRQQWNDPRLAYNEYPDDSLDLDPSMLDSIWKPDLFFANEKGAHFHEITTDNKLLRISRNGNVLYSIRITLTLACPMDLKNFPMDVQTCIMQLESFGYTMNDLIFEWQEQGAVQVADGLTLPQFILKEEKDLRYCTKHYNTGKFTCIEARFHLERQMGYYLIQMYIPSLLIVILSWISFWINMDAAPARVGLGITTVLTMTTQSSGSRASLPKVSYVKAIDIWMAVCLLFVFSALLEYAAVNFVSRQHKELLRFRRKRRHHKEDEAGEGRFNFSAYGMGPACLQAKDGISVKGANNSNTTNPPPAPSKSPEEMRKLFIQRAKKIDKISRIGFPMAFLIFNMFYWIIYKIVRREDVHNQ

SEQ ID NO: 3723 - protein, 366 aa, Artificial Sequence
  derived and/or modified sequence
MDYRVNIFLRQQWNDPRLAYNEYPDDSLDLDPSMLDSIWKPDLFFANEKGAHFHEITTDNKLLRISRNGNVLYSIRITLTLACPMDLKNFPMDVQTCIMQLESFGYTMNDLIFEWQEQGAVQVADGLTLPQFILKEEKDLRYCTKHYNTGKFTCIEARFHLERQMGYYLIQMYIPSLLIVILSWISFWINMDAAPARVGLGITTVLTMTTQSSGSRASLPKVSYVKAIDIWMAVCLLFVFSALLEYAAVNFVSRQHKELLRFRRKRRHHKEDEAGEGRFNFSAYGMGPACLQAKDGISVKGANNSNTTNPPPAPSKSPEEMRKLFIQRAKKIDKISRIGFPMAFLIFNMFYWIIYKIVRREDVHNQ

SEQ ID NO: 3724 - DNA, 1350 bp, Artificial Sequence
  derived and/or modified sequence
atgtatagcttcaacacgctcaggctctatctgtgggaaactatcgttttcttcagtctcgctgcgtctaaagaggccgaagccgcccggagtgcccccaaaccaatgtcgcctagtgactttctggacaagctgatgggacgcaccagcgggtatgacgctaggattcggcccaactttaagggccctcccgtcaacgtctcctgcaatattttcatcaactcattcggtagcatagcagaaacgacaatggactatagagtgaacatttttctcaggcagcaatggaacgatcctaggctcgcatataatgagtaccccgacgactccctagatttagacccttccatgttggactcaatctggaaacctgatctcttctttgccaatgaaaaaggcgcccatttccacgagataactacagacaataagctattacgcatatccaggaacggaaatgtgctgtattctatcagaatcacgctgactctggcctgcccaatggatttaaagaactttccaatggatgtccagacctgcatcatgcagctggagtcgttcggatacacgatgaacgaccttatattcgagtggcaggaacaaggtgctgttcaggttgcagatgggcttacacttccacagttcatcctgaaagaagagaaggacctgcggtattgtaccaagcactacaacacaggtaagtttacttgtattgaggcccggttccacttggagcgtcagatgggctattaccttatacagatgtacataccctctctgctgatagtgatcctgtcatggatctccttctggatcaatatggatgccgctcctgcacgggtaggtctcggcattacaaccgttctgacaatgactacccagagctccggttctcgggcaagcctgccaaaagtgtcctatgtcaaggctatagacatctggatggcagtgtgcttgctgttcgtcttttctgcactgcttgaatacgctgccgttaacttcgtatcacgccagcacaaagaattgctgaggttccgaaggaagaggcggcatcataaggaggacgaagccggggaaggccggtttaatttctcagcctacgggatgggcccggcctgcctgcaggctaaggatgggattagtgtgaagggagccaacaatagcaacacaacaaatcctccccctgcaccctctaaatcccccgaagagatgcgcaagctcttcattcagagagcgaagaagattgacaaaatcagtcgaattgggttcccaatggcttttttgatctttaatatgttttactggattatttataagatagtccgccgagaggacgtgcacaatcagtag

SEQ ID NO: 3725 - DNA, 1803 bp, Artificial Sequence
  derived and/or modified sequence
gggagccaacagacacgctggagtttaacaaacagcaatactcttcgcgctcctgaaaagcaggtctggacgctctccgtggtgctgaaacgcctcgcagccgccgctgtccgtggtatctacgaccccctcgctccaatttcccctggggctctccctccgcgcccctgttccccgcctccctttaacatctggattattttttgcaatagcgctttctggttttgtaagtgccaatttgaaacatttttgcccccataactcgtggactacaaagcacaaggacctgaaaaatgtacagcttcaatactcttcgactctacctttgggagaccattgtattcttcagccttgctgcttctaaggaggctgaagctgctcgctccgcacccaagcctatgtcaccctcggatttcctggataagctaatggggagaacctccggatatgatgccaggatcaggcccaattttaaaggtcccccagtgaacgtgagctgcaacattttcatcaacagctttggttccattgctgagacaaccatggactatagggtcaacatcttcctgcggcagcaatggaacgacccccgcctggcctataatgaataccctgacgactctctggacctggacccatccatgctggactccatctggaaacctgacctgttctttgccaacgagaagggggcccacttccatgagatcaccacagacaacaaattgctaaggatctcccggaatgggaatgtcctctacagcatcagaatcaccctgacactggcctgccccatggacttgaagaatttccccatggatgtccagacatgtatcatgcaactggaaagctttggatatacgatgaatgacctcatctttgagtggcaggaacagggagccgtgcaggtagcagatggactaactctgccccagtttatcttgaaggaagagaaggacttgagatactgcaccaagcactacaacacaggtaaattcacctgcattgaggcccggttccacctggagcggcagatgggttactacctgattcagatgtatattcccagcctgctcattgtcatcctctcatggatctccttctggatcaacatggatgctgcacctgctcgtgtgggcctaggcatcaccactgtgctcaccatgaccacccagagctccggctctcgagcatctctgcccaaggtgtcctatgtgaaagccattgacatttggatggcagtttgcctgctctttgtgttctcagccctattagaatatgctgccgttaactttgtgtctcggcaacataaggagctgctccgattcaggaggaagcggagacatcacaaggaggatgaagctggagaaggccgctttaacttctctgcctatgggatgggcccagcctgtctacaggccaaggatggcatctcagtcaagggcgccaacaacagtaacaccaccaacccccctcctgcaccatctaagtccccagaggagatgcgaaaactcttcatccagagggccaagaagatcgacaaaatatcccgcattggcttccccatggccttcctcattttcaacatgttctactggatcatctacaagattgtccgtagagaggacgtccacaaccagtgaagggtctgaaaggttgggggaggctgggagaggggaacgtgggaatagcacaggaatctgagagactaaggaagagaaggggaacggagggagggggcacacttacacaactctctctgcaatatgtgcaatagcaaaatgcagtgatgcatgaatttta

SEQ ID NO: 3726 - DNA, 1555 bp, Artificial Sequence
  derived and/or modified sequence
caacagacacgctggagtttaacaaacagcaatactcttcgcgctcctgaaaagcaggtctggacgctctccgtggtgctgaaacgcctcgcagccgccgctgtccgtggtatctacgaccccctcgctccaatttcccctggggctctccctccgcgcccctgttccccgcctccctttaacatctggattattttttgcaatagcgctttctggttttgtaagtgccaatttgaaacatttttgcccccataactcgtggactacaaagcacaaggacctgaaaaatgtacagcttcaatactcttcgactctacctttgggagaccattgtattcttcaggtcccccagtgaacgtgagctgcaacattttcatcaacagctttggttccattgctgagacaaccatggactatagggtcaacatcttcctgcggcagcaatggaacgacccccgcctggcctataatgaataccctgacgactctctggacctggacccatccatgctggactccatctggaaacctgacctgttctttgccaacgagaagggggcccacttccatgagatcaccacagacaacaaattgctaaggatctcccggaatgggaatgtcctctacagcatcagaatcaccctgacactggcctgccccatggacttgaagaatttccccatggatgtccagacatgtatcatgcaactggaaagctttggatatacgatgaatgacctcatctttgagtggcaggaacagggagccgtgcaggtagcagatggactaactctgccccagtttatcttgaaggaagagaaggacttgagatactgcaccaagcactacaacacaggtaaattcacctgcattgaggcccggttccacctggagcggcagatgggttactacctgattcagatgtatattcccagcctgctcattgtcatcctctcatggatctccttctggatcaacatggatgctgcacctgctcgtgtgggcctaggcatcaccactgtgctcaccatgaccacccagagctccggctctcgagcatctctgcccaaggtgtcctatgtgaaagccattgacatttggatggcagtttgcctgctctttgtgttctcagccctattagaatatgctgccgttaactttgtgtctcggcaacataaggagctgctccgattcaggaggaagcggagacatcacaaggaggatgaagctggagaaggccgctttaacttctctgcctatgggatgggcccagcctgtctacaggccaaggatggcatctcagtcaagggcgccaacaacagtaacaccaccaacccccctcctgcaccatctaagtccccagaggagatgcgaaaactcttcatccagagggccaagaagatcgacaaaatatcccgcattggcttccccatggccttcctcattttcaacatgttctactggatcatctacaagattgtccgtagagaggacgtccacaaccagtgaagggtctgaaaggttgggggaggctgggagaggggaacgtgggaat

SEQ ID NO: 3727 - DNA, 1350 bp, Artificial Sequence
  derived and/or modified sequence
atgtacagcttcaacaccctgcggctgtacctgtgggagaccatcgtgttcttcagcctggccgccagcaaggaggccgaggccgcccggagcgcccccaagcccatgagccccagcgacttcctggacaagctgatgggccgcaccagcggctatgatgcccgcatccggcccaacttcaagggcccccctgtgaatgtgtcctgcaacatcttcatcaacagctttggcagcattgctgagaccaccatggactacagagtgaacatcttcctgcggcagcagtggaatgacccccggctggcctacaatgagtacccagatgacagcctggacctggaccccagcatgctggacagcatctggaagccagacctcttctttgccaatgagaagggggcccacttccacgagatcaccacagacaacaagctgctgcgcatcagcagaaatggaaatgtgctgtacagcatccgcatcaccctgaccctggcctgccccatggacctgaagaacttccccatggatgtgcagacctgcatcatgcagctggagagctttggctacaccatgaatgacctgatctttgagtggcaggagcagggcgctgtgcaggtggctgatggcctgaccctgccccagttcatcctgaaggaggagaaggacctgcgctactgcaccaagcactacaacacaggcaagttcacctgcatcgaggcccgcttccacctggagcggcagatgggctactacctgatccagatgtacatccccagcctgctgattgtcatcctgtcctggatctccttctggatcaacatggatgctgccccagcccgggtgggcctgggcatcaccaccgtgctgaccatgaccacccagagcagcggcagccgggccagcctgcccaaggtgtcctatgtgaaggccatcgacatctggatggctgtgtgcctgctgtttgtgttcagcgccctgctggagtatgctgctgtgaactttgtgtcccggcagcacaaggagctgctgcgcttccggaggaagagaagacaccacaaggaggatgaagctggggagggccgcttcaacttcagcgcctacggcatgggccctgcctgcctgcaggccaaggatggcatctctgtgaagggggccaacaacagcaacaccaccaaccccccaccagcccccagcaagagccctgaggagatgaggaagctgttcatccagagggccaagaagattgacaagatcagcagaattggcttccccatggccttcctgatcttcaacatgttctactggatcatctacaagatcgtgcggcgggaggatgtgcacaaccagtag

SEQ ID NO: 3728 - DNA, 1350 bp, Artificial Sequence
  derived and/or modified sequence
atgtacagcttcaacaccctgcggctgtacctgtgggagaccatcgtgtttttcagcctggcagcctcgaaggaggcagaggccgctcggtccgcccctaaacccatgtctcccagtgatttcctggacaagctgatgggcaggacttctggttatgacgcccgaattcgcccaaatttcaagggccctccggttaatgtcagctgcaacatctttattaattctttcgggtcgatcgccgaaacaacaatggattaccgggtgaatatctttctccgccagcagtggaacgatcctcgcctggcatataacgagtatcccgatgactcgttggatctggacccttctatgctagattctatctggaagcccgacctgttttttgctaacgagaagggcgctcattttcatgagatcacaaccgacaataaactcctccgtatatcaaggaacggcaatgtactgtatagcattagaattaccttgaccctggcttgtcccatggacctgaagaactttccaatggatgtgcagacttgtattatgcaattggagtcctttggatataccatgaatgacctcatcttcgagtggcaggagcagggagcagttcaggttgcggacggcctgacacttccccagttcattctgaaggaagagaaggatcttaggtactgtacaaagcactacaatacaggtaagttcacctgcatagaggctaggtttcacttggaacggcagatggggtattatctgatccaaatgtacatcccctccttacttatcgtgatccttagctggatctcattctggatcaatatggacgctgccccagcccgcgtgggcctcggcatcaccacggtactgacaatgacaacacagtcctccggttctagggcgagtctgcctaaggttagctacgtgaaagccatagatatctggatggcagtgtgcctgctgttcgtctttagtgcactcctcgagtacgccgccgtaaacttcgtaagccgccagcacaaagagctgctgaggttcaggcggaagagacgacatcataaggaggacgaagcgggggaaggccgcttcaatttctccgcctacggaatgggccctgcatgcctccaagcaaaggatggaataagtgtcaaaggggcaaataatagcaacacaactaacccccctcctgccccgagcaaatcacccgaggaaatgcgtaagctgttcattcagcgcgccaagaagatagacaagataagtcgtatcggtttcccaatggcatttctcatattcaacatgttttactggatcatatataaaatagtccgaagggaggatgtccataaccagtag

SEQ ID NO: 3729 - DNA, 1350 bp, Artificial Sequence
  derived and/or modified sequence
atgtatagcttcaatactctgagactgtacctatgggaaacaatagtattcttcagcctcgccgcaagcaaggaagctgaggcagctagaagtgcgcctaaacccatgagcccaagcgactttctggataagcttatgggcagaacatctgggtatgatgcccgtattcggcctaactttaaaggcccaccagtgaatgtcagttgtaatattttcattaattcctttggatctatcgcagaaacaacaatggattaccgggtcaatatctttctgaggcagcagtggaatgacccacgcctggcgtataatgaataccccgatgacagcctcgaccttgatcctagcatgctggattccatctggaagcctgatctgttcttcgctaatgagaaaggagcacattttcatgagataacaactgacaataagctgttgcggattagcaggaacgggaacgtgctctattcgatccgcatcactttgacattagcttgtcccatggatctgaagaactttcccatggatgtgcagacctgcattatgcagttagagtcgtttggatatacgatgaatgatctcatcttcgaatggcaggaacagggtgcggtgcaggtcgccgatggacttacactcccacaatttatcctgaaggaagagaaagatctcaggtattgcacaaaacactataatacaggtaagttcacctgtattgaggcacgcttccacctggagcggcagatgggttattatctcattcagatgtacatcccctcacttttgatcgtcatcctgtcttggataagcttctggatcaacatggatgcagcccctgctcgggtagggctcggaattacaaccgtgttgactatgacaactcagtcatcaggtagcagagcctccctccccaaggtctcttacgtgaaggccattgatatttggatggccgtatgcctgctattcgttttctccgcgctgcttgagtacgctgccgttaattttgtgtctcggcagcataaagagctcctgcgttttcgaagaaagaggcgccaccacaaagaggatgaagcaggcgaaggtaggtttaacttttccgcgtatggaatgggtccggcttgtctgcaggcaaaggatggaattagcgttaagggagccaacaattctaatacaactaatccacctccggcaccctcaaaatctccagaggaaatgaggaaactcttcatccagagggctaagaagatcgacaaaattagccggataggattccccatggcttttttaatatttaatatgttttactggatcatctataagattgtgaggagagaagacgtgcataatcaatag

SEQ ID NO: 3730 - DNA, 1350 bp, Artificial Sequence
  derived and/or modified sequence
atgtattcttttaataccctgcggctgtatctgtgggaaactatagtttttttctctctcgcagcaagtaaggaggccgaagctgcacggtccgcgcccaaaccaatgtccccatccgacttcctcgataaactgatggggcgcactagcggctacgatgctcggatccgccctaattttaagggacccccagtgaatgtctcctgcaacatcttcataaattcctttgggagcattgctgagaccaccatggattaccgggtcaacatctttctgagacagcagtggaacgaccctagattagcctataacgaataccctgatgacagcctggatctcgaccccagcatgcttgactcaatttggaagcccgacctcttctttgccaatgaaaaaggcgcacactttcatgagattactaccgataacaaactcttgcgaattagtcggaacggaaatgtgctttactcaattaggatcactttaacactcgcctgccccatggatctcaagaattttcctatggacgtccagacctgcattatgcagctggaatcttttggatacacaatgaacgatcttatattcgaatggcaagagcaaggtgccgtgcaggtggccgacggactcacactcccacaatttattttaaaggaagagaaagatctgcgctactgcacaaaacactataacacaggcaaatttacctgtattgaagcaagatttcatctggagagacagatgggctactacttaatccagatgtacatccctagtctgttgatagtcatcttatcctggatatctttttggatcaatatggacgccgccccggccagagtcggcttaggaatcaccacagtcttgaccatgactacccagtcgtccggatcacgcgcctctctgcccaaagtttcgtacgttaaagccatcgatatttggatggccgtctgccttctgttcgtatttagcgcattgctggagtacgctgcagtcaactttgtaagtcgccagcacaaagagctgcttcgatttcggaggaaacgccgccaccataaggaggatgaagcaggcgagggcaggttcaacttctccgcgtacggtatgggccccgcttgtctgcaggctaaagacggcattagtgtcaaaggtgcaaataacagcaacacgacaaatccgcctcccgccccaagtaagtctccagaggaaatgagaaagctgttcattcaacgggcaaagaaaatcgataagatttctcgaatcggctttcctatggcctttctgatcttcaacatgttctattggattatttataaaatagtgcgccgcgaggatgttcataatcaatag

SEQ ID NO: 3731 - DNA, 1350 bp, Artificial Sequence
  derived and/or modified sequence
atgtattctttcaatactcttcgtctgtatttatgggaaacaatcgtctttttctccttggcagcttccaaagaggccgaagcagccagatctgcccccaagcctatgtctccttctgactttctcgacaaacttatgggaagaacttccgggtacgacgcacggattcggccaaactttaaaggccctcccgttaatgtgagctgtaacatctttataaatagtttcggttctattgcagagaccaccatggactatcgagtgaatatatttctgagacagcagtggaacgaccctagattagcctataacgaataccctgatgacagcctggatctcgaccccagcatgcttgactcaatttggaagcccgacctcttctttgccaatgaaaaaggcgcacactttcatgagattactaccgataacaaactcttgcgaattagtcggaacggaaatgtgctttactcaattaggatcactttaacactcgcctgccccatggatctcaagaattttcctatggacgtccagacctgcattatgcagctggaatcttttggatacacaatgaacgatcttatattcgaatggcaagagcaaggggcagtgcaggtggcagatggactgactctcccccaattcatccttaaggaagagaaagacctgcgttactgtacaaagcactacaacacagggaagttcacatgcattgaagccagatttcacctcgaacggcagatgggatactacctcatccagatgtatatcccttcgttattgattgtgatacttagctggatttctttttggatcaacatggatgcagctcccgcacgcgtgggccttgggataacgacagtacttacaatgaccacacaatcatctggctctcgggctagtctgcccaaggtgtcctatgtcaaggcaatagacatttggatggcggtgtgcctgctttttgtgttctcagcactcctggagtacgcagccgtcaattttgtatctcgtcaacataaggagttactgcgcttccgaagaaaaagacggcatcacaaggaagatgaggctggcgaaggacggtttaacttttcagcgtatgggatggggcccgcatgtctgcaagctaaggatggcattagcgtgaaaggggctaataactcaaatacaaccaatccccccccagctccctcaaagagccccgaggagatgcggaagttatttatacaaagggctaaaaagatagataagatttcaagaatcggatttcccatggctttcctgatctttaatatgttctattggattatatataaaatcgtcagacgggaggacgtacataatcaatag

SEQ ID NO: 3732 - DNA, 1350 bp, Artificial Sequence
  derived and/or modified sequence
atgtacagcttcaacaccctgagactgtacctgtgggagaccatcgtgttcttcagcctggccgccagcaaggaggccgaggccgccagaagcgcccccaagcccatgagccccagcgacttcctggacaagctgatgggcagaaccagcggctacgacgccagaatcagacccaacttcaagggcccccccgtgaacgtgagctgcaacatcttcatcaacagcttcggcagcatcgccgagaccaccatggactacagagtgaacatcttcctgagacagcagtggaacgaccccagactggcctacaacgagtaccccgacgacagcctggacctggaccccagcatgctggacagcatctggaagcccgacctgttcttcgccaacgagaagggcgcccacttccacgagatcaccaccgacaacaagctgctgagaatcagcagaaacggcaacgtgctgtacagcatcagaatcaccctgaccctggcctgccccatggacctgaagaacttccccatggacgtgcagacctgcatcatgcagctggagagcttcggctacaccatgaacgacctgatcttcgagtggcaggagcagggcgccgtgcaggtggccgacggcctgaccctgccccagttcatcctgaaggaggagaaggacctgagatactgcaccaagcactacaacaccggcaagttcacctgcatcgaggccagattccacctggagagacagatgggctactacctgatccagatgtacatccccagcctgctgatcgtgatcctgagctggatcagcttctggatcaacatggacgccgcccccgccagagtgggcctgggcatcaccaccgtgctgaccatgaccacccagagcagcggcagcagagccagcctgcccaaggtgagctacgtgaaggccatcgacatctggatggccgtgtgcctgctgttcgtgttcagcgccctgctggagtacgccgccgtgaacttcgtgagcagacagcacaaggagctgctgagattcagaagaaagagaagacaccacaaggaggacgaggccggcgagggcagattcaacttcagcgcctacggcatgggccccgcctgcctgcaggccaaggacggcatcagcgtgaagggcgccaacaacagcaacaccaccaaccccccccccgcccccagcaagagccccgaggagatgagaaagctgttcatccagagagccaagaagatcgacaagatcagcagaatcggcttccccatggccttcctgatcttcaacatgttctactggatcatctacaagatcgtgagaagagaggacgtgcacaaccagtag

SEQ ID NO: 3733 - protein, 652 aa, Artificial Sequence
  derived and/or modified sequence
MPLLLLLLLLPSPLHPHPICEVSKVASHLEVNCDKRNLTALPPDLPKDTTILHLSENLLYTFSLATLMPYTRLTQLNLDRCELTKLQVDGTLPVLGTLDLSHNQLQSLPLLGQTLPALTVLDVSFNRLTSLPLGALRGLGELQELYLKGNELKTLPPGLLTPTPKLEKLSLANNNLTELPAGLLNGLENLDTLLLQENSLYTIPKGFFGSHLLPFAFLHGNPWLCNCEILYFRRWLQDNAENVYVWKQGVDVKAMTSNVASVQCDNSDKFPVYKYPGKGCPTLGDEGDTDLYDYYPEEDTEGDKVRATRTVVKFPTKAHTTPWGLFYSWSTASLDSQMPSSLHPTQESTKEQTTFPPRWTPNFTLHMESITFSKTPKSTTEPTPSPTTSEPVPEPAPNMTTLEPTPSPTTPEPTSEPAPSPTTPEPTSEPAPSPTTPEPTSEPAPSPTTPEPTPIPTIATSPTILVSATSLITPKSTFLTTTKPVSLLESTKKTIPELDQPPKLRGVLQGHLESSRNDPFLHPDFCCLLPLGFYVLGLFWLLFASVVLILLLSWVGHVKPQALDSGQGAALTTATQTTHLELQRGRQVTVPRAWLLFLRGSLPTFRSSLFLWVRPNGRVGPLVAGRRPSALSQGRGQDLLSTVSIRYSGHSL

SEQ ID NO: 3734 - protein, 626 aa, Artificial Sequence
  derived and/or modified sequence
MPLLLLLLLLPSPLHPHPICEVSKVASHLEVNCDKRNLTALPPDLPKDTTILHLSENLLYTFSLATLMPYTRLTQLNLDRCELTKLQVDGTLPVLGTLDLSHNQLQSLPLLGQTLPALTVLDVSFNRLTSLPLGALRGLGELQELYLKGNELKTLPPGLLTPTPKLEKLSLANNNLTELPAGLLNGLENLDTLLLQENSLYTIPKGFFGSHLLPFAFLHGNPWLCNCEILYFRRWLQDNAENVYVWKQGVDVKAMTSNVASVQCDNSDKFPVYKYPGKGCPTLGDEGDTDLYDYYPEEDTEGDKVRATRTVVKFPTKAHTTPWGLFYSWSTASLDSQMPSSLHPTQESTKEQTTFPPRWTPNFTLHMESITFSKTPKSTTEPTPSPTTSEPVPEPAPNMTTLEPTPSPTTPEPTSEPAPSPTTPEPTPIPTIATSPTILVSATSLITPKSTFLTTTKPVSLLESTKKTIPELDQPPKLRGVLQGHLESSRNDPFLHPDFCCLLPLGFYVLGLFWLLFASVVLILLLSWVGHVKPQALDSGQGAALTTATQTTHLELQRGRQVTVPRAWLLFLRGSLPTFRSSLFLWVRPNGRVGPLVAGRRPSALSQGRGQDLLSTVSIRYSGHSL

SEQ ID NO: 3735 - DNA, 405 bp, Artificial Sequence
  derived and/or modified sequence
atgcacggcggcggcggcgtgagcagctgcagcgccagcagcgtgtcttccgtgtcacaaaaccccccagccgccgccgctccagggcacggtgcgagggaacatcgcggtcagttggccgctgccgagtctgcatcctcccctctgcatcctgctactaaggcgagtgtgggacctgcccttcagcgcgagacccccacaattctttgcgccatcctgtgcctcggtccccatgtgtcgctcgcctgtgtgagccgcgagctggcaactgaaccgagaaccagcagcccatgtgcatctcacggttcttcaagtcatcctgttactctcaccgagctgctgatttctagcatcagcctccgggatggagcagccctgcttggactgtgttcgcggactgtctag

SEQ ID NO: 3736 - DNA, 1959 bp, Artificial Sequence
  derived and/or modified sequence
atgcccctgttgctcctgcttttgctgctaccttccccactccatccacaccctatttgcgaagtgagtaaagtcgcttcgcacctggaggtgaactgtgacaagcgtaacctcactgccttacctccagacctcccaaaagacactacaatcttgcacttgtccgaaaatctgctttacactttttccctggctactcttatgccctacacccgattgactcagctcaacctcgataggtgcgaactgaccaaacttcaggtggatggcaccttgccagttcttggcacgctggatctctctcacaatcagctgcaatccctgccattgctcgggcagaccctgccagcattgactgtcctggatgtgtcattcaaccgactaacttccctccccttaggtgctctgcgcggtctgggggagctgcaagaactgtatctgaaaggcaacgaactgaaaaccctgcctcctggcctgctgaccccaacccctaaactggagaaactgtcccttgctaacaataacctgacagagcttcctgccggactcctcaatggactggaaaacctagataccctgttattgcaggaaaattcactgtacactatccccaagggattttttggctctcatttgctgcccttcgcgttcttacacgggaacccttggctctgcaattgtgagatcctatattttcgccgatggctccaagataatgctgagaacgtatatgtgtggaaacagggggtggatgtgaaggccatgacctccaacgttgcctcagttcagtgtgataattctgacaagtttccggtgtacaagtatccaggaaagggctgccccacccttggcgacgagggcgacaccgacctctatgattattaccccgaggaagacaccgagggtgataaggttagagctacacgaaccgtggtgaagttccctaccaaagcgcataccacgccatggggcctcttctattcatggtcaaccgcgagccttgatagtcagatgccttctagcctccatcccacacaggagtctacaaaggagcagactacttttcctccgaggtggacccctaactttaccctgcatatggagagcatcacctttagcaagactccgaagtccactaccgaacccaccccttcccctaccaccagcgagcccgtgccagaacctgctcccaacatgacaactctggagcctacaccatcgcccaccacgcccgagcccacctcagagcccgcaccctctcctactaccccagaacctacttcagagcccgctccgtctccgacaacacccgagcccaccagtgagccggctccctcaccgacaactcccgagcccacacccatcccaacgattgctacctcacctaccatactggtctcagccacttctctgatcacccctaagtccacatttctcaccacgactaagccagtatcccttctcgaatcgaccaaaaagactatacctgagcttgaccagccgccgaaactgaggggtgtgctacagggtcatctcgaaagttccaggaatgatcccttcctacatcccgacttctgctgtctgctccccctgggcttttacgtgctcggattgttctggttgctatttgctagtgtcgtgttgatcctactcctgtcttgggtgggccatgtgaaaccccaggcattggatagcgggcagggggccgccttaaccacggcaacccaaacaacacacctggaactccagcgcggacgccaagtgaccgtgcctagggcgtggcttctgtttctcagaggaagtctaccaacatttcgctcctcactgtttctttgggtccggccgaatggtcgcgtaggtcctctggtagctggaagaaggccatctgcgttgagccaaggtaggggacaggacctcttgtccacagtgtcaatcagatattctgggcatagtctgtag

SEQ ID NO: 3737 - DNA, 1881 bp, Artificial Sequence
  derived and/or modified sequence
atgcctttgctgctgttactgttacttctcccctccccactgcatccccacccaatttgtgaagtctccaaagtggctagtcacttggaagtgaactgcgacaagagaaatctgaccgccctgccccccgatttgccgaaagatacgaccattctccatctcagcgaaaacctcctttacacgttttcgttggccactttgatgccatacactcgcctcacccagttgaacctcgacagatgcgagctgacgaagctgcaggttgatgggaccctgcccgttctcggaactcttgaccttagtcataaccagttacagtctttacccctgctagggcaaaccctgccagctctaacagtgcttgatgtgagcttcaatcgccttacatcgctgcccctgggcgcgttaagaggcttgggggagctccaggagttgtacctgaaaggcaacgaactcaagacacttccccccggcttgctgacaccaaccccaaaactggaaaaactgagcctagcgaacaataatttgacggaattgccggccggtctcctgaacggcctggaaaatcttgacactctgttactccaagagaattcactgtataccattcctaaggggttttttggtagtcacttgcttccttttgcattcctccatggtaatccctggctgtgtaattgtgaaattctgtacttccgacgctggctccaagacaatgccgagaatgtatatgtctggaagcagggggtggatgttaaagcaatgacttctaacgtcgcgagcgtgcagtgcgataactctgacaaattccctgtgtacaagtacccggggaaggggtgccctaccctcggagacgaaggcgacacagacctgtacgattactatcctgaggaagataccgaaggagacaaagtccgggccactcggactgttgtgaaatttccaacaaaagcccacaccactccgtggggcttgttttattcctggtctaccgcctctctggactctcagatgccttcaagcctgcacccgactcaagaatctaccaaggagcaaaccaccttccctcccagatggacaccgaacttcaccctccacatggaatcgattaccttcagtaagacccccaagtcgacaacagagccaacgcccagtcctacgacttccgagcccgtgcccgagcccgcacccaacatgactactctagaacctacacccagtcctactaccccggagcctacctctgagcctgcacctagccctacaacaccagagccaacccccatccctaccatcgcaacatcccccaccattcttgtttcagctacatctctgattacgcccaaaagcactttcttaaccaccacgaagcctgtctccctgcttgagagtaccaagaagactataccggaactcgaccagccaccaaagctccggggtgtgctgcagggtcacttggagtccagcagaaacgatccctttctgcatccagacttttgctgtctgttgcctctggggttctacgtcctgggcttattttggctcttgttcgctagcgttgtactgatactccttctctcttgggttggtcacgtgaaacctcaggcgctcgacagcggacagggcgctgccctgacaacagcgactcagactactcatctggagctgcagagggggcggcaggtaaccgtgcctagggcatggctgctttttttaagggggtcgctgcctacctttcgcagttcactgtttctgtgggttcggcctaacgggcgcgttggtcctcttgtggcagggagacgtccaagcgcgctttcacagggtcgggggcaagatcttctcagcaccgtgagtatccggtattcaggccactcgctctag

SEQ ID NO: 3738 - DNA, 2501 bp, Artificial Sequence
  derived and/or modified sequence
gagagaaggacggagtcgagtggcaccctagaagacgctctgtgccttcggaggtctttctgcctgcctgtcctcatgcctctcctcctcttgctgctcctgctgccaagccccttacacccccaccccatctgtgaggtctccaaagtggccagccacctagaagtgaactgtgacaagaggaatctgacagcgctgcctccagacctgccgaaagacacaaccatcctccacctgagtgagaacctcctgtacaccttctccctggcaaccctgatgccttacactcgcctcactcagctgaacctagataggtgcgagctcaccaagctccaggtcgatgggacgctgccagtgctggggaccctggatctatcccacaatcagctgcaaagcctgcccttgctagggcagacactgcctgctctcaccgtcctggacgtctccttcaaccggctgacctcgctgcctcttggtgccctgcgtggtcttggcgaactccaagagctctacctgaaaggcaatgagctgaagaccctgcccccagggctcctgacgcccacacccaagctggagaagctcagtctggctaacaacaacttgactgagctccccgctgggctcctgaatgggctggagaatctcgacacccttctcctccaagagaactcgctgtatacaataccaaagggcttttttgggtcccacctcctgccttttgcttttctccacgggaacccctggttatgcaactgtgagatcctctattttcgtcgctggctgcaggacaatgctgaaaatgtctacgtatggaagcaaggtgtggacgtcaaggccatgacctctaacgtggccagtgtgcagtgtgacaattcagacaagtttcccgtctacaaatacccaggaaaggggtgccccacccttggtgatgaaggtgacacagacctatatgattactacccagaagaggacactgagggcgataaggtgcgtgccacaaggactgtggtcaagttccccaccaaagcccatacaaccccctggggtctattctactcatggtccactgcttctctagacagccaaatgccctcctccttgcatccaacacaagaatccactaaggagcagaccacattcccacctagatggaccccaaatttcacacttcacatggaatccatcacattctccaaaactccaaaatccactactgaaccaaccccaagcccgaccacctcagagcccgtcccggagcccgccccaaacatgaccaccctggagcccactccaagcccgaccaccccagagcccacctcagagcccgcccccagcccgaccaccccggagcccacctcagagcccgcccccagcccgaccaccccagagcccacctcagagcccgcccccagcccgaccaccccggagcccaccccaatcccgaccatcgccacaagcccgaccatcctggtgtctgccacaagcctgatcactccaaaaagcacatttttaactaccacaaaacccgtatcactcttagaatccaccaaaaaaaccatccctgaacttgatcagccaccaaagctccgtggggtgctccaagggcatttggagagctccagaaatgacccttttctccaccccgacttttgctgcctcctccccctgggcttctatgtcttgggtctcttctggctgctctttgcctctgtggtcctcatcctgctgctgagctgggttgggcatgtgaaaccacaggccctggactctggccaaggtgctgctctgaccacagccacacaaaccacacacctggagctgcagaggggacggcaagtgacagtgccccgggcctggctgctcttccttcgaggttcgcttcccactttccgctccagcctcttcctgtgggtacggcctaatggccgtgtggggcctctagtggcaggaaggaggccctcagctctgagtcagggtcgtggtcaggacctgctgagcacagtgagcattaggtactctggccacagcctctgagggtgggaggtttggggaccttgagagaagagcctgtgggctctcctattggaatctagttgggggttggaggggtaaggaacacagggtgatagggaggggtcttagttcctttttctgtatcagaagccctgtcttcacaacacaggcacacaatttcagtcccagccaaagcagaaggggtaatgacatggacttggcggggggacaagacaaagctcccgatgctgcatggggcgctgccagatctcacggtgaaccattttggcagaatacagcatggttcccacatgcatctatgcacagaagaaaatctggaaagtgatttatcaggatgtgagcactcgttgtgtctggatgttacaaatatgggtggttttattttctttttccctgtttagcattttctagttttccactattattgtatattatctgtataataaaaaataattttagggttggga

SEQ ID NO: 3739 - DNA, 2339 bp, Artificial Sequence
  derived and/or modified sequence
gacgctctgtgccttcggaggtctttctgcctgcctgtcctcatgcctctcctcctcttgctgctcctgctgccaagccccttacacccccaccccatctgtgaggtctccaaagtggccagccacctagaagtgaactgtgacaagaggaatctgacagcgctgcctccagacctgccgaaagacacaaccatcctccacctgagtgagaacctcctgtacaccttctccctggcaaccctgatgccttacactcgcctcactcagctgaacctagataggtgcgagctcaccaagctccaggtcgatgggacgctgccagtgctggggaccctggatctatcccacaatcagctgcaaagcctgcccttgctagggcagacactgcctgctctcaccgtcctggacgtctccttcaaccggctgacctcgctgcctcttggtgccctgcgtggtcttggcgaactccaagagctctacctgaaaggcaatgagctgaagaccctgcccccagggctcctgacgcccacacccaagctggagaagctcagtctggctaacaacaacttgactgagctccccgctgggctcctgaatgggctggagaatctcgacacccttctcctccaagagaactcgctgtatacaataccaaagggcttttttgggtcccacctcctgccttttgcttttctccacgggaacccctggttatgcaactgtgagatcctctattttcgtcgctggctgcaggacaatgctgaaaatgtctacgtatggaagcaaggtgtggacgtcaaggccatgacctctaacgtggccagtgtgcagtgtgacaattcagacaagtttcccgtctacaaatacccaggaaaggggtgccccacccttggtgatgaaggtgacacagacctatatgattactacccagaagaggacactgagggcgataaggtgcgtgccacaaggactgtggtcaagttccccaccaaagcccatacaaccccctggggtctattctactcatggtccactgcttctctagacagccaaatgccctcctccttgcatccaacacaagaatccactaaggagcagaccacattcccacctagatggaccccaaatttcacacttcacatggaatccatcacattctccaaaactccaaaatccactactgaaccaaccccaagcccgaccacctcagagcccgtcccggagcccgccccaaacatgaccaccctggagcccactccaagcccgaccaccccagagcccacctcagagcccgcccccagcccgaccaccccggagcccaccccaatcccgaccatcgccacaagcccgaccatcctggtgtctgccacaagcctgatcactccaaaaagcacatttttaactaccacaaaacccgtatcactcttagaatccaccaaaaaaaccatccctgaacttgatcagccaccaaagctccgtggggtgctccaagggcatttggagagctccagaaatgacccttttctccaccccgacttttgctgcctcctccccctgggcttctatgtcttgggtctcttctggctgctctttgcctctgtggtcctcatcctgctgctgagctgggttgggcatgtgaaaccacaggccctggactctggccaaggtgctgctctgaccacagccacacaaaccacacacctggagctgcagaggggacggcaagtgacagtgccccgggcctggctgctcttccttcgaggttcgcttcccactttccgctccagcctcttcctgtgggtacggcctaatggccgtgtggggcctctagtggcaggaaggaggccctcagctctgagtcagggtcgtggtcaggacctgctgagcacagtgagcattaggtactctggccacagcctctgagggtgggaggtttggggaccttgagagaagagcctgtgggctctcctattggaatctagttgggggttggaggggtaaggaacacagggtgatagggaggggtcttagttcctttttctgtatcagaagccctgtcttcacaacacaggcacacaatttcagtcccagccaaagcagaaggggtaatgacatggacttggcggggggacaagacaaagctcccgatgctgcatggggcgctgccagatctcacggtgaaccattttggcagaatacagcatggttcccacatgcatctatgcacagaagaaaatctggaaagtgatttatcaggatgtgagcactcgttgtgtctggatgttacaaatatgggtggttttattttctttttccctgtttagcattttctagttttc

SEQ ID NO: 3740 - DNA, 1959 bp, Artificial Sequence
  derived and/or modified sequence
atgcccctgctgctgctgctgctgctgctgcccagccccctgcacccccaccccatctgtgaggtgtccaaggtggccagccacctggaggtgaactgtgacaagaggaacctgacagccctgcccccagacctgcccaaggacaccaccatcctgcacctgtctgagaacctgctgtacaccttcagcctggccaccctgatgccctacacccggctgacccagctgaacctggacagatgtgagctgaccaagctgcaggtggatggcaccctgcctgtgctgggcaccctggacctgagccacaaccagctgcagagcctgcccctgctgggccagaccctgcctgccctgactgtgctggatgtgtccttcaaccggctgaccagcctgcccctgggcgccctgcggggcctgggggagctgcaggagctgtacctgaagggaaatgagctgaagaccctgcccccaggcctgctgacccccacccccaagctggagaagctgagcctggccaacaacaacctgacagagctgcctgctggcctgctgaatggcctggagaacctggacaccctgctgctgcaggagaacagcctgtacaccatccccaagggcttcttcggcagccacctgctgccctttgccttcctgcacggcaacccctggctgtgcaactgtgagatcctgtacttccgccgctggctgcaggacaatgcagaaaatgtgtatgtgtggaagcagggcgtggatgtgaaggccatgaccagcaatgtggcctctgtgcagtgtgacaacagcgacaagtttcctgtgtacaagtacccaggcaagggctgccccaccctgggagatgaaggagacacagacctgtatgactactacccagaggaggacacagaaggagacaaggtgcgggccaccaggacagtggtgaagttccccaccaaggcccacaccaccccctggggcctcttctacagctggagcacagccagcctggacagccagatgcccagcagcctgcaccccacccaggagagcaccaaggagcagaccaccttccccccacgctggacccccaacttcaccctgcacatggagagcatcaccttcagcaagacccccaagagcaccacagagcccacccccagccccaccaccagcgagcctgtgcctgagcccgcccccaacatgaccaccctggagcccacccccagccccaccaccccagagcccaccagcgagcccgcccccagccccaccaccccagagcccaccagcgagcccgcccccagccccaccaccccagagcccaccagcgagcccgcccccagccccaccaccccagagcccacccccatccccaccatcgccaccagccccaccatcctggtgtctgccaccagcctcatcacccccaagagcaccttcctgaccaccaccaagcctgtgtccctgctggagagcaccaagaagaccatccctgagctggaccagccccccaagctgcggggcgtgctgcagggccacctggagagcagcagaaatgaccccttcctgcacccagacttctgctgcctgctgcccctgggcttctacgtgctgggcctcttctggctgctgtttgcctctgtggtgctgatcctgctgctgtcctgggtgggccacgtgaagccccaggccctggacagcggccagggcgccgccctgaccacagccacccagaccacccacctggagctgcagaggggccggcaggtgacagtgccccgggcctggctgctcttcctgcggggcagcctgcccaccttccgcagcagcctcttcctgtgggtgcggcccaacggccgggtgggccccctggtggccggccggcggcccagcgccctgagccagggccggggccaggacctgctgagcacagtgtccatccgctacagcggccacagcctgtag

SEQ ID NO: 3741 - DNA, 1881 bp, Artificial Sequence
  derived and/or modified sequence
atgcccctgctgctgctgctgctgctgctgcccagccccctgcacccccaccccatctgtgaggtgtccaaggtggccagccacctggaggtgaactgtgacaagaggaacctgacagccctgcccccagacctgcccaaggacaccaccatcctgcacctgtctgagaacctgctgtacaccttcagcctggccaccctgatgccctacacccggctgacccagctgaacctggacagatgtgagctgaccaagctgcaggtggatggcaccctgcctgtgctgggcaccctggacctgagccacaaccagctgcagagcctgcccctgctgggccagaccctgcctgccctgactgtgctggatgtgtccttcaaccggctgaccagcctgcccctgggcgccctgcggggcctgggggagctgcaggagctgtacctgaagggaaatgagctgaagaccctgcccccaggcctgctgacccccacccccaagctggagaagctgagcctggccaacaacaacctgacagagctgcctgctggcctgctgaatggcctggagaacctggacaccctgctgctgcaggagaacagcctgtacaccatccccaagggcttcttcggcagccacctgctgccctttgccttcctgcacggcaacccctggctgtgcaactgtgagatcctgtacttccgccgctggctgcaggacaatgcagaaaatgtgtatgtgtggaagcagggcgtggatgtgaaggccatgaccagcaatgtggcctctgtgcagtgtgacaacagcgacaagtttcctgtgtacaagtacccaggcaagggctgccccaccctgggagatgaaggagacacagacctgtatgactactacccagaggaggacacagaaggagacaaggtgcgggccaccaggacagtggtgaagttccccaccaaggcccacaccaccccctggggcctcttctacagctggagcacagccagcctggacagccagatgcccagcagcctgcaccccacccaggagagcaccaaggagcagaccaccttccccccacgctggacccccaacttcaccctgcacatggagagcatcaccttcagcaagacccccaagagcaccacagagcccacccccagccccaccaccagcgagcctgtgcctgagcccgcccccaacatgaccaccctggagcccacccccagccccaccaccccagagcccaccagcgagcccgcccccagccccaccaccccagagcccacccccatccccaccatcgccaccagccccaccatcctggtgtctgccaccagcctcatcacccccaagagcaccttcctgaccaccaccaagcctgtgtccctgctggagagcaccaagaagaccatccctgagctggaccagccccccaagctgcggggcgtgctgcagggccacctggagagcagcagaaatgaccccttcctgcacccagacttctgctgcctgctgcccctgggcttctacgtgctgggcctcttctggctgctgtttgcctctgtggtgctgatcctgctgctgtcctgggtgggccacgtgaagccccaggccctggacagcggccagggcgccgccctgaccacagccacccagaccacccacctggagctgcagaggggccggcaggtgacagtgccccgggcctggctgctcttcctgcggggcagcctgcccaccttccgcagcagcctcttcctgtgggtgcggcccaacggccgggtgggccccctggtggccggccggcggcccagcgccctgagccagggccggggccaggacctgctgagcacagtgtccatccgctacagcggccacagcctgtag

SEQ ID NO: 3742 - DNA, 1959 bp, Artificial Sequence
  derived and/or modified sequence
atgcccctgctgctgctgctgctgctgctgcccagccccctgcacccccatccaatctgcgaagtgtctaaggtcgcatcccacctggaagtgaactgcgacaagcggaatctgacagcactgccaccagatcttcccaaagatacaaccatattgcacctgtctgaaaatttgctgtacaccttctcgctcgcaactttgatgccttacacaaggctgacacaactgaacctggatcggtgcgagctgactaagttacaggtcgacggcaccctgcctgtccttggcactctcgacctttctcacaaccagctgcagagcctaccgttgttgggccagacactgccagccctgactgtgctggatgtgagttttaatagactgacaagcctcccgctaggggccctacgcgggttaggcgagttgcaggagctgtatctgaaagggaatgaattgaagaccctgccccccggactgcttactcccactcccaagctggagaagctcagtctcgcgaataataatctcaccgagctacctgctggactcctgaatggactcgaaaatctggacaccctactgttgcaggagaactcgctgtatacaatccctaagggcttttttgggtctcatctcctaccttttgcctttctacatgggaacccctggctgtgtaactgcgaaatcctctatttccgccgctggctgcaagataatgctgagaatgtgtacgtgtggaagcaaggcgtggacgtcaaggctatgacaagtaacgtggcctcagtccagtgcgataattcagataaattcccagtgtacaagtaccccggaaaagggtgtcctactctgggcgacgagggcgacacagatttgtatgactattaccctgaggaggataccgaaggagacaaggtgcgcgccacgcgcactgtggtgaaatttcctacaaaggcccatactactccatggggactcttctattcttggtctactgcatctttagatagccagatgcccagctctttacatccaacgcaggaatcgactaaggagcagactacctttccacctcggtggacacctaacttcaccctgcacatggagagtattactttctcaaagacaccaaaatccacaactgagccaacccccagcccaaccacaagcgaacccgttcccgaaccagccccaaacatgacgacacttgagcccacccctagccccactaccccagagcctacttctgaacctgcacccagtccgaccacaccagaaccaacatcagaacctgcaccaagccctacgactcccgagccaacctctgaacctgccccaagccccacaaccccagagcccaccccaatccctactatcgcaacttcaccaacaatacttgtgagcgctacttcacttattaccccaaagtctacctttctcaccacgacaaagcctgtctctcttttggagtccactaagaagactatccccgagctcgaccagcctccgaaactgcggggagtgctccaaggccatctggaaagcagcagaaatgatccatttctgcaccccgacttctgttgcctgctgcccttggggttctacgtgctcgggctgttctggctcctgtttgctagtgttgtgttgattcttctcctaagctgggtggggcatgttaagcctcaagccctcgattctggccagggtgctgcactgaccactgctacgcagactacccacctcgagctgcagagaggcaggcaagttaccgttccacgagcgtggctgctttttctaaggggctcccttcctacgtttcgatcatccctgttcctttgggtgcggcctaatggcagagtgggtcctctggtggcaggccggagaccatctgccctctctcaagggcgcggtcaggatctgctgtctacggtgtccatacggtacagcgggcattccctttag

SEQ ID NO: 3743 - DNA, 1881 bp, Artificial Sequence
  derived and/or modified sequence
atgcccctgctgctgctgctgctgctgctgcccagccccctgcaccctcaccctatttgcgaagtgtctaaggtagccagccacttggaagtgaattgtgacaagcggaatctcaccgcactcccacctgatcttcccaaggatactactatcctccacctctctgagaaccttctatacacattctctcttgctactctcatgccatacacacgacttacccagctgaacctggatcgatgcgagctgaccaaactgcaagtcgatggtacgctgccggtcctgggtactctcgacttgtcccataaccagctgcagtcactcccactattaggccaaacactgcccgctctgacagtgcttgacgtaagctttaatcgtctgacctcactgcccctgggtgcccttagaggcttaggtgagttgcaagaactgtaccttaaaggcaacgagctgaagactctgcccccgggactcctcacacccacaccaaaattagaaaaactatcactggctaacaataacctgaccgagctgccagctggactccttaatggcttggagaatctagatacactcctgctccaggagaactccttatatactatccctaagggtttctttggatctcacctgctaccctttgctttcttgcatggtaacccatggctctgtaactgtgagattctttacttcaggagatggctgcaagacaatgctgagaacgtgtatgtgtggaagcagggagttgacgttaaagccatgacgagtaatgtcgcaagcgtgcagtgtgacaacagcgacaagttccccgtttataaatatccagggaaagggtgccctacactgggtgacgagggcgatactgacttatatgattattaccccgaagaagacactgagggggataaggtgagggccactcgcaccgttgtcaaatttccgacaaaagctcacacaaccccatggggcctgttttactcgtggtccactgccagtctggactcccagatgcctagctctctgcatcctactcaagagagcacaaaagaacagacgacctttcctcctagatggactccaaatttcaccctgcacatggagtcgatcaccttttctaagactcccaaatctacaactgaacctaccccaagcccgactacctccgagccggtgcccgagccggcccccaatatgaccacccttgaacctacaccatccccgacaactcctgagcccactagtgagcccgcaccttccccaaccaccccagagcccacacccatccctacaatcgcgaccagccctacaatcctagtcagcgctacatccctgatcactccaaaaagtacattcctcaccactactaagcctgtgagcttgctggaaagtacaaaaaagacaattcccgaactggaccagccccctaagctgcgcggcgtgttgcagggccacctcgaaagctcccggaatgaccccttcctccaccccgatttttgctgtctacttccgctgggcttttacgtactggggttgttctggcttttgttcgcatccgttgtattgattcttctactgtcttgggtcgggcatgtaaagccccaggccctcgacagcggacaaggagcggccctgacgactgcaacccagactactcatttagagctacagcgggggcggcaggtgaccgtgcctcgtgcttggcttctcttccttagaggatcattacccacctttaggagtagcctgttcctatgggtcagacccaacgggcgggtcggtccattagtggcgggcaggcgccctagcgctttgtcgcaggggcggggccaagacctgctgagtactgtgtccattcggtattccggccatagcctatag

SEQ ID NO: 3744 - DNA, 1959 bp, Artificial Sequence
  derived and/or modified sequence
atgccccttctactcctcctgctcctgctgccgagcccactgcatccacatccaatatgtgaagttagtaaggtggccagtcatctagaggttaactgcgataaaaggaaccttactgctctgccccctgacctgccaaaggacacgaccattcttcaccttagcgaaaacttactctacacttttagcttggccacgctcatgccttacacccggctgacccagcttaacctagatagatgcgaactgaccaagctgcaggtcgacggaactctccccgtgctagggactctcgacctgtcacataaccagttgcaaagcttacccctcctggggcagacgctgcccgcattaactgtcttggacgtatcttttaatcgcctgacttcactgccccttggcgcacttcgtgggctcggagagctgcaggagctgtatctgaaagggaatgagctcaagaccctgcctccgggtctgctgactccgacacccaaacttgagaagctgagtctggccaacaacaacctaacagagttacccgctgggctgctcaacgggctcgagaatctcgatactcttctgctccaggagaatagcttatataccattcccaaggggtttttcgggagccacttgctaccatttgcctttctgcacggaaatccatggttgtgcaactgtgagattctgtatttcaggcgttggctccaggataatgccgagaacgtatacgtgtggaagcagggggtggatgtgaaagcaatgacatctaacgtcgcgagtgtccaatgtgataattctgataaattcccagtgtataagtatccgggaaaaggatgtccaaccctgggcgacgaaggcgacaccgacctgtatgactactatcctgaagaggatactgaaggagataaagtgagggccaccagaacagttgtgaagtttcctaccaaagctcatacaacaccctggggcctcttctactcgtggagcacagcgagcctggacagccagatgcctagctcacttcacccgacccaggaaagcactaaggagcagaccactttccccccaagatggactcctaactttactctgcacatggagtccatcactttcagcaaaactcctaaaagtaccacagagcccacaccttcccccaccacatcagagccagtgcctgaaccggctcctaacatgaccacactggaacccaccccctcgccgactacacccgaacctaccagtgaacccgctccatctccgacaacgccggagcccacgagcgagccagcaccatccccaaccactcccgagccaacttccgaacctgccccttccccaacaactcctgagccgacccccattccaactatcgcaactagtccaactattttggtgtcggctactagcctgattacgcctaagagtacttttctgaccacgactaaacccgtcagtctcctcgagtccacgaagaaaaccattcccgaacttgaccaaccaccgaagttacggggtgtcctgcagggtcatttggagtcctccaggaatgatccctttctacatcccgacttctgctgtctgctgccactaggattttatgtgctcggcctgttttggcttctgttcgccagcgtcgtcctgattctcctcctttcttgggtaggacacgttaagccgcaggccctggactcaggccaaggggcagccctcactaccgcaacgcagaccactcacttagagttgcagagaggcagacaggtgacggtccccagggcttggctgctcttccttcgtggctctctaccgacattcaggtcatctttattcctatgggtgagacccaatggccgagtgggaccactcgtagcgggacgtaggccttccgccttgtcccaggggaggggtcaagatctgttgagcacggtgtctatcagatatagcgggcatagcttatag

SEQ ID NO: 3745 - DNA, 1881 bp, Artificial Sequence
  derived and/or modified sequence
atgcccctgctcctcttgctgctgctgctgccctctccattacatccccacccaatctgtgaggtgagcaaggtagctagtcatttggaggtcaactgcgacaaacgcaacctcaccgccctgcccccagatctgcccaaagacacgacgatactccatctgagcgagaacctgctgtatacgttctccctcgccaccctaatgccatatacacggttaacccagctgaacctggatagatgcgagctgaccaaactgcaagtggatggtactctacccgtgttgggcacgcttgatctgagccacaatcagctgcagtctctgccgttgttgggtcagacgttgcctgctctaacagtgctggacgttagctttaatagactcacttctttgcctttgggagctctcaggggcttgggagaattacaagagctttatttgaaggggaacgaacttaagacattgcctcccggactgttgacaccgaccccgaagttagagaaactgtcactggccaacaacaacctgaccgagctgcccgctgggctgctgaacggcctcgagaatctggataccttgttattgcaggaaaacagcctctacacaattccaaaagggtttttcgggtcacatctactcccctttgcctttctccacggcaatccgtggctttgcaactgcgagattctgtattttaggcgttggttgcaggataatgccgaaaacgtgtatgtgtggaagcagggagtggacgttaaggccatgacgtctaacgttgcttccgtgcagtgcgacaattctgacaagtttcctgtctataaataccccggtaaagggtgtccaacactcggtgatgagggcgacaccgatttgtacgactactatcccgaggaggacacagagggagacaaggtcagggcaacaagaaccgtcgttaaattccccaccaaagcacacaccacgccttggggcctcttttatagctggagtacagctagtctggactctcagatgccctcttctctgcatccaacccaggaatcgactaaggaacagactacgttccctcccagatggacaccaaactttactctccacatggaaagcattacctttagcaagacccctaagagcaccactgagccgacgccaagccctactacgtcggaacccgtcccggagccagcccctaatatgactacccttgaaccaaccccctctcctaccacccccgagccgaccagcgaaccagctcccagtcccactacacccgagccgacaccaattcccactattgctacctcaccaacgattcttgtgtctgccaccagcctgattactccaaagtccacctttctgactacgaccaaacctgtctctttactggaatccacaaaaaagaccattcccgagctagaccagcctcccaagcttcgaggagtccttcaaggacatctggagtcttcccggaacgatcccttcctgcatcctgacttctgttgtcttctccctctgggattttatgtgctcgggttgttctggttactgttcgcttcagtcgtgttaatacttttgcttagttgggtgggccacgtcaaaccccaggcccttgactctgggcaaggggctgcgttgacaaccgccactcaaacaacacatcttgagttgcagagaggtcgccaagtgaccgtccccagagcctggctgctcttcctccgcggttcattgcctacatttcgctccagtctgttcctgtgggtcagacctaatggcagagtgggccctctggtcgcaggacgacggccatccgcgctgtcccagggccgtggccaggatctgctgtccacggtgagcattcgttattccggccattctctgtag

SEQ ID NO: 3746 - DNA, 1959 bp, Artificial Sequence
  derived and/or modified sequence
atgcccctgctgctgctgctgctgctgctgcccagccccctgcacccccaccccatctgcgaggtgagcaaggtggccagccacctggaggtgaactgcgacaagagaaacctgaccgccctgccccccgacctgcccaaggacaccaccatcctgcacctgagcgagaacctgctgtacaccttcagcctggccaccctgatgccctacaccagactgacccagctgaacctggacagatgcgagctgaccaagctgcaggtggacggcaccctgcccgtgctgggcaccctggacctgagccacaaccagctgcagagcctgcccctgctgggccagaccctgcccgccctgaccgtgctggacgtgagcttcaacagactgaccagcctgcccctgggcgccctgagaggcctgggcgagctgcaggagctgtacctgaagggcaacgagctgaagaccctgccccccggcctgctgacccccacccccaagctggagaagctgagcctggccaacaacaacctgaccgagctgcccgccggcctgctgaacggcctggagaacctggacaccctgctgctgcaggagaacagcctgtacaccatccccaagggcttcttcggcagccacctgctgcccttcgccttcctgcacggcaacccctggctgtgcaactgcgagatcctgtacttcagaagatggctgcaggacaacgccgagaacgtgtacgtgtggaagcagggcgtggacgtgaaggccatgaccagcaacgtggccagcgtgcagtgcgacaacagcgacaagttccccgtgtacaagtaccccggcaagggctgccccaccctgggcgacgagggcgacaccgacctgtacgactactaccccgaggaggacaccgagggcgacaaggtgagagccaccagaaccgtggtgaagttccccaccaaggcccacaccaccccctggggcctgttctacagctggagcaccgccagcctggacagccagatgcccagcagcctgcaccccacccaggagagcaccaaggagcagaccaccttcccccccagatggacccccaacttcaccctgcacatggagagcatcaccttcagcaagacccccaagagcaccaccgagcccacccccagccccaccaccagcgagcccgtgcccgagcccgcccccaacatgaccaccctggagcccacccccagccccaccacccccgagcccaccagcgagcccgcccccagccccaccacccccgagcccaccagcgagcccgcccccagccccaccacccccgagcccaccagcgagcccgcccccagccccaccacccccgagcccacccccatccccaccatcgccaccagccccaccatcctggtgagcgccaccagcctgatcacccccaagagcaccttcctgaccaccaccaagcccgtgagcctgctggagagcaccaagaagaccatccccgagctggaccagccccccaagctgagaggcgtgctgcagggccacctggagagcagcagaaacgaccccttcctgcaccccgacttctgctgcctgctgcccctgggcttctacgtgctgggcctgttctggctgctgttcgccagcgtggtgctgatcctgctgctgagctgggtgggccacgtgaagccccaggccctggacagcggccagggcgccgccctgaccaccgccacccagaccacccacctggagctgcagagaggcagacaggtgaccgtgcccagagcctggctgctgttcctgagaggcagcctgcccaccttcagaagcagcctgttcctgtgggtgagacccaacggcagagtgggccccctggtggccggcagaagacccagcgccctgagccagggcagaggccaggacctgctgagcaccgtgagcatcagatacagcggccacagcctgtag

SEQ ID NO: 3747 - DNA, 1881 bp, Artificial Sequence
  derived and/or modified sequence
atgcccctgctgctgctgctgctgctgctgcccagccccctgcacccccaccccatctgcgaggtgagcaaggtggccagccacctggaggtgaactgcgacaagagaaacctgaccgccctgccccccgacctgcccaaggacaccaccatcctgcacctgagcgagaacctgctgtacaccttcagcctggccaccctgatgccctacaccagactgacccagctgaacctggacagatgcgagctgaccaagctgcaggtggacggcaccctgcccgtgctgggcaccctggacctgagccacaaccagctgcagagcctgcccctgctgggccagaccctgcccgccctgaccgtgctggacgtgagcttcaacagactgaccagcctgcccctgggcgccctgagaggcctgggcgagctgcaggagctgtacctgaagggcaacgagctgaagaccctgccccccggcctgctgacccccacccccaagctggagaagctgagcctggccaacaacaacctgaccgagctgcccgccggcctgctgaacggcctggagaacctggacaccctgctgctgcaggagaacagcctgtacaccatccccaagggcttcttcggcagccacctgctgcccttcgccttcctgcacggcaacccctggctgtgcaactgcgagatcctgtacttcagaagatggctgcaggacaacgccgagaacgtgtacgtgtggaagcagggcgtggacgtgaaggccatgaccagcaacgtggccagcgtgcagtgcgacaacagcgacaagttccccgtgtacaagtaccccggcaagggctgccccaccctgggcgacgagggcgacaccgacctgtacgactactaccccgaggaggacaccgagggcgacaaggtgagagccaccagaaccgtggtgaagttccccaccaaggcccacaccaccccctggggcctgttctacagctggagcaccgccagcctggacagccagatgcccagcagcctgcaccccacccaggagagcaccaaggagcagaccaccttcccccccagatggacccccaacttcaccctgcacatggagagcatcaccttcagcaagacccccaagagcaccaccgagcccacccccagccccaccaccagcgagcccgtgcccgagcccgcccccaacatgaccaccctggagcccacccccagccccaccacccccgagcccaccagcgagcccgcccccagccccaccacccccgagcccacccccatccccaccatcgccaccagccccaccatcctggtgagcgccaccagcctgatcacccccaagagcaccttcctgaccaccaccaagcccgtgagcctgctggagagcaccaagaagaccatccccgagctggaccagccccccaagctgagaggcgtgctgcagggccacctggagagcagcagaaacgaccccttcctgcaccccgacttctgctgcctgctgcccctgggcttctacgtgctgggcctgttctggctgctgttcgccagcgtggtgctgatcctgctgctgagctgggtgggccacgtgaagccccaggccctggacagcggccagggcgccgccctgaccaccgccacccagaccacccacctggagctgcagagaggcagacaggtgaccgtgcccagagcctggctgctgttcctgagaggcagcctgcccaccttcagaagcagcctgttcctgtgggtgagacccaacggcagagtgggccccctggtggccggcagaagacccagcgccctgagccagggcagaggccaggacctgctgagcaccgtgagcatcagatacagcggccacagcctgtag

SEQ ID NO: 3748 - protein, 177 aa, Artificial Sequence
  derived and/or modified sequence
MPAWGALFLLWATAEATKDCPSPCTCRALETMGLWVDCRGHGLTALPALPARTRHLLLANNSLQSVPPGAFDHLPQLQTLDVTQNPWHCDCSLTYLRLWLEDRTPEALLQVRCASPSLAAHGPLGRLTGYQLGSCGWQLQASWVRPGVLWDVALVAVAALGLALLAGLLCATTEALD

SEQ ID NO: 3749 - DNA, 534 bp, Artificial Sequence
  derived and/or modified sequence
atgcccgcctggggcgcccttttccttctgtgggctaccgctgaggctacgaaggactgccccagcccctgcacgtgccgagcactggagactatggggctgtgggtggactgtagaggccacggtctaaccgctctccctgccctgcctgcgcgcacaagacatctgctcctggccaataatagcctgcagtcggtgcccccaggggcgttcgaccacctccctcagctgcagacacttgacgtcactcagaatccttggcactgcgattgtagcctgacctatctacggctgtggctggaggataggacacccgaagctttgttgcaggtgaggtgtgcctccccgtctctcgcagcacacgggcccctaggtaggctgactggttaccaactgggctcttgcggatggcaactccaggcctcatgggttaggcccggggtgttatgggatgtcgcccttgttgcagttgcggctttgggcctggccttgctcgcagggctcttatgcgctacgactgaagcactggattag

SEQ ID NO: 3750 - DNA, 889 bp, Artificial Sequence
  derived and/or modified sequence
cagctgtatcccatagagttgccacccaggcctcagccaggacctttcaggccagacaggagcacctgaccaaaggcttcacagccgccctcaccgcccggccttctacggtgtccagagacagttagccaggcctgggctgggcacactccaccttccctagtcaccagctggtttcccagaggagaaggctgagacccgagaagggagccagcctgtcccatgcctgcctggggagccctgttcctgctctgggccacagcagaggccaccaaggactgccccagcccatgtacctgccgcgccctggaaaccatggggctgtgggtggactgcaggggccacggactcacggccctgcctgccctgccggcccgcacccgccaccttctgctggccaacaacagccttcagtccgtgcccccgggagcctttgaccacctgccccagctgcagaccctcgatgtgacgcagaacccctggcactgtgactgcagcctcacctatctgcgcctctggctggaggaccgcacgcccgaggccctgctgcaggtccgctgtgccagccccagcctcgctgcccatggcccgctgggccggctgacaggctaccagctgggcagctgtggctggcagctgcaggcgtcctgggtgcgcccgggggtcttgtgggacgtggcgctggtcgccgtggccgcgctgggcctggctcttctggctggcctgctgtgtgccaccacagaggccctggattgagccaggcccccagaacccctggctccaggccagggggccagtccctgaggcaggtccccagactccaccaagcctggtcagcccaaaccaccagaagcccagaataaactggcagctcagctgttttatataa

SEQ ID NO: 3751 - DNA, 534 bp, Artificial Sequence
  derived and/or modified sequence
atgcctgcctggggcgccctcttcctgctgtgggccacagctgaggccaccaaggactgccccagcccctgcacctgccgggccctggagaccatgggcctgtgggtggactgccggggccacggcctgacagccctgcctgccctgcctgcccggaccaggcacctgctgctggccaacaacagcctgcagagcgtgcccccaggggcctttgaccacctgccccagctgcagaccctggatgtgacccagaacccctggcactgtgactgcagcctgacctacctgcggctgtggctggaggacaggaccccagaggccctgctgcaggtgcgctgtgccagccccagcctggccgcccacggccccctgggccgcctgaccggctaccagctgggcagctgtggctggcagctgcaggcctcctgggtgcggcctggggtgctgtgggatgtggccctggtggccgtggccgccctgggcctggccctgctggccggcctgctgtgtgccaccacagaggccctggactag

SEQ ID NO: 3752 - DNA, 534 bp, Artificial Sequence
  derived and/or modified sequence
atgcccgcctggggcgccctgttcctgctgtgggccaccgccgaggccaccaaggattgtccaagcccctgcacctgtcgagctctggaaaccatggggctctgggtagattgcaggggtcatggactgaccgcccttccggccctgcccgcgagaaccaggcacctgctgctggctaataattccctgcagagcgtgccgcctggggcctttgaccatctgcctcagctgcagaccctcgatgtcactcaaaacccctggcactgtgattgctccctgacttatctccgcctctggctcgaggaccgaacccccgaggccctactgcaagtccggtgcgcgtccccgagcctggcggcacatggaccattggggaggttaaccgggtatcagctgggctcctgtggctggcagctccaggcctcctgggtgcggccaggcgtcctatgggatgtggcactcgtggccgtagccgcccttgggctcgccctgttggccggcctcctgtgtgccactactgaggctcttgattag

SEQ ID NO: 3753 - DNA, 534 bp, Artificial Sequence
  derived and/or modified sequence
atgcccgcttggggcgctctgtttctcttgtgggccacggcagaggccacaaaagattgcccaagcccctgtacatgtcgggctctggagaccatggggctttgggtggattgccgagggcacggcttaaccgctctccctgctctaccggcacggacaaggcatctgctcttggcgaataattcattgcagtcagttccccctggtgcttttgatcatttgcctcagctccagaccctggacgtaacacagaacccctggcactgcgattgttctctcacttacctccgcctgtggctcgaggaccgtacaccggaagccttgctgcaggtcagatgtgcctctccatccttggctgctcacggccctctggggagattaactgggtatcagcttgggtcatgtggctggcagctgcaggcttcatgggttaggccaggcgtgctgtgggatgtagccttagtggctgtcgccgctctcggattagccctgctggcagggctgttatgcgcgaccaccgaagcgctggattag

SEQ ID NO: 3754 - DNA, 534 bp, Artificial Sequence
  derived and/or modified sequence
atgcccgcctggggcgccctgttcctgctgtgggccaccgccgaggccaccaaggactgccccagcccctgcacctgcagagccctggagaccatgggcctgtgggtggactgcagaggccacggcctgaccgccctgcccgccctgcccgccagaaccagacacctgctgctggccaacaacagcctgcagagcgtgccccccggcgccttcgaccacctgccccagctgcagaccctggacgtgacccagaacccctggcactgcgactgcagcctgacctacctgagactgtggctggaggacagaacccccgaggccctgctgcaggtgagatgcgccagccccagcctggccgcccacggccccctgggcagactgaccggctaccagctgggcagctgcggctggcagctgcaggccagctgggtgagacccggcgtgctgtgggacgtggccctggtggccgtggccgccctgggcctggccctgctggccggcctgctgtgcgccaccaccgaggccctggactag

SEQ ID NO: 3755 - protein, 731 aa, Artificial Sequence
  derived and/or modified sequence
MVVEHPEFLKAGKEPGLQIWRVEKFDLVPVPTNLYGDFFTGDAYVILKTVQLRNGNLQYDLHYWLGNECSQDESGAAAIFTVQLDDYLNGRAVQHREVQGFESATFLGYFKSGLKYKKGGVASGFKHVVPNEVVVQRLFQVKGRRVVRATEVPVSWESFNNGDCFILDLGNNIHQWCGSNSNRYERLKATQVSKGIRDNERSGRARVHVSEEGTEPEAMLQVLGPKPALPAGTEDTAKEDAANRKLAKLYKVSNGAGTMSVSLVADENPFAQGALKSEDCFILDHGKDGKIFVWKGKQANTEERKAALKTASDFITKMDYPKQTQVSVLPEGGETPLFKQFFKNWRDPDQTDGLGLSYLSSHIANVERVPFDAATLHTSTAMAAQHGMDDDGTGQKQIWRIEGSNKVPVDPATYGQFYGGDSYIILYNYRHGGRQGQIIYNWQGAQSTQDEVAASAILTAQLDEELGGTPVQSRVVQGKEPAHLMSLFGGKPMIIYKGGTSREGGQTAPASTRLFQVRANSAGATRAVEVLPKAGALNSNDAFVLKTPSAAYLWVGTGASEAEKTGAQELLRVLRAQPVQVAEGSEPDGFWEALGGKAAYRTSPRLKDKKMDAHPPRLFACSNKIGRFVIEEVPGELMQEDLATDDVMLLDTWDQVFVWVGKDSQEEEKTEALTSAKRYIETDPANRDRRTPITVVKQGFEPPSFVGWFLGWDDDYWSVDPLDRAMAELAA

SEQ ID NO: 3756 - protein, 782 aa, Artificial Sequence
  derived and/or modified sequence
MAPHRPAPALLCALSLALCALSLPVRAATASRGASQAGAPQGRVPEARPNSMVVEHPEFLKAGKEPGLQIWRVEKFDLVPVPTNLYGDFFTGDAYVILKTVQLRNGNLQYDLHYWLGNECSQDESGAAAIFTVQLDDYLNGRAVQHREVQGFESATFLGYFKSGLKYKKGGVASGFKHVVPNEVVVQRLFQVKGRRVVRATEVPVSWESFNNGDCFILDLGNNIHQWCGSNSNRYERLKATQVSKGIRDNERSGRARVHVSEEGTEPEAMLQVLGPKPALPAGTEDTAKEDAANRKLAKLYKVSNGAGTMSVSLVADENPFAQGALKSEDCFILDHGKDGKIFVWKGKQANTEERKAALKTASDFITKMDYPKQTQVSVLPEGGETPLFKQFFKNWRDPDQTDGLGLSYLSSHIANVERVPFDAATLHTSTAMAAQHGMDDDGTGQKQIWRIEGSNKVPVDPATYGQFYGGDSYIILYNYRHGGRQGQIIYNWQGAQSTQDEVAASAILTAQLDEELGGTPVQSRVVQGKEPAHLMSLFGGKPMIIYKGGTSREGGQTAPASTRLFQVRANSAGATRAVEVLPKAGALNSNDAFVLKTPSAAYLWVGTGASEAEKTGAQELLRVLRAQPVQVAEGSEPDGFWEALGGKAAYRTSPRLKDKKMDAHPPRLFACSNKIGRFVIEEVPGELMQEDLATDDVMLLDTWDQVFVWVGKDSQEEEKTEALTSAKRYIETDPANRDRRTPITVVKQGFEPPSFVGWFLGWDDDYWSVDPLDRAMAELAA

SEQ ID NO: 3757 - protein, 260 aa, Artificial Sequence
  derived and/or modified sequence
MVVEHPEFLKAGKEPGLQIWRVEKFDLVPVPTNLYGDFFTGDAYVILKTVQLRNGNLQYDLHYWLGNECSQDESGAAAIFTVQLDDYLNGRAVQHREVQGFESATFLGYFKSGLKYKKGGVASGFKHVVPNEVVVQRLFQVKGRRVVRATEVPVSWESFNNGDCFILDLGNNIHQWCGSNSNRYERLKATQVSKGIRDNERSGRARVHVSEEGTEPEAMLQVLGPKPALPAGTEDTAKEDAANRKLAKLYKVSNGAGTMS

SEQ ID NO: 3758 - protein, 705 aa, Artificial Sequence
  derived and/or modified sequence
MVVEHPEFLKAGKEPGLQIWRVEKFDLVPVPTNLYGDFFTGDAYVILKTVQLRNGNLQYDLHYWLGNECSQDESGAAAIFTVQLDDYLKYKKGGVASGFKHVVPNEVVVQRLFQVKGRRVVRATEVPVSWESFNNGDCFILDLGNNIHQWCGSNSNRYERLKATQVSKGIRDNERSGRARVHVSEEGTEPEAMLQVLGPKPALPAGTEDTAKEDAANRKLAKLYKVSNGAGTMSVSLVADENPFAQGALKSEDCFILDHGKDGKIFVWKGKQANTEERKAALKTASDFITKMDYPKQTQVSVLPEGGETPLFKQFFKNWRDPDQTDGLGLSYLSSHIANVERVPFDAATLHTSTAMAAQHGMDDDGTGQKQIWRIEGSNKVPVDPATYGQFYGGDSYIILYNYRHGGRQGQIIYNWQGAQSTQDEVAASAILTAQLDEELGGTPVQSRVVQGKEPAHLMSLFGGKPMIIYKGGTSREGGQTAPASTRLFQVRANSAGATRAVEVLPKAGALNSNDAFVLKTPSAAYLWVGTGASEAEKTGAQELLRVLRAQPVQVAEGSEPDGFWEALGGKAAYRTSPRLKDKKMDAHPPRLFACSNKIGRFVIEEVPGELMQEDLATDDVMLLDTWDQVFVWVGKDSQEEEKTEALTSAKRYIETDPANRDRRTPITVVKQGFEPPSFVGWFLGWDDDYWSVDPLDRAMAELAA

SEQ ID NO: 3759 - DNA, 2349 bp, Artificial Sequence
  derived and/or modified sequence
atggctccccataggccagctcctgcgctcctctgcgccctttccctggctctgtgcgccttaagtctgccagtgagagctgccactgcttcacggggggctagccaggccggtgcaccccaaggaagagtgccagaggcccggcccaattctatggtggttgagcatccggagttcctgaaagcggggaaagaacccggcctgcagatttggcgcgtggagaaattcgacctggtccccgttcctacgaatctatacggggacttctttaccggcgacgcatatgtgatcctgaagaccgtccaactgagaaacggtaacctgcaatatgacctgcattactggctgggaaacgaatgctcgcaagacgagagtggcgcggccgcgatatttactgtgcagctggacgactatctgaacggcagagccgtccagcacagagaggtccaaggcttcgagtccgccacctttctcggctacttcaaatccggactgaagtacaaaaaaggcggggttgcaagtggcttcaaacacgtggttcctaatgaagtggttgtgcagagactttttcaagttaaaggacggagggtggtacgcgccactgaggtacccgtgtcctgggaatcttttaacaacggggattgcttcatcctcgatctgggaaacaacattcaccaatggtgtggatccaatagcaatagatatgagcgacttaaggcaacgcaggtttccaaagggattagagataatgagcgcagtgggagagcgcgggtacacgtttccgaagagggcaccgagcctgaagctatgcttcaagttcttggcccaaagcccgcgctgcccgctggcacagaagataccgccaaggaggatgccgccaaccgcaaactggcaaaactgtacaaggtttccaatggagcagggacaatgtcagtgtccctcgtagcagatgaaaatccatttgcccaaggcgcccttaaaagcgaggactgcttcattctggatcacggcaaggatggcaaaatcttcgtgtggaaggggaaacaagctaacactgaggagaggaaagcagccttaaagactgccagtgacttcatcaccaagatggattaccctaaacaaacacaggtctctgtcttgccggagggtggggagacgcccctgttcaagcaattctttaagaattggcgggaccccgaccagaccgatgggctggggttgtcttacttgtccagccacatagctaatgtggaacgtgttccattcgatgctgctacactacacacaagtactgccatggccgcgcagcatgggatggacgacgatggcaccggacagaaacagatctggagaatcgaaggcagtaataaggttcctgtcgaccccgccacgtatgggcagttctatggcggggactcatacataatcctgtataactacaggcacggcggtcggcagggccagataatttacaattggcagggggcccagagcacccaggacgaggttgcagcctcggctattttaactgctcagctcgacgaagagcttggcgggacccccgtacaatctcgagtagttcagggcaaggagccagctcacctgatgagcctttttggcggcaagccgatgatcatttacaagggagggacatctagagagggtgggcagacagctcccgctagcacccgcctgtttcaggttcgcgccaacagcgccggtgcgaccagagcagtagaggtcctgccaaaagcaggggctcttaactccaatgacgctttcgtccttaaaactcccagcgccgcgtatctttgggttggcaccggagcctctgaagccgaaaagaccggagcccaagagctattgcgcgtactgagagctcagccagtgcaagtcgccgaaggcagtgaaccagatggattctgggaggcactaggaggtaaggctgcttatcgtacttctcctcggctgaaagataagaagatggatgcccatcctccccggctattcgcttgtagtaataagattggacggttcgtgattgaggaagtgccaggcgagttaatgcaggaagaccttgccactgatgacgtgatgttgctggacacatgggatcaggtctttgtgtgggtgggcaaagactcccaggaggaggaaaagacagaagcgcttacaagtgctaaaaggtacattgaaacggatcctgccaacagggataggagaacccctatcaccgtggtaaagcaaggtttcgaaccgccttcctttgtgggatggtttctgggctgggacgacgactattggtctgtcgatccgcttgaccgcgccatggctgagttggctgcatag

SEQ ID NO: 3760 - DNA, 2657 bp, Artificial Sequence
  derived and/or modified sequence
gggcggctacttaaggtcggcgacccgaggccgcggctgccgactgggtcccctgccgctgtcgccaccatggctccgcaccgccccgcgcccgcgctgctttgcgcgctgtccctggcgctgtgcgcgctgtcgctgcccgtccgcgcggccactgcgtcgcggggggcgtcccaggcgggggcgccccaggggcgggtgcccgaggcgcggcccaacagcatggtggtggaacaccccgagttcctcaaggcagggaaggagcctggcctgcagatctggcgtgtggagaagttcgatctggtgcccgtgcccaccaacctttatggagacttcttcacgggcgacgcctacgtcatcctgaagacagtgcagctgaggaacggaaatctgcagtatgacctccactactggctgggcaatgagtgcagccaggatgagagcggggcggccgccatctttaccgtgcagctggatgactacctgaacggccgggccgtgcagcaccgtgaggtccagggcttcgagtcggccaccttcctaggctacttcaagtctggcctgaagtacaagaaaggaggtgtggcatcaggattcaagcacgtggtacccaacgaggtggtggtgcagagactcttccaggtcaaagggcggcgtgtggtccgtgccaccgaggtacctgtgtcctgggagagcttcaacaatggcgactgcttcatcctggacctgggcaacaacatccaccagtggtgtggttccaacagcaatcggtatgaaagactgaaggccacacaggtgtccaagggcatccgggacaacgagcggagtggccgggcccgagtgcacgtgtctgaggagggcactgagcccgaggcgatgctccaggtgctgggccccaagccggctctgcctgcaggtaccgaggacaccgccaaggaggatgcggccaaccgcaagctggccaagctctacaaggtctccaatggtgcagggaccatgtccgtctccctcgtggctgatgagaaccccttcgcccagggggccctgaagtcagaggactgcttcatcctggaccacggcaaagatgggaaaatctttgtctggaaaggcaagcaggcaaacacggaggagaggaaggctgccctcaaaacagcctctgacttcatcaccaagatggactaccccaagcagactcaggtctcggtccttcctgagggcggtgagaccccactgttcaagcagttcttcaagaactggcgggacccagaccagacagatggcctgggcttgtcctacctttccagccatatcgccaacgtggagcgggtgcccttcgacgccgccaccctgcacacctccactgccatggccgcccagcacggcatggatgacgatggcacaggccagaaacagatctggagaatcgaaggttccaacaaggtgcccgtggaccctgccacatatggacagttctatggaggcgacagctacatcattctgtacaactaccgccatggtggccgccaggggcagataatctataactggcagggtgcccagtctacccaggatgaggtcgctgcatctgccatcctgactgctcagctggatgaggagctgggaggtacccctgtccagagccgtgtggtccaaggcaaggagcccgcccacctcatgagcctgtttggtgggaagcccatgatcatctacaagggcggcacctcccgcgagggcgggcagacagcccctgccagcacccgcctcttccaggtccgcgccaacagcgctggagccacccgggctgttgaggtattgcctaaggctggtgcactgaactccaacgatgcctttgttctgaaaaccccctcagccgcctacctgtgggtgggtacaggagccagcgaggcagagaagacgggggcccaggagctgctcagggtgctgcgggcccaacctgtgcaggtggcagaaggcagcgagccagatggcttctgggaggccctgggcgggaaggctgcctaccgcacatccccacggctgaaggacaagaagatggatgcccatcctcctcgcctctttgcctgctccaacaagattggacgttttgtgatcgaagaggttcctggtgagctcatgcaggaagacctggcaacggatgacgtcatgcttctggacacctgggaccaggtctttgtctgggttggaaaggattctcaagaagaagaaaagacagaagccttgacttctgctaagcggtacatcgagacggacccagccaatcgggatcggcggacgcccatcaccgtggtgaagcaaggctttgagcctccctcctttgtgggctggttccttggctgggatgatgattactggtctgtggaccccttggacagggccatggctgagctggctgcctgaggaggggcagggcccacccatgtcaccggtcagtgccttttggaactgtccttccctcaaagaggccttagagcgagcagagcagctctgctatgagtgtgtgtgtgtgtgtgtgttgtttcttttttttttttttacagtatccaaaaatagccctgcaaaaattcagagtccttgcaaaattgtctaaaatgtcagtgtttgggaaattaaatccaataaaaacattttgaagtgtg

SEQ ID NO: 3761 - DNA, 2349 bp, Artificial Sequence
  derived and/or modified sequence
atggccccccacaggcctgccccagccctgctgtgtgccctgagcctggccctgtgtgccctgagcctgcctgtgcgggccgccacagccagcagaggagccagccaggccggggccccccagggccgggtgcctgaggcccggcccaacagcatggtggtggagcaccctgagttcctgaaggccggcaaggagcccggcctgcagatctggagggtggagaagtttgacctggtgcctgtgcccaccaacctgtatggagacttcttcaccggagatgcctacgtgatcctgaagacagtgcagctgagaaatggaaacctgcagtatgacctgcactactggctgggcaatgaatgttcccaggatgaaagtggagctgctgccatcttcaccgtgcagctggatgactacctgaatggccgggctgtgcagcaccgggaggtgcagggctttgagagcgccaccttcctgggctacttcaagagcggcctgaagtacaagaagggcggcgtggccagcggcttcaagcacgtggtgcccaatgaggtggtggtgcagaggctcttccaggtgaagggcagaagagtggtgcgggccacagaggtgcctgtgtcctgggagagcttcaacaacggggactgcttcatcctggacctgggcaacaacatccaccagtggtgtggcagcaacagcaacagatatgagcggctgaaggccacccaggtgtccaagggcatccgggacaatgaaagaagtggccgggcccgggtgcacgtgtctgaggagggcacagagcctgaggccatgctgcaggtgctgggccccaagccagccctgcctgctggaacagaggacacagccaaggaggatgctgccaacaggaagctggccaagctgtacaaggtgtccaatggagctggcaccatgtctgtgtccctggtggctgatgagaacccctttgcccagggcgccctgaagtctgaggactgcttcatcctggaccacggcaaggatggcaagatctttgtgtggaagggcaagcaggccaacacagaggagaggaaggccgccctgaagacagccagtgacttcatcaccaagatggactaccccaagcagacccaggtgtctgtgctgcctgagggcggggagacccccctcttcaagcagttcttcaagaactggagggaccctgaccagacagatggcctgggcctgagctacctgagcagccacatcgccaacgtggagcgggtgccctttgatgctgccaccctgcacaccagcacagccatggccgcccagcacggcatggatgatgatggcaccggccagaagcagatctggagaattgagggcagcaacaaggtgcctgtggaccctgccacctacggccagttctatggaggagacagctacatcatcctgtacaactaccgccacggcggccggcagggccagatcatctacaactggcagggcgcccagagcacccaggatgaggtggccgccagcgccatcctgacagcccagctggatgaggagctgggcggcacccctgtgcagagccgggtggtgcagggcaaggagcccgcccacctgatgagcctgtttggaggcaagcccatgatcatctacaagggcggcaccagccgggagggcggccagacagccccagccagcaccaggctcttccaggtgcgggccaacagcgctggggccaccagggctgtggaggtgctgcccaaggccggggccctgaacagcaatgatgcctttgtgctgaagacccccagcgctgcctacctgtgggtgggcaccggggccagcgaggccgagaagacaggagcccaggagctgctgcgggtgctgcgggcccagcctgtgcaggtggccgagggcagcgagccagatggcttctgggaggccctgggcggcaaggccgcctaccgcaccagcccccggctgaaggacaagaagatggatgcccaccccccccggctgtttgcctgcagcaacaagattggccgctttgtgattgaggaggtgcctggagagctgatgcaggaggacctggccacagatgatgtgatgctgctggacacctgggaccaggtgtttgtgtgggtgggcaaggacagccaggaggaggagaagacagaggccctgaccagcgccaagcgctacattgaaacagatcctgccaacagagacaggaggacccccatcaccgtggtgaagcagggctttgagcccccatcctttgtgggctggttcctgggctgggatgatgactactggagcgtggaccccctggaccgggccatggccgagctggccgcctag

SEQ ID NO: 3762 - DNA, 2349 bp, Artificial Sequence
  derived and/or modified sequence
atggccccccaccggcccgcccccgccctgctgtgcgccctgagcctggcactctgtgctttatccctcccagttcgggcagccaccgccagcagaggcgcttcccaggccggcgcccctcaggggcgcgtaccggaggcccggcctaactctatggtggttgagcaccccgagtttctgaaggccggcaaggagccgggcctccagatctggcgggtcgagaagttcgacttggtgccagtccccaccaatctgtacggtgattttttcactggagacgcctatgtgatcctcaaaacagtacagttgaggaacggtaatttgcagtatgatcttcactactggctcggcaacgaatgttcccaggatgagtccggcgctgccgcgatttttacagtccagctggatgactatcttaacggacgcgcagtacagcacagggaggttcagggatttgagtctgctaccttcctgggctattttaagtccggtcttaaatacaagaaaggtggagtcgcctcgggtttcaaacatgtggtccccaatgaggtagtggtgcaaaggctgtttcaggtgaagggccgacgggttgtccgggccacagaggtcccagtgagttgggagagctttaataacggggattgtttcattcttgacctgggaaataatattcaccagtggtgcggctcaaactccaaccgttatgaacggctgaaagccacccaggtgtcgaaaggcattcgagataacgagaggtcaggcagggcccgcgtccacgtcagcgaggaaggcactgaacctgaagccatgctgcaagtcttgggccctaaacccgcgctacctgcaggcactgaggataccgccaaggaagacgcggctaaccgcaaattggccaaactgtacaaagtttctaatggggctggcacgatgagcgtatccttagtggccgatgagaaccccttcgcccagggtgcccttaagtcagaggactgtttcatcttggaccatggaaaagatggcaaaatctttgtatggaaggggaagcaagcgaacactgaagagcgtaaggccgcgcttaaaactgcctcagactttatcactaaaatggactacccaaagcaaacccaggtgtctgttctgcccgagggtggtgagactccacttttcaagcagtttttcaaaaattggcgcgaccctgaccagacagacgggctcgggctttcctacctatcttctcatattgccaacgtggaacgcgtcccctttgatgctgctactctgcacacttcaaccgccatggcagcgcagcacgggatggacgatgacggtacaggtcaaaaacagatctggaggatcgaaggctccaataaggttcctgtcgaccctgccacttatgggcagttctatggtggcgactcctatatcatcctttataattaccggcacgggggtcgccagggccagattatctataactggcagggggcccaatcaactcaggacgaggtcgctgcatcagccattctgactgcccagctcgatgaagaactgggagggactccagtacagtctagggtggtgcagggtaaagaaccagcccacctcatgagtctctttgggggaaaaccgatgatcatctacaagggtggcacttcacgcgagggaggccagacggccccagccagcacacgcctgttccaggtgagagctaattccgctggggcgactagagccgtggaggtactgcccaaggcaggcgccttgaatagcaacgatgcatttgtcttgaagactccatcagctgcctatctctgggtggggacaggcgcatcagaggccgaaaagacaggtgcccaggagctgctacgggtcctccgcgcccagccagttcaggtggcagagggatcagaacccgatgggttttgggaggccctcggtggtaaggccgcttacaggacttccccacgtctgaaagacaaaaagatggatgcgcacccccctaggctgttcgcctgcagcaacaaaattggacgatttgtgattgaggaggtcccaggtgagctgatgcaggaggacctggccaccgatgacgtcatgttattggacacatgggatcaagtctttgtgtgggtggggaaggattcccaagaagaagagaaaactgaggccctaacctctgctaagcgatatatcgagactgatcctgccaatagagataggaggacacctatcactgtcgttaagcaagggttcgaacctccttcctttgttggttggtttctcggctgggacgacgattattggagtgtggaccccttggacagggccatggccgagctggcagcgtag

SEQ ID NO: 3763 - DNA, 2349 bp, Artificial Sequence
  derived and/or modified sequence
atggcacctcacagaccggctccagccctgctgtgtgcactgagcctcgccctatgcgccttatccctgcccgtacgcgctgctaccgcctctcggggtgctagccaggcaggggctccccagggaagggttcccgaagccagaccgaatagtatggtggtggagcacccagaattcttgaaggccggtaaagagcccggactgcagatctggagagtggaaaagtttgacttggtgcccgtcccaaccaacctttatggcgacttctttaccggagacgcctacgtaattctaaaaaccgtgcagttgaggaacgggaacctgcagtatgaccttcattattggttaggcaacgagtgctcacaggatgaaagcggggctgcggctatctttaccgttcagttagacgactatttaaatggcagagcggtacagcatcgcgaggtgcagggcttcgagagcgcaacttttctgggatatttcaagtctggtttgaagtataaaaaaggaggagtagcgtccggattcaagcacgtcgtaccgaacgaagtggtggttcagagattgtttcaggtaaagggaaggcgcgtggttcgagccacagaggtccctgtgagctgggaaagctttaacaacggagactgttttattctggatctcggcaacaatatccaccagtggtgtggcagtaattcaaatcgatatgagagactcaaggccacccaggttagtaaaggtatcagggacaacgaacgctccgggagggccagagtacatgtgtccgaggaaggcacagaacccgaggcaatgctgcaggttctgggtcctaaaccagcattgcccgcaggtaccgaggatactgctaaggaagatgccgcaaataggaagcttgctaagctttacaaagtgtccaatggagcaggtaccatgagtgtcagcctggtggctgatgaaaatcccttcgcccagggggctctgaaatctgaggattgtttcattcttgatcatggcaaggacggaaagatctttgtctggaaggggaagcaggccaacaccgaagagcgcaaagctgcgctcaagacggcatctgacttcatcaccaagatggactatcccaaacagactcaggtatctgtgctccccgagggaggcgaaacgcctttgttcaagcagttcttcaaaaattggagagatcccgatcaaaccgacgggctggggctgtcctacctctcatctcacattgcaaacgtagagagggtaccgttcgatgcggctactctgcacacatccaccgcaatggccgcacagcacgggatggatgacgatggcaccgggcagaaacagatttggaggatcgaaggctccaacaaggtgcctgtggacccagccacctatgggcaattctatggcggtgattcctacataatattatataattacaggcatggcggtcggcaaggccaaattatttacaattggcaaggagctcagtccacacaggacgaagtagccgcaagtgccatcctgacagctcaactagacgaggaattggggggaacccccgtacaaagcagagtagtccagggaaaggaacccgctcaccttatgtccctgtttgggggtaaacccatgatcatctataaaggaggtacttccagagaggggggacagaccgctcctgctagcaccaggctgttccaggtccgggcaaacagtgccggagctacccgcgctgttgaagtcctgcctaaggccggtgccctgaacagcaatgacgcattcgtgctcaagacaccgtcagccgcttacctctgggtaggaaccggtgcctcagaggccgagaaaacaggcgcacaggagctgttacgggtactacgcgctcaacccgtgcaggtggctgaaggatcagaacccgatggtttctgggaggctctcggcggaaaggccgcatataggacctcaccacggttaaaagataagaagatggacgcacaccccccaaggctgttcgcctgctccaataaaatcgggcgatttgtcatcgaggaggtgccgggtgagctgatgcaggaggatttggccactgatgacgttatgctactggatacttgggaccaggtgtttgtgtgggttggtaaggattcccaagaggaagagaaaaccgaggcgctcacctcagccaaacggtatatagagaccgatcccgctaaccgcgatcgccgaacccctatcactgttgttaagcaagggttcgagccgccatcctttgtgggttggtttctgggttgggatgacgattattggagcgtcgaccctctcgatagagccatggccgagctcgcggcttag

SEQ ID NO: 3764 - DNA, 2349 bp, Artificial Sequence
  derived and/or modified sequence
atggccccccaccggccagcaccagctctgctgtgtgccctgtctttagccctgtgtgctttgtccctgccagttagggctgccaccgcaagtcggggcgcctcgcaagccggggctcctcagggtagggtgcccgaggcccggccaaatagcatggtggttgagcaccccgagtttctgaaagccgggaaagagccaggcttacagatctggcgcgttgaaaagtttgacctcgttcccgtccccactaatctttacggcgactttttcaccggggacgcctacgtcattcttaaaactgtacaactgaggaacgggaatctccagtacgaccttcactattggctgggaaacgaatgctcacaggatgagagcggcgccgcggccatcttcaccgtccagctggacgactaccttaatgggagagccgtgcagcacagggaggtgcaaggcttcgaaagtgcaacgttcctcggatacttcaaaagcgggctgaagtacaaaaagggaggggtagcttcagggttcaagcacgtggtgcctaacgaggtggttgtgcagcggttatttcaagtcaagggccgcagggtggtgagagcaacagaagtgcctgtttcttgggaatcgtttaacaacggcgattgctttatccttgatcttggaaacaacatacatcagtggtgtggctctaattcaaaccgatatgaaagacttaaggccacccaggtctcaaagggcatacgtgataacgagagaagcggccgggcacgcgtccacgtttctgaggaaggcacagagcccgaggctatgctgcaagtgcttggtccgaagcccgctctgcctgctggaactgaggataccgctaaagaggacgccgccaaccgaaagctggccaagctttataaagtgtcaaacggagccggaaccatgagcgtgtccctagtggccgacgagaacccatttgctcagggagcactaaagtcggaggattgttttattcttgatcacggaaaggatggtaaaatctttgtctggaagggaaaacaggctaacaccgaggaaagaaaagcggccttgaagaccgcatcagacttcataaccaagatggattatccaaagcagacccaagtgtccgtgctccctgaagggggagaaacaccactcttcaagcagttcttcaaaaactggagagatcctgaccaaacagacgggctgggactttcctatctctccagccatattgcaaacgtggagagagtgccgtttgatgcagccacattgcatacttccacagccatggccgctcagcacgggatggatgatgatggaacagggcagaagcagatctggcgcatcgaaggcagtaataaagtccctgtggatccggcaacctatgggcagttttacgggggtgacagctacatcatcctgtacaattacaggcatggcggaagacaggggcagattatttataactggcaaggcgcacaatcgactcaggatgaggtggccgcaagcgcgatccttactgcccagctggacgaggaactcggcggcacccccgtgcagagtcgtgttgtgcagggaaaagagcccgcccatctgatgagccttttcggcggcaagccaatgatcatttacaaaggaggaacaagccgggagggcggccagaccgctcccgccagcaccagactgttccaggttagagccaatagcgcaggagctacgcgtgctgtcgaggtgttacccaaagcaggagccctcaattctaacgacgccttcgtactgaaaacccccagcgccgcttatctgtgggtcgggacaggcgcttctgaagcagaaaaaaccggggcccaggaactgctgagagtcctgcgggcacagcctgttcaggttgcagaaggatcagagccagacgggttttgggaagcactgggaggaaaagctgcgtacaggacctccccccggcttaaggacaaaaaaatggatgcccatccccctcgactttttgcctgttctaataaaatcggcagatttgtgattgaggaggtgcctggcgaattgatgcaggaggacctggcgaccgacgacgtgatgctcctggacacgtgggatcaagtattcgtttgggtcggtaaggatagtcaagaggaagaaaagaccgaggccctgactagcgcaaaacgttatatcgagaccgacccagccaatcgcgacagacgaacccctataactgtagttaaacaaggctttgaaccgcccagcttcgtcggctggttcctcggatgggatgacgactactggtccgtggaccctctggaccgagctatggccgaactggccgcatag

SEQ ID NO: 3765 - DNA, 2349 bp, Artificial Sequence
  derived and/or modified sequence
atggcaccccacagaccagccccagccctgctgtgcgcactcagcctggccctgtgtgccttgtcactccctgttagagctgcaactgcttctagaggcgcctctcaggccggtgccccccagggccgcgtgccggaggcgagacccaactcaatggtcgtggaacatccagaatttctcaaggctgggaaagaaccagggttacagatttggcgggttgaaaaattcgacttggttccagttccaacaaatctgtacggagacttcttcacaggagatgcttatgtgattttgaaaacagtgcagttgcgaaacgggaacctgcaatacgacctccactattggctgggaaatgaatgctcgcaggatgaatctggcgcggccgcgatttttactgtgcagttagacgactacttgaatggacgcgcggtgcagcatagagaagtgcaaggcttcgaatcggctacatttctcggatacttcaagtctggcctgaaatataagaaaggtggagtggcctcaggatttaaacacgtggtgcctaacgaggtagttgtgcagcgcctgtttcaagtgaaaggaagacgtgtggtcagagctactgaggtgcctgtgtcttgggagagcttcaacaacggagattgttttattctagacctgggaaataatatccatcagtggtgtggtagcaacagtaataggtatgaacgtctcaaggcaactcaagtctccaaaggtatcagggacaacgaacggtccgggcgcgcccgggtacacgtgtccgaagaaggaaccgagcctgaggctatgctccaagtcttaggacccaagcccgccttgccagccggaactgaggacaccgccaaagaagatgccgccaatcgaaaacttgcgaaactgtataaggtgagcaatggagcaggtactatgtctgtgagtctggttgccgacgagaacccgttcgcgcagggcgccctgaagagtgaggattgtttcatactggaccatgggaaggatggaaaaatatttgtttggaaggggaaacaggccaacaccgaggaaaggaaggcggcgctgaagacggcaagtgactttatcactaaaatggattaccccaaacaaactcaggtgagtgtactgcctgaaggaggagagaccccattatttaagcagtttttcaaaaattggagggaccctgaccagaccgatgggctgggtctatcctatttaagttcacacatcgcaaacgttgagagggtgccattcgacgcggccacacttcacacaagtactgccatggcagctcagcacggaatggatgacgacggaaccggtcagaagcaaatctggcgcatagagggatcaaacaaagtacccgtagacccagctacatacggacagttttatggtggagactcgtacataatattatataattacagacatggggggcggcaggggcagatcatatacaattggcagggagctcaatctacacaagatgaagtcgccgcatcggctatacttactgcacaactcgatgaggaactgggtggcacgcctgtgcaatctcgagtggttcagggcaaagaaccagcacatttgatgtctctatttggggggaagccaatgatcatctacaaaggcggaacaagccgggaggggggccagactgcgcctgctagcaccaggctgttccaggttcgagccaactctgcgggagcgactagggccgtggaagtgcttccaaaagcaggcgcactcaatagcaacgacgcgttcgtcctgaagacaccttccgcagcatacctttgggttggcaccggggcaagcgaagccgagaagaccggagcccaggaacttttgcgagtgttgcgagcccagcccgtgcaggtagctgaaggctccgaacctgacggtttctgggaagcgctgggcggtaaggctgcatatagaacttcaccccggttgaaagacaagaagatggacgcacacccccccaggctatttgcttgctctaataaaattggccggtttgtgatcgaggaggtccctggtgaacttatgcaagaagacttggctacagatgatgtgatgctactagacacttgggaccaagttttcgtttgggtaggaaaagattcgcaagaagaggaaaagacagaggccctgaccagtgcaaaacgatatatcgagacagaccccgcgaatagagatagacgcacgccgatcaccgtggttaagcagggctttgaacccccgagtttcgtcggatggtttttggggtgggacgatgactattggtctgtggatcccttagatagagctatggccgagctggctgcatag

SEQ ID NO: 3766 - DNA, 2349 bp, Artificial Sequence
  derived and/or modified sequence
atggccccccacagacccgcccccgccctgctgtgcgccctgagcctggccctgtgcgccctgagcctgcccgtgagagccgccaccgccagcagaggcgccagccaggccggcgccccccagggcagagtgcccgaggccagacccaacagcatggtggtggagcaccccgagttcctgaaggccggcaaggagcccggcctgcagatctggagagtggagaagttcgacctggtgcccgtgcccaccaacctgtacggcgacttcttcaccggcgacgcctacgtgatcctgaagaccgtgcagctgagaaacggcaacctgcagtacgacctgcactactggctgggcaacgagtgcagccaggacgagagcggcgccgccgccatcttcaccgtgcagctggacgactacctgaacggcagagccgtgcagcacagagaggtgcagggcttcgagagcgccaccttcctgggctacttcaagagcggcctgaagtacaagaagggcggcgtggccagcggcttcaagcacgtggtgcccaacgaggtggtggtgcagagactgttccaggtgaagggcagaagagtggtgagagccaccgaggtgcccgtgagctgggagagcttcaacaacggcgactgcttcatcctggacctgggcaacaacatccaccagtggtgcggcagcaacagcaacagatacgagagactgaaggccacccaggtgagcaagggcatcagagacaacgagagaagcggcagagccagagtgcacgtgagcgaggagggcaccgagcccgaggccatgctgcaggtgctgggccccaagcccgccctgcccgccggcaccgaggacaccgccaaggaggacgccgccaacagaaagctggccaagctgtacaaggtgagcaacggcgccggcaccatgagcgtgagcctggtggccgacgagaaccccttcgcccagggcgccctgaagagcgaggactgcttcatcctggaccacggcaaggacggcaagatcttcgtgtggaagggcaagcaggccaacaccgaggagagaaaggccgccctgaagaccgccagcgacttcatcaccaagatggactaccccaagcagacccaggtgagcgtgctgcccgagggcggcgagacccccctgttcaagcagttcttcaagaactggagagaccccgaccagaccgacggcctgggcctgagctacctgagcagccacatcgccaacgtggagagagtgcccttcgacgccgccaccctgcacaccagcaccgccatggccgcccagcacggcatggacgacgacggcaccggccagaagcagatctggagaatcgagggcagcaacaaggtgcccgtggaccccgccacctacggccagttctacggcggcgacagctacatcatcctgtacaactacagacacggcggcagacagggccagatcatctacaactggcagggcgcccagagcacccaggacgaggtggccgccagcgccatcctgaccgcccagctggacgaggagctgggcggcacccccgtgcagagcagagtggtgcagggcaaggagcccgcccacctgatgagcctgttcggcggcaagcccatgatcatctacaagggcggcaccagcagagagggcggccagaccgcccccgccagcaccagactgttccaggtgagagccaacagcgccggcgccaccagagccgtggaggtgctgcccaaggccggcgccctgaacagcaacgacgccttcgtgctgaagacccccagcgccgcctacctgtgggtgggcaccggcgccagcgaggccgagaagaccggcgcccaggagctgctgagagtgctgagagcccagcccgtgcaggtggccgagggcagcgagcccgacggcttctgggaggccctgggcggcaaggccgcctacagaaccagccccagactgaaggacaagaagatggacgcccacccccccagactgttcgcctgcagcaacaagatcggcagattcgtgatcgaggaggtgcccggcgagctgatgcaggaggacctggccaccgacgacgtgatgctgctggacacctgggaccaggtgttcgtgtgggtgggcaaggacagccaggaggaggagaagaccgaggccctgaccagcgccaagagatacatcgagaccgaccccgccaacagagacagaagaacccccatcaccgtggtgaagcagggcttcgagccccccagcttcgtgggctggttcctgggctgggacgacgactactggagcgtggaccccctggacagagccatggccgagctggccgcctag

SEQ ID NO: 3767 - protein, 1360 aa, Artificial Sequence
  derived and/or modified sequence
MSRQSTLYSFFPKSPALSDANKASARASREGGRAAAAPGASPSPGGDAAWSEAGPGPRPLARSASPPKAKNLNGGLRRSVAPAAPTSCDFSPGDLVWAKMEGYPWWPCLVYNHPFDGTFIREKGKSVRVHVQFFDDSPTRGWVSKRLLKPYTGSKSKEAQKGGHFYSAKPEILRAMQRADEALNKDKIKRLELAVCDEPSEPEEEEEMEVGTTYVTDKSEEDNEIESEEEVQPKTQGSRRSSRQIKKRRVISDSESDIGGSDVEFKPDTKEEGSSDEISSGVGDSESEGLNSPVKVARKRKRMVTGNGSLKRKSSRKETPSATKQATSISSETKNTLRAFSAPQNSESQAHVSGGGDDSSRPTVWYHETLEWLKEEKRRDEHRRRPDHPDFDASTLYVPEDFLNSCTPGMRKWWQIKSQNFDLVICYKVGKFYELYHMDALIGVSELGLVFMKGNWAHSGFPEIAFGRYSDSLVQKGYKVARVEQTETPEMMEARCRKMAHISKYDRVVRREICRIITKGTQTYSVLEGDPSENYSKYLLSLKEKEEDSSGHTRAYGVCFVDTSLGKFFIGQFSDDRHCSRFRTLVAHYPPVQVLFEKGNLSKETKTILKSSLSCSLQEGLIPGSQFWDASKTLRTLLEEEYFREKLSDGIGVMLPQVLKGMTSESDSIGLTPGEKSELALSALGGCVFYLKKCLIDQELLSMANFEEYIPLDSDTVSTTRSGAIFTKAYQRMVLDAVTLNNLEIFLNGTNGSTEGTLLERVDTCHTPFGKRLLKQWLCAPLCNHYAINDRLDAIEDLMVVPDKISEVVELLKKLPDLERLLSKIHNVGSPLKSQNHPDSRAIMYEETTYSKKKIIDFLSALEGFKVMCKIIGIMEEVADGFKSKILKQVISLQTKNPEGRFPDLTVELNRWDTAFDHEKARKTGLITPKAGFDSDYDQALADIRENEQSLLEYLEKQRNRIGCRTIVYWGIGRNRYQLEIPENFTTRNLPEEYELKSTKKGCKRYWTKTIEKKLANLINAEERRDVSLKDCMRRLFYNFDKNYKDWQSAVECIAVLDVLLCLANYSRGGDGPMCRPVILLPEDTPPFLELKGSRHPCITKTFFGDDFIPNDILIGCEEEEQENGKAYCVLVTGPNMGGKSTLMRQAGLLAVMAQMGCYVPAEVCRLTPIDRVFTRLGASDRIMSGESTFFVELSETASILMHATAHSLVLVDELGRGTATFDGTAIANAVVKELAETIKCRTLFSTHYHSLVEDYSQNVAVRLGHMACMVENECEDPSQETITFLYKFIKGACPKSYGFNAARLANLPEEVIQKGHRKAREFEKMNQSLRLFREVCLASERSTVDAEAVHKLLTLIKEL

SEQ ID NO: 3768 - protein, 252 aa, Artificial Sequence
  derived and/or modified sequence
MSRQSTLYSFFPKSPALSDANKASARASREGGRAAAAPGASPSPGGDAAWSEAGPGPRPLARSASPPKAKNLNGGLRRSVAPAAPTSCDFSPGDLVWAKMEGYPWWPCLVYNHPFDGTFIREKGKSVRVHVQFFDDSPTRGWVSKRLLKPYTGSKSKEAQKGGHFYSAKPEILRAMQRADEALNKDKIKRLELAVCDEPSEPEEEEEMEVGTTYVTDKSEEDNEIESEEEVQPKTQGSRRSSRQIKKRRKKR

SEQ ID NO: 3769 - protein, 1066 aa, Artificial Sequence
  derived and/or modified sequence
MSRQSTLYSFFPKSPALSDANKASARASREGGRAACPRGLSFPRRGCGLERGWAWRPLARSASPPKAKNLNGGLRRSVAPAAPTSCDFSPGDLVWAKMEGYPWWPCLVYNHPFDGTFIREKGKSVRVHVQFFDDSPTRGWVSKRLLKPYTGSKSKEAQKGGHFYSAKPEILRAMQRADEALNKDKIKRLELAVCDEPSEPEEEEEMEVGTTYVTDKSEEDNEIESEEEVQPKTQGSRRSSRQIKKRRVISDSESDIGGSDVEFKPDTKEEGSSDEISSGVGDSESEGLNSPVKVARKRKRMVTGNGSLKRKSSRKETPSATKQATSISSETKNTLRAFSAPQNSESQAHVSGGGDDSSRPTVWYHETLEWLKEEKRRDEHRRRPDHPDFDASTLYVPEDFLNSCTPGMRKWWQIKSQNFDLVICYKVGKFYELYHMDALIGVSELGLVFMKGNWAHSGFPEIAFGRYSDSLVQKGYKVARVEQTETPEMMEARCRKMAHISKYDRVVRREICRIITKGTQTYSVLEGDPSENYSKYLLSLKEKEEDSSGHTRAYGVCFVDTSLGKFFIGQFSDDRHCSRFRTLVAHYPPVQVLFEKGNLSKETKTILKSSLSCSLQEGLIPGSQFWDASKTLRTLLEEEYFREKLSDGIGVMLPQVLKGMTSESDSIGLTPGEKSELALSALGGCVFYLKKCLIDQELLSMANFEEYIPLDSDTVSTTRSGAIFTKAYQRMVLDAVTLNNLEIFLNGTNGSTEGTLLERVDTCHTPFGKRLLKQWLCAPLCNHYAINDRLDAIEDLMVVPDKISEVVELLKKLPDLERLLSKIHNVGSPLKSQNHPDSRAIMYEETTYSKKKIIDFLSALEGFKVMCKIIGIMEEVADGFKSKILKQVISLQTKNPEGRFPDLTVELNRWDTAFDHEKARKTGLITPKAGFDSDYDQALADIRENEQSLLEYLEKQRNRIGCRTIVYWGIGRNRYQLEIPENFTTRNLPEEYELKSTKKGCKRYWTKTIEKKLANLINAEERRDVSLKDCMRRLFYNFDKNYKDWQSAVECIAVLGKTLNKLVLRL

SEQ ID NO: 3770 - DNA, 759 bp, Artificial Sequence
  derived and/or modified sequence
atgagcagacagagcaccctgtacagcttcttccccaagagccccgccctgagcgacgccaacaaggccagcgccagagccagcagagagggcggcagagccgccgccgcccccggcgccagccccagccccggcggcgacgccgcctggagcgaggccggccccggccccagacccctggccagaagcgccagcccccccaaggccaagaacctgaacggcggcctgagaagaagcgtggcccccgccgcccccaccagctgcgacttcagccccggcgacctggtgtgggccaagatggagggctacccctggtggccctgcctggtgtacaaccaccccttcgacggcaccttcatcagagagaagggcaagagcgtgagagtgcacgtgcagttcttcgacgacagccccaccagaggctgggtgagcaagagactgctgaagccctacaccggcagcaagagcaaggaggcccagaagggcggccacttctacagcgccaagcccgagatcctgagagccatgcagagagccgacgaggccctgaacaaggacaagatcaagagactggagctggccgtgtgcgacgagcccagcgagcccgaggaggaggaggagatggaggtgggcaccacctacgtgaccgacaagagcgaggaggacaacgagatcgagagcgaggaggaggtgcagcccaagacccagggcagcagaagaagcagcagacagatcaagaagagaagaaagaagagatag

SEQ ID NO: 3771 - DNA, 3201 bp, Artificial Sequence
  derived and/or modified sequence
atgagcagacagagcaccctgtacagcttcttccccaagagccccgccctgagcgacgccaacaaggccagcgccagagccagcagagagggcggcagagccgcctgccccagaggcctgagcttccccagaagaggctgcggcctggagagaggctgggcctggagacccctggccagaagcgccagcccccccaaggccaagaacctgaacggcggcctgagaagaagcgtggcccccgccgcccccaccagctgcgacttcagccccggcgacctggtgtgggccaagatggagggctacccctggtggccctgcctggtgtacaaccaccccttcgacggcaccttcatcagagagaagggcaagagcgtgagagtgcacgtgcagttcttcgacgacagccccaccagaggctgggtgagcaagagactgctgaagccctacaccggcagcaagagcaaggaggcccagaagggcggccacttctacagcgccaagcccgagatcctgagagccatgcagagagccgacgaggccctgaacaaggacaagatcaagagactggagctggccgtgtgcgacgagcccagcgagcccgaggaggaggaggagatggaggtgggcaccacctacgtgaccgacaagagcgaggaggacaacgagatcgagagcgaggaggaggtgcagcccaagacccagggcagcagaagaagcagcagacagatcaagaagagaagagtgatcagcgacagcgagagcgacatcggcggcagcgacgtggagttcaagcccgacaccaaggaggagggcagcagcgacgagatcagcagcggcgtgggcgacagcgagagcgagggcctgaacagccccgtgaaggtggccagaaagagaaagagaatggtgaccggcaacggcagcctgaagagaaagagcagcagaaaggagacccccagcgccaccaagcaggccaccagcatcagcagcgagaccaagaacaccctgagagccttcagcgccccccagaacagcgagagccaggcccacgtgagcggcggcggcgacgacagcagcagacccaccgtgtggtaccacgagaccctggagtggctgaaggaggagaagagaagagacgagcacagaagaagacccgaccaccccgacttcgacgccagcaccctgtacgtgcccgaggacttcctgaacagctgcacccccggcatgagaaagtggtggcagatcaagagccagaacttcgacctggtgatctgctacaaggtgggcaagttctacgagctgtaccacatggacgccctgatcggcgtgagcgagctgggcctggtgttcatgaagggcaactgggcccacagcggcttccccgagatcgccttcggcagatacagcgacagcctggtgcagaagggctacaaggtggccagagtggagcagaccgagacccccgagatgatggaggccagatgcagaaagatggcccacatcagcaagtacgacagagtggtgagaagagagatctgcagaatcatcaccaagggcacccagacctacagcgtgctggagggcgaccccagcgagaactacagcaagtacctgctgagcctgaaggagaaggaggaggacagcagcggccacaccagagcctacggcgtgtgcttcgtggacaccagcctgggcaagttcttcatcggccagttcagcgacgacagacactgcagcagattcagaaccctggtggcccactacccccccgtgcaggtgctgttcgagaagggcaacctgagcaaggagaccaagaccatcctgaagagcagcctgagctgcagcctgcaggagggcctgatccccggcagccagttctgggacgccagcaagaccctgagaaccctgctggaggaggagtacttcagagagaagctgagcgacggcatcggcgtgatgctgccccaggtgctgaagggcatgaccagcgagagcgacagcatcggcctgacccccggcgagaagagcgagctggccctgagcgccctgggcggctgcgtgttctacctgaagaagtgcctgatcgaccaggagctgctgagcatggccaacttcgaggagtacatccccctggacagcgacaccgtgagcaccaccagaagcggcgccatcttcaccaaggcctaccagagaatggtgctggacgccgtgaccctgaacaacctggagatcttcctgaacggcaccaacggcagcaccgagggcaccctgctggagagagtggacacctgccacacccccttcggcaagagactgctgaagcagtggctgtgcgcccccctgtgcaaccactacgccatcaacgacagactggacgccatcgaggacctgatggtggtgcccgacaagatcagcgaggtggtggagctgctgaagaagctgcccgacctggagagactgctgagcaagatccacaacgtgggcagccccctgaagagccagaaccaccccgacagcagagccatcatgtacgaggagaccacctacagcaagaagaagatcatcgacttcctgagcgccctggagggcttcaaggtgatgtgcaagatcatcggcatcatggaggaggtggccgacggcttcaagagcaagatcctgaagcaggtgatcagcctgcagaccaagaaccccgagggcagattccccgacctgaccgtggagctgaacagatgggacaccgccttcgaccacgagaaggccagaaagaccggcctgatcacccccaaggccggcttcgacagcgactacgaccaggccctggccgacatcagagagaacgagcagagcctgctggagtacctggagaagcagagaaacagaatcggctgcagaaccatcgtgtactggggcatcggcagaaacagataccagctggagatccccgagaacttcaccaccagaaacctgcccgaggagtacgagctgaagagcaccaagaagggctgcaagagatactggaccaagaccatcgagaagaagctggccaacctgatcaacgccgaggagagaagagacgtgagcctgaaggactgcatgagaagactgttctacaacttcgacaagaactacaaggactggcagagcgccgtggagtgcatcgccgtgctgggcaagaccctgaacaagctggtgctgagactgtag

SEQ ID NO: 3772 - DNA, 759 bp, Artificial Sequence
  derived and/or modified sequence
atgtcacgtcaaagcactctctatagtttcttcccaaaatcccccgctctgtctgacgcaaacaaagctagtgccagggcctcccgggaaggcggaagggcagccgccgcccccggggcatctccctcgcccggaggcgatgccgcctggtccgaggctggtcccggtcccagacctttagctcgctctgcctctcctccaaaggccaagaacttgaacggaggactgagacggagtgtagcgcctgctgccccaacgtcctgcgactttagtccaggcgatctggtgtgggcaaagatggaaggctacccttggtggccctgcttggtgtacaaccatccattcgatggtacttttatcagagagaagggaaagagtgtgagagttcatgtccagttttttgatgactctcccacacggggatgggtctccaaacgcctactcaaaccctatacaggaagcaagtcaaaggaggcgcaaaaaggcggccacttttattcagccaaaccagaaatcctgagagccatgcagcgggccgatgaagctctgaacaaagataaaataaaaagactagaactggcagtctgcgacgaaccaagcgagccggaggaggaggaggaaatggaggtcggaacaacttacgtcaccgacaaatcagaagaggataacgaaatcgagagcgaagaggaggtgcaaccgaaaacccaaggcagtcggagatcaagccggcagatcaagaagaggagaaaaaagcggtag

SEQ ID NO: 3773 - DNA, 3201 bp, Artificial Sequence
  derived and/or modified sequence
atgagtcggcagagtaccctctactcttttttccctaagtccccagcactgagcgacgctaataaagcctctgcacgagcgtctcgggaaggaggacgtgcagcctgtccaagagggttatctttcccaagaagaggctgcggcctggaacgaggctgggcctggaggcctctggctagatcagcgtcaccccctaaggccaagaacctgaatggagggctgagacggtctgtggctccagccgctccaacttcatgtgacttttccccaggagatctggtctgggccaagatggagggctacccttggtggccttgcctggtgtataatcatccttttgatggcaccttcatcagggaaaagggtaaatccgtgagggttcatgtgcagtttttcgatgacagcccaacacgcggctgggtgtctaaaagactcttgaaaccatacacaggatcgaagagtaaggaagctcaaaaaggcggccacttttacagtgccaaaccggagatactcagagctatgcagcgggcggacgaagcccttaacaaggacaaaatcaaacgtcttgagctcgccgtctgcgacgagccttccgagccagaggaggaggaggagatggaagttggaaccacttacgtgaccgataagagtgaggaggacaatgagattgagtccgaggaagaggtgcagccgaaaacgcagggtagtcggagatccagtcggcaaatcaaaaaaaggagagtgatttccgattcagaaagtgacatagggggcagcgacgtcgaattcaagcctgatacgaaagaagagggatcatccgacgaaatcagcagtggggttggcgatagtgaaagtgagggtctgaattcacctgtgaaagtggctcgaaagaggaagcggatggtgacagggaatgggtcgcttaaacggaaaagtagcaggaaagagacaccaagtgccactaaacaggcgacctctatatcctcagaaactaaaaacactctgagagcattttcagctcctcagaattccgaaagccaagcccatgtgtctggcgggggcgatgactcctctcgcccaactgtgtggtaccacgaaacactggaatggctcaaggaagagaagagacgcgacgagcaccgccgaagaccagaccaccccgactttgacgccagtaccctctacgtgccagaggatttcttgaattcctgcacccccgggatgcggaagtggtggcaaatcaaaagccagaacttcgaccttgtcatctgctacaaagtgggaaaattctatgagttgtatcatatggacgcattgattggggtttccgaattaggccttgtgtttatgaaaggcaactgggcccatagcggctttcctgagattgcatttggacgctactctgattccctggtccagaaagggtataaggttgctcgggtcgagcagacagagacacctgagatgatggaagcccgctgtcgaaaaatggcccacatatccaagtacgacagagtggtgcgacgggagatatgcaggatcatcacaaagggtacacagacttactctgttttggagggggatccatccgaaaactactctaagtaccttctgagccttaaggaaaaggaagaggactcttcagggcatacccgcgcctacggcgtgtgcttcgtggacacaagccttgggaagttcttcatcggacagtttagcgatgacaggcattgctccagattccggaccctggttgcacactacccgccagtgcaagtgctctttgagaagggaaatttgtccaaggaaaccaaaaccatcctcaagtcctctttatcatgctccttgcaggaaggccttatacctgggtctcagttttgggacgcatctaaaaccctgcggacactgctggaggaggagtacttccgcgagaagctgtccgacggaatcggggtgatgcttccacaagtcctcaaaggcatgaccagcgagagtgatagcatcggcctgacccccggtgagaagtctgaactagccttgtctgccctgggaggctgcgtgttctacctcaagaagtgtttgatcgaccaagagctactgagtatggccaactttgaagaatatatacccctcgatagcgacacggtgagtaccacccggagcggtgccatctttacaaaagcctaccagagaatggtcttggatgcagtcaccctgaacaacttggaaattttcttgaatgggacaaatggctctaccgaaggcaccctcctagaacgagtggatacctgtcatacaccctttggcaagcggctcctgaagcagtggttgtgcgcaccgctttgcaaccactacgccatcaatgaccgtctagacgccatcgaggaccttatggtagtgcctgataagatttctgaagtggttgagctcctcaagaagctccctgatctggagcgcctgctttctaagatccacaacgtaggcagtccgctaaaatcccagaatcacccagactcccgtgctataatgtatgaagagaccacctacagtaagaagaaaataattgatttcttaagcgccttggaggggtttaaggttatgtgcaagataataggaatcatggaagaagtcgcagatggtttcaagtccaagattctaaagcaggttatctctctgcagacgaaaaacccagagggcagattccccgatttaacagttgagctgaatcgctgggacactgcgttcgatcatgagaaggccagaaagacaggactgatcacacctaaagccggtttcgactccgattacgatcaggctcttgcagacatacgagagaatgaacagtctctgctggagtacctggagaaacagcgcaacaggattggctgtcgaacgatcgtgtactggggaatcgggcggaacagatatcagttggagatccctgagaactttactacacgaaacctccctgaagaatacgagttgaaaagcacaaagaagggttgtaaaaggtattggaccaaaaccattgaaaagaaactggctaatctgattaacgctgaggaaaggcgcgatgtctctctcaaggactgcatgcgccgcttgttctacaactttgacaagaattacaaagactggcagtccgctgtcgaatgcattgcagtgcttggaaaaacactgaataaattagtgcttcggttgtag

SEQ ID NO: 3774 - DNA, 759 bp, Artificial Sequence
  derived and/or modified sequence
atgagccggcagagcaccctgtacagcttcttccccaagagccctgccctgagtgatgccaacaaggccagcgcccgggccagccgggagggcggccgggctgctgctgcccctggggccagccccagccctggaggagatgctgcctggagcgaggccggccctggcccccggcccctggcccggagcgccagcccccccaaggccaagaacctgaatggaggcctgcggcgctctgtggccccagctgcccccaccagctgtgacttcagccctggggacctggtgtgggccaagatggagggctacccctggtggccctgcctggtgtacaaccacccctttgatggcaccttcatccgggagaagggcaagtctgtgcgggtgcacgtgcagttctttgatgacagccccacccggggctgggtgtccaagaggctgctgaagccctacacaggcagcaagagcaaggaggcccagaagggcggccacttctacagcgccaagccagagatcctgcgggccatgcagagagcagatgaggccctgaacaaggacaagatcaagaggctggagctggccgtgtgtgatgagcccagcgagcctgaggaggaggaggagatggaggtgggcaccacctacgtgacagacaagtcagaagaagataatgaaattgaaagtgaggaggaggtgcagcccaagacccagggcagcagaagaagcagccggcagatcaagaagaggaggaagaagaggtag

SEQ ID NO: 3775 - DNA, 3201 bp, Artificial Sequence
  derived and/or modified sequence
atgagccggcagagcaccctgtacagcttcttccccaagagccctgccctgagtgatgccaacaaggccagcgcccgggccagccgggagggcggccgggccgcctgcccccggggcctgtccttcccccggcggggctgcggcctggagcggggctgggcctggaggcccctggcccggagcgccagcccccccaaggccaagaacctgaatggaggcctgcggcgctctgtggccccagctgcccccaccagctgtgacttcagccctggggacctggtgtgggccaagatggagggctacccctggtggccctgcctggtgtacaaccacccctttgatggcaccttcatccgggagaagggcaagtctgtgcgggtgcacgtgcagttctttgatgacagccccacccggggctgggtgtccaagaggctgctgaagccctacacaggcagcaagagcaaggaggcccagaagggcggccacttctacagcgccaagccagagatcctgcgggccatgcagagagcagatgaggccctgaacaaggacaagatcaagaggctggagctggccgtgtgtgatgagcccagcgagcctgaggaggaggaggagatggaggtgggcaccacctacgtgacagacaagtcagaagaagataatgaaattgaaagtgaggaggaggtgcagcccaagacccagggcagcagaagaagcagccggcagatcaagaagagaagagtcatcagtgacagcgagagtgacatcggcggcagtgatgtggagttcaagccagacaccaaggaggagggcagcagtgatgagatcagcagcggcgtgggggacagcgagagcgagggcctgaacagccctgtgaaggtggccaggaagaggaagaggatggtgactggaaatggcagcctgaagaggaagagcagcaggaaggagaccccatctgccaccaagcaggccaccagcatcagcagcgagaccaagaacaccctgcgggccttcagcgccccccagaacagcgagagccaggcccacgtgtctggaggaggagatgacagcagccggcccaccgtgtggtaccacgagaccctggagtggctgaaggaggagaagagaagagatgagcacagaagaagaccagaccacccagactttgatgccagcaccctgtatgtgcctgaggacttcctgaacagctgcaccccaggcatgaggaagtggtggcagatcaagagccagaactttgacctggtgatctgctacaaggtgggcaagttctatgagctgtaccacatggatgccctgattggagtgtctgagctgggcctggtgttcatgaagggcaactgggcccacagcggcttccctgagatcgccttcggccgctacagcgacagcctggtgcagaagggctacaaggtggcccgggtggagcagacagagaccccagagatgatggaggcccgctgcaggaagatggcccacatcagcaaatatgacagagtggtgcggcgggagatctgccgcatcatcaccaagggcacccagacctacagcgtgctggagggggaccccagcgagaactacagcaagtacctgctgagcctgaaggagaaggaggaggacagcagcggccacacccgggcctacggcgtgtgctttgtggacaccagcctgggcaagttcttcatcggccagttcagtgatgacagacactgcagccgcttccgcaccctggtggcccactacccacctgtgcaggtgctgtttgagaagggcaacctgagcaaggagaccaagaccatcctgaagagcagcctgagctgcagcctgcaggagggcctcatccctggcagccagttctgggatgccagcaagaccctgcggaccctgctggaggaggagtacttccgggagaagctgagtgatggcattggagtgatgctgccccaggtgctgaagggcatgaccagcgagagtgacagcatcggcctgaccccaggagagaagtctgagctggccctgagcgccctgggcggctgtgtgttctacctgaagaagtgcctgattgaccaggagctgctgtccatggccaactttgaggagtacatccccctggacagcgacacagtgtccaccaccaggtctggggccatcttcaccaaggcctaccagaggatggtgctggatgctgtgaccctgaacaacctggagatcttcctgaatggcaccaacggcagcacagagggcaccctgctggagcgggtggacacctgccacaccccatttgggaagaggctgctgaagcagtggctgtgtgcccccctgtgcaaccactacgccatcaatgaccggctggatgccatcgaggacctgatggtggtgcctgacaagatcagcgaggtggtggagctgctgaagaagctgcctgacctggagcggctgctgagcaagatccacaacgtgggcagccccctgaagagccagaaccacccagacagccgggccatcatgtatgaggagaccacctacagcaagaagaagatcatcgacttcctgagcgccctggagggcttcaaggtgatgtgcaagatcatcggcatcatggaggaggtggctgatggcttcaagagcaagatcctgaagcaggtgatcagcctgcagaccaagaaccctgagggccgcttcccagacctgactgtggagctgaaccgctgggacacagcctttgaccacgagaaggccaggaagacaggcctcatcacccccaaggccggctttgacagcgactatgaccaggccctggccgacatccgggagaatgagcagagcctgctggagtacctggagaagcagaggaaccgcatcggctgcaggaccatcgtgtactggggcatcggcaggaaccgctaccagctggagatccctgagaacttcaccaccaggaacctgcctgaggagtatgagctgaagagcaccaagaagggctgcaagcgctactggaccaagaccatcgagaagaagctggccaacctgatcaatgctgaggagaggagagatgtgtccctgaaggactgcatgaggaggctcttctacaactttgacaagaactacaaggactggcagagcgctgtggagtgcatcgctgtgctgggcaagaccctgaacaagctggtgctgcggctgtag

SEQ ID NO: 3776 - DNA, 759 bp, Artificial Sequence
  derived and/or modified sequence
atgagccggcagagcaccctgtacagcttcttccccaagagccccgccttatctgatgccaataaggcctctgccagagcatcacgagaaggtggtagggccgcagcagcacctggggcctctccttctcctggaggagatgccgcctggtccgaggccggacctggacctcgtccactggctagaagcgcgagcccacccaaagcgaaaaacctaaacggaggtcttcgtcgctccgtcgcccccgccgcgcccacatcctgcgatttttcccccggcgacctggtgtgggctaagatggaaggttacccatggtggccctgcctggtgtacaaccatccatttgacggtactttcattcgggagaaaggaaagagtgttagagtccatgtacagttcttcgatgacagcccaactaggggctgggttagtaagcgcctattaaagccctatactggcagcaagagcaaagaggctcagaaaggtgggcacttctattccgcgaaaccggagatcctgagagctatgcaacgggccgatgaggcattgaataaggataagattaaacgcctggagctggccgtttgcgatgaacccagcgagcccgaggaggaagaggaaatggaggtgggtacaacctacgtgaccgacaagagcgaggaggataatgagatagagtccgaagaggaggttcagcctaagacccagggatctcgcagatcttctcgccagataaagaagcggcgaaagaaaagatag

SEQ ID NO: 3777 - DNA, 3201 bp, Artificial Sequence
  derived and/or modified sequence
atgagccggcagagcaccctgtacagcttcttccccaagagccccgcgttgtctgacgctaataaggcctctgcaagagctagccgagaaggcgggagggccgcttgccctagaggtctgagcttcccaaggagaggatgcgggcttgagagaggctgggcgtggaggccactcgcaaggtcagccagccctcccaaagccaagaacctgaatggggggctccgaagatctgtggcccctgccgcaccaactagttgtgacttctcccctggggatcttgtctgggctaaaatggaaggatacccctggtggccctgccttgtgtataatcaccccttcgatggtacattcattagggaaaagggtaagagcgtgagggtccacgttcaattcttcgatgactccccaacacgtggctgggtatcgaaaaggttgctcaaaccgtacacgggatccaagtcaaaggaggctcagaagggcggccatttttacagcgctaagccagagatactgagagcaatgcagcgggccgatgaagctttaaataaggataagattaaaaggttggaactggcagtatgtgacgaaccgagcgaacccgaggaagaggaggaaatggaggtgggtacaacttacgtaaccgacaaaagtgaagaagacaatgaaatcgaaagcgaggaggaggttcagccaaaaacgcagggcagccgccgaagctctcggcagatcaagaagagaagagttattagcgattccgagagtgacattggtggctccgacgtggaattcaagcctgataccaaagaagagggaagcagcgacgagatttcttcaggagtgggtgactccgaaagcgaagggttgaatagccccgtcaaagtggccagaaagagaaaacgtatggtgacaggaaacgggtctttgaagcggaagtccagcagaaaggagactccctctgccacaaagcaggccacatccataagttccgaaactaaaaacaccctgagagccttttcagctccccagaactctgaatcacaggcccatgtctctggcggcggcgatgattcttcccgccctaccgtatggtatcacgagaccttagagtggctcaaagaggaaaaaagaagagacgagcatcggcgccggccagaccacccagactttgatgcatccacactgtatgtacctgaggacttcctaaactcatgcacaccggggatgcgaaagtggtggcagataaagtcccagaattttgacctggtgatctgctacaaagtgggaaagttttacgagctgtaccacatggacgctctgatcggcgtaagcgaacttggactggtttttatgaaaggcaactgggcgcatagcgggtttccagagatcgcgttcggcaggtattcagatagccttgttcagaaaggttataaagtagctcgagtcgaacagacggaaactcccgaaatgatggaagcgcggtgtcgcaaaatggctcacatctccaaatacgatcgggtcgtgcggcgcgagatctgccggattattactaagggcacccagacttacagtgttctggaaggggacccctccgaaaattacagcaagtacctgctgagcctgaaagagaaggaggaggacagcagtggtcacacgagggcttacggggtctgctttgttgacacatcacttggcaagttcttcattgggcaattctcagacgacagacattgctctagattcagaaccctagtcgcacactatccacccgtccaggtactgttcgagaagggcaatctctcaaaagagacaaaaaccatcctgaaatcttctctgagttgctcacttcaggaaggcctaataccagggagccagttctgggatgcctccaaaaccctcagaacgttgctggaggaggaatactttagagaaaagcttagtgacgggattggagtaatgcttccgcaggtgctgaagggcatgacaagcgaatctgacagcattggtctgactcccggagagaagagcgaactggcactgtcagccttggggggttgcgtattctaccttaaaaaatgtctgattgaccaggagctgttgtccatggcgaatttcgaggaatacataccactggattcggacaccgtgtccactacccgctccggggcgatttttaccaaggcctatcaaaggatggttcttgacgctgtgacactcaacaacctggagatctttctgaatggaactaatgggagcacagagggaacactgctggaacgcgtggatacctgccatacaccctttgggaaacggctgctgaagcagtggctttgtgctccactctgtaatcactatgctattaacgatagactcgatgcaattgaagacctaatggtcgtgccggacaagatttcagaggtcgtggagctgttgaagaagctgccagatctggagcgtctgctgtccaagattcacaatgtcggatccccactaaagtcccaaaaccatcctgatagtcgagccattatgtatgaagaaacaacctacagtaaaaagaagatcatcgactttctatcagctttggagggcttcaaggtgatgtgcaagatcatcggcatcatggaagaagtggccgatggctttaaaagcaagattctcaagcaggtcatttcccttcagacaaagaatccggaagggcggttccccgatctaactgtcgagctgaacaggtgggataccgcctttgatcacgagaaagcccggaaaaccggcctgattacccccaaggccggcttcgactcagattacgaccaggcactcgcagacatacgtgagaatgagcaatcacttcttgagtatctggagaaacagcgaaatcgcatcggctgtaggactatagtctactggggaatcggcaggaacagataccagcttgagatccccgagaactttacaacccggaacctgcctgaggaatacgaactaaagtctacaaagaaaggttgcaaacgctactggaccaagaccattgagaaaaaattggcaaatctaattaacgctgaggaacgcagagatgtatccctcaaggattgcatgcgtcgccttttctacaacttcgacaagaactataaagattggcagtccgccgtggaatgcattgcagtccttggtaaaaccttgaacaaattggtcttgcggctgtag

SEQ ID NO: 3778 - DNA, 4328 bp, Artificial Sequence
  derived and/or modified sequence
ggcgaggcgcctgttgattggccactggggcccgggttcctccggcggagcgcgcctccccccagatttcccgccagcaggagccgcgcggtagatgcggtgcttttaggagctccgtccgacagaacggttgggccttgccggctgtcggtatgtcgcgacagagcaccctgtacagcttcttccccaagtctccggcgctgagtgatgccaacaaggcctcggccagggcctcacgcgaaggcggccgtgccgccgctgcccccggggcctctccttccccaggcggggatgcggcctggagcgaggctgggcctgggcccaggcccttggcgcgctccgcgtcaccgcccaaggcgaagaacctcaacggagggctgcggagatcggtagcgcctgctgcccccaccagttgtgacttctcaccaggagatttggtttgggccaagatggagggttacccctggtggccttgtctggtttacaaccacccctttgatggaacattcatccgcgagaaagggaaatcagtccgtgttcatgtacagttttttgatgacagcccaacaaggggctgggttagcaaaaggcttttaaagccatatacaggttcaaaatcaaaggaagcccagaagggaggtcatttttacagtgcaaagcctgaaatactgagagcaatgcaacgtgcagatgaagccttaaataaagacaagattaagaggcttgaattggcagtttgtgatgagccctcagagccagaagaggaagaagagatggaggtaggcacaacttacgtaacagataagagtgaagaagataatgaaattgagagtgaagaggaagtacagcctaagacacaaggatctaggcgaagtagccgccaaataaaaaaacgaagggtcatatcagattctgagagtgacattggtggctctgatgtggaatttaagccagacactaaggaggaaggaagcagtgatgaaataagcagtggagtgggggatagtgagagtgaaggcctgaacagccctgtcaaagttgctcgaaagcggaagagaatggtgactggaaatggctctcttaaaaggaaaagctctaggaaggaaacgccctcagccaccaaacaagcaactagcatttcatcagaaaccaagaatactttgagagctttctctgcccctcaaaattctgaatcccaagcccacgttagtggaggtggtgatgacagtagtcgccctactgtttggtatcatgaaactttagaatggcttaaggaggaaaagagaagagatgagcacaggaggaggcctgatcaccccgattttgatgcatctacactctatgtgcctgaggatttcctcaattcttgtactcctgggatgaggaagtggtggcagattaagtctcagaactttgatcttgtcatctgttacaaggtggggaaattttatgagctgtaccacatggatgctcttattggagtcagtgaactggggctggtattcatgaaaggcaactgggcccattctggctttcctgaaattgcatttggccgttattcagattccctggtgcagaagggctataaagtagcacgagtggaacagactgagactccagaaatgatggaggcacgatgtagaaagatggcacatatatccaagtatgatagagtggtgaggagggagatctgtaggatcattaccaagggtacacagacttacagtgtgctggaaggtgatccctctgagaactacagtaagtatcttcttagcctcaaagaaaaagaggaagattcttctggccatactcgtgcatatggtgtgtgctttgttgatacttcactgggaaagtttttcataggtcagttttcagatgatcgccattgttcgagatttaggactctagtggcacactatcccccagtacaagttttatttgaaaaaggaaatctctcaaaggaaactaaaacaattctaaagagttcattgtcctgttctcttcaggaaggtctgatacccggctcccagttttgggatgcatccaaaactttgagaactctccttgaggaagaatattttagggaaaagctaagtgatggcattggggtgatgttaccccaggtgcttaaaggtatgacttcagagtctgattccattgggttgacaccaggagagaaaagtgaattggccctctctgctctaggtggttgtgtcttctacctcaaaaaatgccttattgatcaggagcttttatcaatggctaattttgaagaatatattcccttggattctgacacagtcagcactacaagatctggtgctatcttcaccaaagcctatcaacgaatggtgctagatgcagtgacattaaacaacttggagatttttctgaatggaacaaatggttctactgaaggaaccctactagagagggttgatacttgccatactccttttggtaagcggctcctaaagcaatggctttgtgccccactctgtaaccattatgctattaatgatcgtctagatgccatagaagacctcatggttgtgcctgacaaaatctccgaagttgtagagcttctaaagaagcttccagatcttgagaggctactcagtaaaattcataatgttgggtctcccctgaagagtcagaaccacccagacagcagggctataatgtatgaagaaactacatacagcaagaagaagattattgattttctttctgctctggaaggattcaaagtaatgtgtaaaattatagggatcatggaagaagttgctgatggttttaagtctaaaatccttaagcaggtcatctctctgcagacaaaaaatcctgaaggtcgttttcctgatttgactgtagaattgaaccgatgggatacagcctttgaccatgaaaaggctcgaaagactggacttattactcccaaagcaggctttgactctgattatgaccaagctcttgctgacataagagaaaatgaacagagcctcctggaatacctagagaaacagcgcaacagaattggctgtaggaccatagtctattgggggattggtaggaaccgttaccagctggaaattcctgagaatttcaccactcgcaatttgccagaagaatacgagttgaaatctaccaagaagggctgtaaacgatactggaccaaaactattgaaaagaagttggctaatctcataaatgctgaagaacggagggatgtatcattgaaggactgcatgcggcgactgttctataactttgataaaaattacaaggactggcagtctgctgtagagtgtatcgcagtgttggatgttttactgtgcctggctaactatagtcgagggggtgatggtcctatgtgtcgcccagtaattctgttgccggaagataccccccccttcttagagcttaaaggatcacgccatccttgcattacgaagactttttttggagatgattttattcctaatgacattctaataggctgtgaggaagaggagcaggaaaatggcaaagcctattgtgtgcttgttactggaccaaatatggggggcaagtctacgcttatgagacaggctggcttattagctgtaatggcccagatgggttgttacgtccctgctgaagtgtgcaggctcacaccaattgatagagtgtttactagacttggtgcctcagacagaataatgtcaggtgaaagtacattttttgttgaattaagtgaaactgccagcatactcatgcatgcaacagcacattctctggtgcttgtggatgaattaggaagaggtactgcaacatttgatgggacggcaatagcaaatgcagttgttaaagaacttgctgagactataaaatgtcgtacattattttcaactcactaccattcattagtagaagattattctcaaaatgttgctgtgcgcctaggacatatggcatgcatggtagaaaatgaatgtgaagaccccagccaggagactattacgttcctctataaattcattaagggagcttgtcctaaaagctatggctttaatgcagcaaggcttgctaatctcccagaggaagttattcaaaagggacatagaaaagcaagagaatttgagaagatgaatcagtcactacgattatttcgggaagtttgcctggctagtgaaaggtcaactgtagatgctgaagctgtccataaattgctgactttgattaaggaattatagactgactacattggaagctttgagttgacttctgacaaaggtggtaaattcagacaacattatgatctaataaactttattttttaaaaatga

SEQ ID NO: 3779 - DNA, 908 bp, Artificial Sequence
  derived and/or modified sequence
ggcgaggcgcctgttgattggccactggggcccgggttcctccggcggagcgcgcctccccccagatttcccgccagcaggagccgcgcggtagatgcggtgcttttaggagctccgtccgacagaacggttgggccttgccggctgtcggtatgtcgcgacagagcaccctgtacagcttcttccccaagtctccggcgctgagtgatgccaacaaggcctcggccagggcctcacgcgaaggcggccgtgccgccgctgcccccggggcctctccttccccaggcggggatgcggcctggagcgaggctgggcctgggcccaggcccttggcgcgctccgcgtcaccgcccaaggcgaagaacctcaacggagggctgcggagatcggtagcgcctgctgcccccaccagttgtgacttctcaccaggagatttggtttgggccaagatggagggttacccctggtggccttgtctggtttacaaccacccctttgatggaacattcatccgcgagaaagggaaatcagtccgtgttcatgtacagttttttgatgacagcccaacaaggggctgggttagcaaaaggcttttaaagccatatacaggttcaaaatcaaaggaagcccagaagggaggtcatttttacagtgcaaagcctgaaatactgagagcaatgcaacgtgcagatgaagccttaaataaagacaagattaagaggcttgaattggcagtttgtgatgagccctcagagccagaagaggaagaagagatggaggtaggcacaacttacgtaacagataagagtgaagaagataatgaaattgagagtgaagaggaagtacagcctaagacacaaggatctaggcgaagtagccgccaaataaaaaaacgaaggaaaaagagg

SEQ ID NO: 3780 - DNA, 4308 bp, Artificial Sequence
  derived and/or modified sequence
ggcgaggcgcctgttgattggccactggggcccgggttcctccggcggagcgcgcctccccccagatttcccgccagcaggagccgcgcggtagatgcggtgcttttaggagctccgtccgacagaacggttgggccttgccggctgtcggtatgtcgcgacagagcaccctgtacagcttcttccccaagtctccggcgctgagtgatgccaacaaggcctcggccagggcctcacgcgaaggcggccgtgccgccgctgcccccggggcctctccttccccaggcggggatgcggcctggagcgaggctgggcctgggcccaggcccttggcgcgctccgcgtcaccgcccaaggcgaagaacctcaacggagggctgcggagatcggtagcgcctgctgcccccaccagttgtgacttctcaccaggagatttggtttgggccaagatggagggttacccctggtggccttgtctggtttacaaccacccctttgatggaacattcatccgcgagaaagggaaatcagtccgtgttcatgtacagttttttgatgacagcccaacaaggggctgggttagcaaaaggcttttaaagccatatacaggttcaaaatcaaaggaagcccagaagggaggtcatttttacagtgcaaagcctgaaatactgagagcaatgcaacgtgcagatgaagccttaaataaagacaagattaagaggcttgaattggcagtttgtgatgagccctcagagccagaagaggaagaagagatggaggtaggcacaacttacgtaacagataagagtgaagaagataatgaaattgagagtgaagaggaagtacagcctaagacacaaggatctaggcgaagtagccgccaaataaaaaaacgaagggtcatatcagattctgagagtgacattggtggctctgatgtggaatttaagccagacactaaggaggaaggaagcagtgatgaaataagcagtggagtgggggatagtgagagtgaaggcctgaacagccctgtcaaagttgctcgaaagcggaagagaatggtgactggaaatggctctcttaaaaggaaaagctctaggaaggaaacgccctcagccaccaaacaagcaactagcatttcatcagaaaccaagaatactttgagagctttctctgcccctcaaaattctgaatcccaagcccacgttagtggaggtggtgatgacagtagtcgccctactgtttggtatcatgaaactttagaatggcttaaggaggaaaagagaagagatgagcacaggaggaggcctgatcaccccgattttgatgcatctacactctatgtgcctgaggatttcctcaattcttgtactcctgggatgaggaagtggtggcagattaagtctcagaactttgatcttgtcatctgttacaaggtggggaaattttatgagctgtaccacatggatgctcttattggagtcagtgaactggggctggtattcatgaaaggcaactgggcccattctggctttcctgaaattgcatttggccgttattcagattccctggtgcagaagggctataaagtagcacgagtggaacagactgagactccagaaatgatggaggcacgatgtagaaagatggcacatatatccaagtatgatagagtggtgaggagggagatctgtaggatcattaccaagggtacacagacttacagtgtgctggaaggtgatccctctgagaactacagtaagtatcttcttagcctcaaagaaaaagaggaagattcttctggccatactcgtgcatatggtgtgtgctttgttgatacttcactgggaaagtttttcataggtcagttttcagatgatcgccattgttcgagatttaggactctagtggcacactatcccccagtacaagttttatttgaaaaaggaaatctctcaaaggaaactaaaacaattctaaagagttcattgtcctgttctcttcaggaaggtctgatacccggctcccagttttgggatgcatccaaaactttgagaactctccttgaggaagaatattttagggaaaagctaagtgatggcattggggtgatgttaccccaggtgcttaaaggtatgacttcagagtctgattccattgggttgacaccaggagagaaaagtgaattggccctctctgctctaggtggttgtgtcttctacctcaaaaaatgccttattgatcaggagcttttatcaatggctaattttgaagaatatattcccttggattctgacacagtcagcactacaagatctggtgctatcttcaccaaagcctatcaacgaatggtgctagatgcagtgacattaaacaacttggagatttttctgaatggaacaaatggttctactgaaggaaccctactagagagggttgatacttgccatactccttttggtaagcggctcctaaagcaatggctttgtgccccactctgtaaccattatgctattaatgatcgtctagatgccatagaagacctcatggttgtgcctgacaaaatctccgaagttgtagagcttctaaagaagcttccagatcttgagaggctactcagtaaaattcataatgttgggtctcccctgaagagtcagaaccacccagacagcagggctataatgtatgaagaaactacatacagcaagaagaagattattgattttctttctgctctggaaggattcaaagtaatgtgtaaaattatagggatcatggaagaagttgctgatggttttaagtctaaaatccttaagcaggtcatctctctgcagacaaaaaatcctgaaggtcgttttcctgatttgactgtagaattgaaccgatgggatacagcctttgaccatgaaaaggctcgaaagactggacttattactcccaaagcaggctttgactctgattatgaccaagctcttgctgacataagagaaaatgaacagagcctcctggaatacctagagaaacagcgcaacagaattggctgtaggaccatagtctattgggggattggtaggaaccgttaccagctggaaattcctgagaatttcaccactcgcaatttgccagaagaatacgagttgaaatctaccaagaagggctgtaaacgatactggaccaaaactattgaaaagaagttggctaatctcataaatgctgaagaacggagggatgtatcattgaaggactgcatgcggcgactgttctataactttgataaaaattacaaggactggcagtctgctgtagagtgtatcgcagtgttggatgttttactgtgcctggctaactatagtcgagggggtgatggtcctatgtgtcgcccagtaattctgttgccggaagataccccccccttcttagagcttaaaggatcacgccatccttgcattacgaagactttttttggagatgattttattcctaatgacattctaataggctgtgaggaagaggagcaggaaaatggcaaaattgtgtgcttgttactggaccaaatatggggggcaagtctacgcatgagacaggctggcttattagctgtaatggcccagatgggttgttacgtccctgctgaagtgtgcaggctcacaccaattgatagagtgtttactagacttggtgcctcagacagaataatgtcaggtgaaagtacattttttgttgaattaagtgaaactgccagcatactcatgcatgcaacagcacattctctggtgcttgtggatgaattaggaagaggtactgcaacatttgatgggacggcaatagcaaatgcagttgttaaagaacttgctgagactataaaatgtcgtacattattttcaactcactaccatattagtagaagattattctcaaaatgttgctgtctaggacatatggcatgcatggtagaaaatgaatgtgaagaccccagccaggagactattacgttcctctataaattcattaagggagcttgtcctaaaagctatggctttaatgcagcaaggcttgctaatctcccagaggaagttattcaaaagggacatagaaaagcaagagaatttgagaagatgaatcagtcactacgattatttcgggaagtttgcctggctagtgaaaggtcaactgtagatgctgaagctgtccataaattgctgactttgattaaggaattatagactgactacattggaagctttgagttgacttctgacaaaggtggtaaattcagacaacattatgatctaataaactttatttttt

SEQ ID NO: 3781 - DNA, 3353 bp, Artificial Sequence
  derived and/or modified sequence
ggcgaggcgcctgttgattggccactggggcccgggttcctccggcggagcgcgcctccccccagatttcccgccagcaggagccgcgcggtagatgcggtgcttttaggagctccgtccgacagaacggttgggccttgccggctgtcggtatgtcgcgacagagcaccctgtacagcttcttccccaagtctccggcgctgagtgatgccaacaaggcctcggccagggcctcacgcgaaggcggccgtgccgcctgcccccggggcctctccttccccaggcggggatgcggcctggagcgaggctgggcctggaggcccttggcgcgctccgcgtcaccgcccaaggcgaagaacctcaacggagggctgcggagatcggtagcgcctgctgcccccaccagttgtgacttctcaccaggagatttggtttgggccaagatggagggttacccctggtggccttgtctggtttacaaccacccctttgatggaacattcatccgcgagaaagggaaatcagtccgtgttcatgtacagttttttgatgacagcccaacaaggggctgggttagcaaaaggcttttaaagccatatacaggttcaaaatcaaaggaagcccagaagggaggtcatttttacagtgcaaagcctgaaatactgagagcaatgcaacgtgcagatgaagccttaaataaagacaagattaagaggcttgaattggcagtttgtgatgagccctcagagccagaagaggaagaagagatggaggtaggcacaacttacgtaacagataagagtgaagaagataatgaaattgagagtgaagaggaagtacagcctaagacacaaggatctaggcgaagtagccgccaaataaaaaaacgaagggtcatatcagattctgagagtgacattggtggctctgatgtggaatttaagccagacactaaggaggaaggaagcagtgatgaaataagcagtggagtgggggatagtgagagtgaaggcctgaacagccctgtcaaagttgctcgaaagcggaagagaatggtgactggaaatggctctcttaaaaggaaaagctctaggaaggaaacgccctcagccaccaaacaagcaactagcatttcatcagaaaccaagaatactttgagagctttctctgcccctcaaaattctgaatcccaagcccacgttagtggaggtggtgatgacagtagtcgccctactgtttggtatcatgaaactttagaatggcttaaggaggaaaagagaagagatgagcacaggaggaggcctgatcaccccgattttgatgcatctacactctatgtgcctgaggatttcctcaattcttgtactcctgggatgaggaagtggtggcagattaagtctcagaactttgatcttgtcatctgttacaaggtggggaaattttatgagctgtaccacatggatgctcttattggagtcagtgaactggggctggtattcatgaaaggcaactgggcccattctggctttcctgaaattgcatttggccgttattcagattccctggtgcagaagggctataaagtagcacgagtggaacagactgagactccagaaatgatggaggcacgatgtagaaagatggcacatatatccaagtatgatagagtggtgaggagggagatctgtaggatcattaccaagggtacacagacttacagtgtgctggaaggtgatccctctgagaactacagtaagtatcttcttagcctcaaagaaaaagaggaagattcttctggccatactcgtgcatatggtgtgtgctttgttgatacttcactgggaaagtttttcataggtcagttttcagatgatcgccattgttcgagatttaggactctagtggcacactatcccccagtacaagttttatttgaaaaaggaaatctctcaaaggaaactaaaacaattctaaagagttcattgtcctgttctcttcaggaaggtctgatacccggctcccagttttgggatgcatccaaaactttgagaactctccttgaggaagaatattttagggaaaagctaagtgatggcattggggtgatgttaccccaggtgcttaaaggtatgacttcagagtctgattccattgggttgacaccaggagagaaaagtgaattggccctctctgctctaggtggttgtgtcttctacctcaaaaaatgccttattgatcaggagcttttatcaatggctaattttgaagaatatattcccttggattctgacacagtcagcactacaagatctggtgctatcttcaccaaagcctatcaacgaatggtgctagatgcagtgacattaaacaacttggagatttttctgaatggaacaaatggttctactgaaggaaccctactagagagggttgatacttgccatactccttttggtaagcggctcctaaagcaatggctttgtgccccactctgtaaccattatgctattaatgatcgtctagatgccatagaagacctcatggttgtgcctgacaaaatctccgaagttgtagagcttctaaagaagcttccagatcttgagaggctactcagtaaaattcataatgttgggtctcccctgaagagtcagaaccacccagacagcagggctataatgtatgaagaaactacatacagcaagaagaagattattgattttctttctgctctggaaggattcaaagtaatgtgtaaaattatagggatcatggaagaagttgctgatggttttaagtctaaaatccttaagcaggtcatctctctgcagacaaaaaatcctgaaggtcgttttcctgatttgactgtagaattgaaccgatgggatacagcctttgaccatgaaaaggctcgaaagactggacttattactcccaaagcaggctttgactctgattatgaccaagctcttgctgacataagagaaaatgaacagagcctcctggaatacctagagaaacagcgcaacagaattggctgtaggaccatagtctattgggggattggtaggaaccgttaccagctggaaattcctgagaatttcaccactcgcaatttgccagaagaatacgagttgaaatctaccaagaagggctgtaaacgatactggaccaaaactattgaaaagaagttggctaatctcataaatgctgaagaacggagggatgtatcattgaaggactgcatgcggcgactgttctataactttgataaaaattacaaggactggcagtctgctgtagagtgtatcgcagtgttgggtaagactttgaacaagcttgttctcaggctttga

SEQ ID NO: 3782 - DNA, 759 bp, Artificial Sequence
  derived and/or modified sequence
atgtcccggcaaagcaccctgtatagcttcttcccaaaatctcccgcactctctgatgcaaacaaggcaagtgctcgggcaagccgcgaaggcggtcgtgcagcagccgcaccaggcgcatccccaagcccgggaggcgacgccgcttggtccgaagccggacctgggcctcggcctcttgcccgttctgcatccccacccaaggccaagaacctgaatggtgggctccgccgttccgttgcacccgcagcacctacgtcatgtgactttagtccgggagacttggtgtgggcgaagatggagggatatccatggtggccttgccttgtatataaccatccttttgatggcacatttatccgggaaaagggcaagtctgtcagagttcacgtgcaattctttgacgattctccgacccgagggtgggtatctaagcgcttgctcaagccatatacaggctctaagtctaaggaggctcagaaaggtggacatttttattcagccaagcccgagatcctgcgcgctatgcagagggccgatgaggcgttaaataaggacaaaatcaaaaggctcgagctggcagtttgtgacgaaccaagtgagcccgaggaagaagaagagatggaggtcgggacgacctacgtaacggacaagagcgaggaagacaacgagatcgagtcggaagaggaagtgcagccaaaaacccaagggtccaggagaagtagtcggcaaatcaagaaacgccgaaagaaaaggtag

SEQ ID NO: 3783 - DNA, 3201 bp, Artificial Sequence
  derived and/or modified sequence
atgtctcggcagtccactctgtattctttcttcccgaagtcccccgctctttctgatgcaaataaagcctccgccagagcgtcacgggaaggaggccgtgccgcatgtccaaggggcctgagttttcctagaagaggctgtgggctggagcgcggttgggcctggcgacctctggctcgcagtgcgtcacctccaaaggccaaaaaccttaacgggggtcttagacggtcagtcgctccggctgcccctacctcatgtgatttctccccaggggatctggtctgggcaaaaatggaaggatacccttggtggccttgcctggtatacaaccaccccttcgacggtaccttcattcgcgagaagggcaagtccgtcagggtgcatgtgcaattctttgatgattctcctacgcgcggatgggtcagcaagagactcctgaagccatataccgggagtaaaagtaaagaagctcaaaagggtggtcatttttattcagccaagccagagatcttgcgtgccatgcagcgagccgacgaggcactcaacaaagataaaataaaaaggttggagctagctgtgtgcgatgaaccgagcgaacccgaagaggaggaggaaatggaggtggggactacatacgtgactgataagagcgaggaagacaacgagatagaatcagaggaggaagtgcagcccaaaactcagggctctcgaagatccagccgacagattaaaaagaggcgtgtgattagcgatagcgagtccgatatcgggggttccgatgttgagttcaagcctgacacaaaagaggaagggtctagtgatgagattagcagtggggtgggagatagcgaatctgaaggtctgaattcaccagtcaaggtggctcggaagagaaagcggatggtcacaggcaatggctcactaaagcggaaatcctcaaggaaagagaccccaagtgcgaccaagcaggcgacatccatttcctcagaaacaaaaaacactctacgcgcattcagcgccccacagaactcagaatctcaagctcacgtctctgggggaggtgacgattcctcccggcctactgtttggtatcacgagacactggagtggcttaaggaggaaaagcgccgtgacgagcaccgacggcgacctgaccaccctgactttgatgcatccactctgtatgtcccagaggattttctaaactcatgcacgcccggtatgcggaagtggtggcaaataaaaagtcagaattttgacctggtaatttgttacaaggtcggtaagttctatgaactctaccacatggacgcccttattggggtcagcgagctgggtctagtgtttatgaaagggaattgggcccactcagggtttccggaaatcgcatttggtcgctactccgatagtctggtgcagaaggggtacaaggttgcgagagtcgaacagacagagacaccggagatgatggaagcaaggtgccgtaaaatggctcacattagcaagtacgacagggtggtgcgtagggagatatgccggatcattaccaaaggtacgcagacctacagtgtcctggaaggggatccttctgagaattacagtaagtacttattgtctcttaaggagaaggaagaagactcttccggacatactagagcctatggagtgtgctttgtggacacttccctcggaaaattcttcatcggccagtttagcgacgacaggcactgtagccgctttaggaccctcgtagcgcattaccctccggtccaggtgctgttcgagaaagggaacttatcgaaggaaacgaaaaccatcctcaaatcttctttatcatgttctctccaggagggcctgatccctgggagtcaattttgggatgcttctaagacactgcggacattgcttgaagaagagtatttcagagagaaattatccgatggtattggagtgatgctcccccaggtcttgaaaggcatgacaagcgaatccgattcaatcgggctgactccaggcgagaaatcagagctcgctctatctgccctcggtggctgcgtgttctatttaaagaagtgcctgatcgatcaggaactgctcagcatggccaatttcgaggaatatataccacttgacagtgatacggtatcgacaacaagatcaggcgcaatctttactaaagcctatcagcggatggtactggatgccgttactttgaataacctagagatcttcctgaatggcacgaacggctctaccgaagggactttgttagagagggtggacacatgtcacacacctttcggaaagcgcctgctcaaacagtggttgtgcgctcccttgtgtaatcattatgctattaatgatcgacttgacgccatagaggatctcatggtggtgcctgataaaatcagtgaagtcgtagaactgttgaaaaaattgcccgacttggagagacttctcagtaaaatccataacgtcggtagtcctttgaaaagccagaatcacccggatagcagggccattatgtatgaagaaaccacttactcaaagaaaaaaatcattgacttcctaagcgccctcgagggttttaaagtcatgtgcaagatcatcggcatcatggaggaggttgcagacggcttcaaaagcaaaattctgaaacaagtgatatctctgcagaccaaaaatcccgagggacgcttcccagacctcacagtggaactgaataggtgggatacggcctttgatcatgaaaaagcccgaaaaaccggcctcattaccccaaaggctgggtttgatagcgattacgatcaggcgttggccgacatcagagagaatgagcaatctctcttagaataccttgaaaaacaacggaaccggataggttgtagaaccatagtctactggggcatcggccgtaacagataccagctggaaatcccagagaactttactacacggaatcttccggaagagtatgagttaaaatctacgaagaagggttgcaagcgatattggactaagactatagaaaagaagttagccaatcttatcaatgcggaggagcggagggatgtgagtttgaaggactgcatgcgcagactgttctacaactttgacaagaattacaaggattggcaatcagcagtggaatgtatcgctgtgctgggcaagaccttaaataaacttgtcttgagactgtag

SEQ ID NO: 3784 - DNA, 4083 bp, Artificial Sequence
  derived and/or modified sequence
atgagcagacagagtacactctattccttttttcccaagagccccgctctgagtgatgctaataaagcctccgctcgcgcaagtcgtgagggaggccgtgcagccgccgccccgggagccagcccatctcctgggggcgacgctgcgtggtccgaagccggaccaggcccgagaccccttgcgcggtcagcatcgcctcccaaggcgaagaacctgaacggtgggctgcgtcggagcgttgctcctgcagcaccaacgagctgtgacttttcacccggtgatctggtttgggccaaaatggagggttacccttggtggccctgccttgtctataaccatccctttgacgggacatttattagggaaaagggcaagagcgtgagagtacatgtccagtttttcgacgatagtcctacaagggggtgggtttcgaaacgactcctcaagccctacaccggatcgaaatcaaaagaagctcagaaggggggacacttctacagcgccaagcccgaaatccttcgggcaatgcagagagctgatgaggctttgaacaaggacaaaatcaagcgacttgaactggccgtctgtgacgaaccgtcggagcctgaagaagaggaagagatggaagtcggaactacatacgtaaccgacaagtctgaagaggacaacgagatagaatccgaggaagaagtgcaaccgaaaacgcagggatcacgaagatcatccaggcaaatcaaaaagaggcgagtgattagcgactctgaaagtgatatcgggggatccgacgtggagttcaagcccgacaccaaggaagaggggtcttctgatgagatttcctccggcgtgggggatagtgaatccgaggggttaaattctcccgtgaaggtcgccagaaagcgtaaacgaatggttacagggaacggctccctgaagaggaagtcatcgaggaaggagacaccctccgcaactaaacaagcaacaagcatctcttccgagaccaaaaatactttaagggctttttccgcgccccagaattccgaatcgcaggcccacgtgtccggtggcggagatgactcctctcgcccgactgtgtggtaccacgagacactggagtggttaaaggaggaaaagagacgcgatgaacacaggagacgcccggatcatcccgattttgatgcgagcaccctgtacgttccagaagattttcttaacagctgcactcccggcatgaggaagtggtggcagatcaaaagccaaaattttgatttggttatatgttacaaggtagggaaattttatgaattgtatcacatggatgccctgataggggtgtccgagctcggtctcgtcttcatgaagggcaactgggctcattccgggttcccagagatcgcgttcggtagatacagcgactccctcgttcagaagggatacaaggtggcccgagtcgagcaaacggaaacaccagagatgatggaggctcggtgccggaaaatggcccatatatccaaatacgaccgtgttgtgagacgcgaaatatgccggatcattaccaagggtacacagacttactctgtgctcgaaggcgacccctccgagaattactctaagtatctgctcagtcttaaggagaaggaggaagattccagtggacacacacgcgcctatggcgtttgttttgtggatacgagcttaggaaagtttttcatcggccagttctccgacgaccgacactgttctcgtttccgcactctggtcgcccattaccccccggtccaggtcttgttcgaaaagggtaatctcagcaaggaaaccaagactatccttaaatcttctctgagctgcagcctccaagaagggctgatcccaggctctcaattctgggacgcctctaaaacgctgcgtactctactggaggaggaatacttccgcgagaaactttccgacggaatcggcgttatgcttccacaggtcctgaagggcatgaccagcgaatccgattccataggcctcacccccggcgagaagtcggagctggccctttctgcactaggcgggtgtgtgttttatctgaaaaaatgcctcattgaccaggagctcttatccatggccaatttcgaggagtacatccctttggatagcgacaccgtgtcgacaacgagatccggggccatcttcaccaaagcctaccagaggatggtcctggacgcggtaactctgaacaacctggagatttttttaaacggcaccaatggcagcactgaggggacactcctggaaagagtagacacatgtcacacacccttcggaaaaaggctcctcaaacagtggctgtgcgctccactgtgcaaccactacgcaatcaacgatcgattggacgccatcgaagatctcatggtggtaccagataagatcagcgaggtcgtggagctgttaaaaaagctcccagacctggaaagactcttgagcaaaatccacaatgtggggtccccattgaaaagccagaatcaccccgacagccgggccatcatgtatgaagagaccacatattctaaaaagaaaatcatcgactttctgagcgctttggagggttttaaggtcatgtgtaaaattatcggcatcatggaggaagtggcagatggtttcaagtcgaagatactgaagcaagtgattagtctgcagactaagaaccccgaggggagattccccgatttgacggtcgagcttaaccgctgggacacggctttcgaccacgagaaggctcgtaaaacaggtcttataacaccaaaagctggcttcgacagcgactatgaccaagcactggccgatattcgggagaacgagcaaagcctgctggagtatcttgagaagcagcgcaaccggatcggctgtagaaccatagtttactggggcatcggtaggaataggtaccaacttgaaattcccgaaaatttcacaaccagaaatcttccggaggaatacgagctgaagtccacaaagaaagggtgtaaacgatattggacaaagactattgagaagaagttagccaacctgataaatgcagaggaaaggcgagacgtgtcgctgaaggactgtatgcggagactcttctataatttcgataagaattataaagattggcagtctgccgtcgagtgtatcgccgtactcgacgtgctactgtgtctggctaactactccaggggaggagacggtcccatgtgcaggcccgttattttgctgccagaggacacgcccccattcctggagctgaagggctctagacacccgtgtattaccaaaactttctttggggacgactttatccctaacgacatattgattggctgcgaagaagaggaacaggagaatggcaaggcctactgtgttctggtgaccggccccaatatggggggaaagagcacgctaatgcggcaggcaggtctgttggccgtaatggcccagatggggtgttatgtgccagcagaggtctgtcggcttaccccgatcgacagagtgtttacccggctgggcgcctcagacaggatcatgagtggcgagtccacgttcttcgtcgagctgagcgaaacggcctcaatcctcatgcatgccacagcccattccctggtattggtggatgagctgggcagaggaaccgccacatttgacgggaccgccatcgccaacgcagtcgtgaaggaattggcagagacaattaaatgccgcactctttttagcacgcattaccactcactggtcgaagactatagtcagaacgttgccgtgcggttagggcacatggcttgcatggttgaaaacgagtgcgaggatccgtctcaggaaactatcactttcctgtacaaattcattaagggcgcttgcccaaagagctatggattcaatgcggcgaggctagcaaacctgcccgaggaggtgatccagaagggccaccgtaaggccagagagtttgaaaagatgaaccagagtctgcgactatttcgcgaggtctgcttggcttcggaacgcagcaccgtcgatgctgaggccgtgcacaagttacttaccctcatcaaggagctatag

SEQ ID NO: 3785 - DNA, 4083 bp, Artificial Sequence
  derived and/or modified sequence
atgagccggcagagcaccctgtacagcttcttccccaagagccctgccctgagtgatgccaacaaggccagcgcccgggccagccgggagggcggccgggctgctgctgcccctggggccagccccagccctggaggagatgctgcctggagcgaggccggccctggcccccggcccctggcccggagcgccagcccccccaaggccaagaacctgaatggaggcctgcggcgctctgtggccccagctgcccccaccagctgtgacttcagccctggggacctggtgtgggccaagatggagggctacccctggtggccctgcctggtgtacaaccacccctttgatggcaccttcatccgggagaagggcaagtctgtgcgggtgcacgtgcagttctttgatgacagccccacccggggctgggtgtccaagaggctgctgaagccctacacaggcagcaagagcaaggaggcccagaagggcggccacttctacagcgccaagccagagatcctgcgggccatgcagagagcagatgaggccctgaacaaggacaagatcaagaggctggagctggccgtgtgtgatgagcccagcgagcctgaggaggaggaggagatggaggtgggcaccacctacgtgacagacaagtcagaagaagataatgaaattgaaagtgaggaggaggtgcagcccaagacccagggcagcagaagaagcagccggcagatcaagaagagaagagtcatcagtgacagcgagagtgacatcggcggcagtgatgtggagttcaagccagacaccaaggaggagggcagcagtgatgagatcagcagcggcgtgggggacagcgagagcgagggcctgaacagccctgtgaaggtggccaggaagaggaagaggatggtgactggaaatggcagcctgaagaggaagagcagcaggaaggagaccccatctgccaccaagcaggccaccagcatcagcagcgagaccaagaacaccctgcgggccttcagcgccccccagaacagcgagagccaggcccacgtgtctggaggaggagatgacagcagccggcccaccgtgtggtaccacgagaccctggagtggctgaaggaggagaagagaagagatgagcacagaagaagaccagaccacccagactttgatgccagcaccctgtatgtgcctgaggacttcctgaacagctgcaccccaggcatgaggaagtggtggcagatcaagagccagaactttgacctggtgatctgctacaaggtgggcaagttctatgagctgtaccacatggatgccctgattggagtgtctgagctgggcctggtgttcatgaagggcaactgggcccacagcggcttccctgagatcgccttcggccgctacagcgacagcctggtgcagaagggctacaaggtggcccgggtggagcagacagagaccccagagatgatggaggcccgctgcaggaagatggcccacatcagcaaatatgacagagtggtgcggcgggagatctgccgcatcatcaccaagggcacccagacctacagcgtgctggagggggaccccagcgagaactacagcaagtacctgctgagcctgaaggagaaggaggaggacagcagcggccacacccgggcctacggcgtgtgctttgtggacaccagcctgggcaagttcttcatcggccagttcagtgatgacagacactgcagccgcttccgcaccctggtggcccactacccacctgtgcaggtgctgtttgagaagggcaacctgagcaaggagaccaagaccatcctgaagagcagcctgagctgcagcctgcaggagggcctcatccctggcagccagttctgggatgccagcaagaccctgcggaccctgctggaggaggagtacttccgggagaagctgagtgatggcattggagtgatgctgccccaggtgctgaagggcatgaccagcgagagtgacagcatcggcctgaccccaggagagaagtctgagctggccctgagcgccctgggcggctgtgtgttctacctgaagaagtgcctgattgaccaggagctgctgtccatggccaactttgaggagtacatccccctggacagcgacacagtgtccaccaccaggtctggggccatcttcaccaaggcctaccagaggatggtgctggatgctgtgaccctgaacaacctggagatcttcctgaatggcaccaacggcagcacagagggcaccctgctggagcgggtggacacctgccacaccccatttgggaagaggctgctgaagcagtggctgtgtgcccccctgtgcaaccactacgccatcaatgaccggctggatgccatcgaggacctgatggtggtgcctgacaagatcagcgaggtggtggagctgctgaagaagctgcctgacctggagcggctgctgagcaagatccacaacgtgggcagccccctgaagagccagaaccacccagacagccgggccatcatgtatgaggagaccacctacagcaagaagaagatcatcgacttcctgagcgccctggagggcttcaaggtgatgtgcaagatcatcggcatcatggaggaggtggctgatggcttcaagagcaagatcctgaagcaggtgatcagcctgcagaccaagaaccctgagggccgcttcccagacctgactgtggagctgaaccgctgggacacagcctttgaccacgagaaggccaggaagacaggcctcatcacccccaaggccggctttgacagcgactatgaccaggccctggccgacatccgggagaatgagcagagcctgctggagtacctggagaagcagaggaaccgcatcggctgcaggaccatcgtgtactggggcatcggcaggaaccgctaccagctggagatccctgagaacttcaccaccaggaacctgcctgaggagtatgagctgaagagcaccaagaagggctgcaagcgctactggaccaagaccatcgagaagaagctggccaacctgatcaatgctgaggagaggagagatgtgtccctgaaggactgcatgaggaggctcttctacaactttgacaagaactacaaggactggcagagcgctgtggagtgcatcgctgtgctggatgtgctgctgtgcctggccaactacagcagaggaggagatggccccatgtgcaggcctgtgatcctgctgcctgaggacaccccacccttcctggagctgaagggcagccgccacccctgcatcaccaagaccttctttggagatgacttcatccccaatgacatcctgattggctgtgaggaggaggagcaggagaatggcaaggcctactgtgtgctggtgacaggccccaacatgggcggcaagagcaccctgatgaggcaggccggcctgctggccgtgatggcccagatgggctgctacgtgcctgctgaggtgtgccgcctgacccccatcgacagagtcttcacccggctgggcgccagtgaccgcatcatgtctggagagagcaccttctttgtggagctgtctgaaacagccagcatcctgatgcacgccacagcccacagcctggtgctggtggatgagctgggccggggcacagccacctttgatggaacagccatcgccaatgctgtggtgaaggagctggccgagaccatcaagtgcaggaccctcttcagcacccactaccacagcctggtggaggactacagccagaatgtggccgtgcggctgggccacatggcctgcatggtggagaatgaatgtgaggaccccagccaggagaccatcaccttcctgtacaagttcatcaagggggcctgccccaagagctatggcttcaatgctgcccggctggccaacctgcctgaggaggtgatccagaagggccacaggaaggcccgggagtttgagaagatgaaccagagcctgcggctcttccgggaggtgtgcctggccagcgagaggagcacagtggatgctgaggccgtgcacaagctgctgaccctcatcaaggagctgtag

SEQ ID NO: 3786 - DNA, 4083 bp, Artificial Sequence
  derived and/or modified sequence
atgagccggcagagcaccctgtacagcttcttccccaagagccccgccttgtctgacgcaaataaggcctcagctagggcttctagggaaggcggcagggctgcagcggcccctggcgcgtctccttctccgggtggggatgcagcttggtccgaggccgggccgggcccgaggccattggcacgctccgcttcccctcccaaagccaagaatctcaatggtggtctgcgcaggagtgtcgcccccgctgctcccacctcttgcgatttctctcctggagatttggtttgggccaagatggagggttacccctggtggccctgcctggtttataatcacccattcgacggcacctttatcagggagaagggcaagtctgtgagagtgcacgtgcaatttttcgatgactctcctacacggggttgggtgtccaaaagactgctcaaaccgtatacagggagtaaatccaaagaggctcaaaagggcggccatttttatagcgccaagccagaaattcttcgcgctatgcagagggcagacgaggcgctgaacaaagataagataaagaggctcgaactggcagtgtgtgatgagcccagcgaacctgaggaggaggaggaaatggaagtggggacaacctatgtcactgacaaatccgaggaagacaatgaaatcgagtcagaagaggaggttcagcccaaaacacagggcagtcggcgatcgtctcggcaaattaagaaaagacgagtgatctcagactcggaatccgatatcggcggatccgacgtggaattcaaaccagatactaaggaagagggctctagcgatgagatcagcagtggcgtgggtgacagcgagtctgagggtctcaactccccagtgaaggtggcacgtaaacgcaaaagaatggttaccggtaatggatcattgaagaggaagagcagccgcaaagagacccccagcgcgacaaaacaggccaccagcatatcttccgaaactaagaacaccctaagagcattcagcgcccctcaaaattctgaatcccaggctcacgttagtggcggtggcgacgactccagtcgcccaaccgtgtggtatcacgagactctcgaatggctaaaggaggaaaagcggcgagatgagcatcgccgccgccccgaccacccagacttcgatgccagtacgctgtatgtgcccgaggacttcctgaattcatgtacccccggcatgcgaaaatggtggcagattaagtctcagaatttcgacctggtgatatgctataaagtgggcaagttttatgaactgtaccacatggatgccctgattggggtgtcggagttaggtctcgtgttcatgaagggtaattgggcacattccggatttcccgagatcgccttcggccgctatagcgactcccttgtccaaaagggatacaaagttgcgagggtcgaacaaaccgagaccccggaaatgatggaagcccgctgccgcaagatggcccacatcagcaagtacgatcgcgttgtaaggagagagatttgcagaatcataacgaaaggaacgcagacctactctgtcctagaaggtgacccttctgaaaattattcaaagtatctcctgtctctgaaggaaaaggaagaggatagcagtggccacactagagcttatggagtgtgctttgtcgatacctctctgggtaagtttttcataggacagttcagtgatgacaggcactgttcccggttcaggactcttgttgcccattatcccccagttcaagtgttatttgagaaagggaatctgtccaaggaaaccaaaaccatcctgaagtctagcctctcatgctccctccaggaaggattgataccggggtcacaattctgggatgcctccaagaccttgagaacgctgctcgaagaggaatatttccgagagaagttatctgatgggattggcgttatgttaccccaggtgctgaaggggatgacaagcgagtcagatagtattggcctgacccccggggagaagtctgagctggcccttagcgctctgggggggtgtgtattttatctcaaaaagtgccttatagatcaggaactcctgtcaatggcgaactttgaggaatacataccactggatagtgatacagtctccaccacacgcagcggagcaattttcacaaaggcctatcagagaatggtgcttgacgccgtcaccctgaataatttagaaatctttctaaatggcacaaatggttctactgaaggaactctcctcgagcgggtggatacttgccacacaccattcggaaagcgccttttgaagcagtggttgtgcgcacctctttgcaatcactacgccatcaacgaccgcttagatgcaatcgaagacctgatggtggtgcccgacaagatcagcgaggtcgtcgaactgttgaagaaactgcctgatcttgagaggctcctcagcaagatacacaatgtgggctccccacttaagagccaaaatcatcccgactctcgagccattatgtacgaggagacaacctactcaaagaaaaaaattattgacttcctgagcgcactcgaaggcttcaaagtgatgtgcaaaatcattgggattatggaggaggttgctgacggattcaagagcaagatcttaaagcaagtgatcagtcttcagaccaaaaaccccgaaggccgatttcccgatcttacagttgagttaaaccgctgggatacggcatttgatcacgaaaaggctcgaaagactggccttatcacaccaaaggctgggttcgattctgattatgatcaagcactagccgacattcgagaaaacgagcaatcacttcttgagtacctggaaaaacagagaaaccgcattggttgtaggactatcgtgtactggggaatcggcaggaaccggtatcagctggagattccagagaatttcacaacacggaacctccctgaggaatatgaattgaaaagcaccaagaaaggctgtaaacgctactggacaaagactattgagaagaagttagctaacctgataaatgcggaagaaaggagagacgtgtccttgaaagactgcatgcgcagactgttctacaattttgataaaaactacaaagactggcagtcagctgtcgagtgtatagccgtgctggatgtgctgctttgcctggccaactattcacggggaggcgatggcccaatgtgccggcccgtgatactgcttcctgaggacactcccccgtttcttgaacttaaaggcagtcgccacccgtgtatcaccaagacattttttggggacgacttcattcccaacgacattctgattggctgtgaagaagaggagcaagaaaatgggaaggcctattgtgttctcgtaaccggcccaaacatgggggggaagtccaccctgatgcgacaggccggcctgctggcagtgatggcccagatgggctgctacgtccctgcggaagtgtgccggttaactcccattgaccgggtgtttactagactcggagcgtcggatcggatcatgtctggagagtcgacattctttgtggaactgtccgagactgctagcattttaatgcacgccaccgcccacagtctcgtcttggtcgatgaactgggcagggggactgctactttcgacggaaccgcaattgccaacgctgtggtgaaggaactggctgagactataaagtgtcggacactgttttccacacactatcactccctcgtggaagattattcacagaacgtggctgtaagactgggccatatggcgtgcatggtcgaaaacgagtgcgaggacccaagtcaggaaaccatcactttcctgtacaaattcatcaaaggggcctgccctaagtcctacggctttaacgcggcccgtctggccaatttgccagaggaagtgattcagaagggacataggaaggcccgcgagtttgagaaaatgaaccagagcctcaggctttttcgggaggtctgtctggcctccgaacgatcaaccgttgacgcagaggccgtgcataaactccttacattaattaaggagctgtag

SEQ ID NO: 3787 - DNA, 4083 bp, Artificial Sequence
  derived and/or modified sequence
atgagtcgacaatccactctgtattctttcttccccaagtcacccgctctaagcgatgccaataaggccagtgccagagcttcccgggagggcggacgggctgccgctgcccctggagcctcaccctcacctgggggtgatgcggcatggtccgaagctggtcccggtcccaggccgttggcaaggtccgcttctccgccaaaggccaagaacctcaatggaggcctgcggaggagcgttgcccctgcagcacccaccagctgcgatttttcccctggagatctggtgtgggctaagatggagggatacccatggtggccttgcttagtctataatcaccctttcgacgggaccttcatccgggagaagggcaaaagcgttagggtgcacgtgcaatttttcgatgattcccctacaaggggatgggtgagcaagagactgctgaaaccctacactggatctaaaagcaaagaagctcagaaaggcggtcacttttacagcgctaaaccagaaatcttaagggctatgcagcgagccgacgaagctttgaacaaagacaaaattaagcgactggaacttgctgtttgcgacgagccaagcgaacccgaggaagaagaggagatggaggtcggcaccacctacgtcactgataagtctgaagaagacaacgaaatcgaaagtgaggaagaggtgcagccgaaaactcaggggtccagaaggagctcaaggcagatcaaaaagcgccgagtcatctctgatagtgaatccgacataggcggttccgatgtcgaatttaaacccgacactaaggaagagggcagctcagacgagatttcaagcggagtaggagactccgaatccgaaggcctaaatagcccagtaaaggtggcacgcaaaaggaagaggatggtcacaggcaacgggtccctcaagcgaaagtctagcagaaaagaaactcccagtgcaacaaagcaggccacatctatcagctctgagaccaagaacacgctgcgcgcatttagtgcaccgcaaaacagcgagtcacaggcccacgtcagcgggggaggagacgactcaagccgccctaccgtgtggtatcacgagaccctggagtggctgaaagaggagaaaaggcgggacgaacaccgaagacggcctgaccacccagactttgacgccagtacactgtacgtccccgaagacttcttaaactcatgcaccccaggcatgcgcaagtggtggcaaataaaaagtcagaacttcgacctcgtgatctgctataaggtcgggaaattttacgagctgtaccacatggacgccctcataggagtgtctgagcttgggctggtttttatgaaggggaactgggcccatagcggatttccagagatcgcttttggcaggtactccgactccctggtccaaaaaggctataaggtggcgagggtagaacagacagaaacaccagagatgatggaggccagatgtagaaagatggcgcatattagcaagtacgatcgggtcgtacggagggaaatttgcaggatcattacaaaggggactcagacgtattctgtactggagggggatccctccgaaaactattcaaagtacctgctatctctcaaagagaaagaggaggacagttctggacatacaagagcgtacggagtgtgtttcgtcgacacctctctcgggaaatttttcattggacagttttctgacgaccggcactgtagccggtttcggacgctggtggctcattatcctcctgtgcaggtgctctttgaaaaagggaatctttcaaaggagacgaaaaccatcctgaaaagttccctcagttgctccctgcaggaggggcttatccccggatcacaattctgggatgctagcaagactttgcggactctgctggaggaggaatattttcgggagaagctgtcagacggcatcggcgtgatgctgcctcaagtacttaaagggatgacgagtgagagcgattccataggtctcaccccaggggagaagtccgaactggcgctcagtgcacttggagggtgtgtgttttacctcaaaaaatgcctaatcgatcaggaacttctgtctatggcaaattttgaagaatatattccacttgatagtgacacggtttcaacgactcgtagcggcgcaatctttaccaaagcttatcagcgtatggtcctcgatgccgtaacacttaacaatctagaaattttcctgaacggaaccaacggtagcaccgagggaaccctcctggaaagagtggacacatgccatacaccttttggaaaacgccttttgaagcaatggctgtgtgccccattgtgtaatcactacgctattaacgataggctggatgcaatagaagacttgatggtcgtcccagacaagatctcagaggtggtggagcttctcaagaagctgcccgacctggagcggctccttagtaaaattcacaacgtaggctcccctcttaagtcccagaaccatcctgactcaagggctatcatgtacgaagaaacaacgtacagcaaaaagaagataattgactttcttagtgctcttgagggattcaaagtaatgtgtaaaattatcggcatcatggaggaggttgcagacggatttaagtctaagattctgaagcaggtcatttcactccagactaagaaccccgaaggcagattccctgatctaacagtggaactcaaccgctgggatacggcttttgaccatgagaaagccagaaagaccggcttgattactcctaaggcagggttcgacagcgattatgaccaggccctcgccgatatcagagagaacgaacaatcactgttagaatacctggagaaacagagaaaccggattgggtgcagaactattgtctattggggcattggcagaaaccggtaccagctggaaatacctgaaaatttcacaacccggaacctacccgaagagtatgagctcaaatcaactaagaagggatgcaaacgctactggaccaagactatcgagaaaaagctagcaaacctcattaacgcagaagaacggcgagacgtgtctctcaaagactgcatgcgccgtctgttctacaacttcgacaagaactacaaggactggcagtctgccgtggaatgcatagccgtgttggatgtattactgtgtttagcaaactatagccgaggcggtgatggaccgatgtgtcgacctgtcattttgctgcccgaggatactcccccatttctggagctgaaggggtcccgccatccctgtattacaaaaacattctttggtgatgactttatcccgaatgacatcttgatcggttgtgaggaagaagagcaggagaatggaaaagcatactgcgtcttagtcacaggccctaatatgggcggtaaatctacactgatgaggcaggccggattactggcggttatggctcaaatggggtgttacgtgccagccgaggtgtgtcggttgacacccatcgatagagtgtttaccaggttgggtgcctcagatagaattatgtctggcgagtccaccttttttgtggagctcagtgaaaccgcttctatcctgatgcacgccactgctcacagccttgtccttgtggatgagctggggcgtggaaccgctacctttgatgggacagccatcgctaacgcggtggtgaaagagttggccgaaaccataaagtgtcggacactcttttccactcactatcacagcctagttgaagattacagccagaacgtggctgtccgcttgggacatatggcctgtatggttgagaacgagtgcgaggatccttcacaggaaactatcaccttcctttataagttcatcaaaggcgcttgtccaaagtcgtatgggtttaacgcagccagattggctaacctgcctgaagaggtgatccaaaaagggcaccggaaggcacgcgagtttgagaaaatgaatcaatccctgagactttttcgagaggtctgtttagcctctgaacgatctaccgtagatgcagaggcagtccataaactgctaaccctgatcaaagagctatag

SEQ ID NO: 3788 - DNA, 4083 bp, Artificial Sequence
  derived and/or modified sequence
atgagcagacagagcaccctgtacagcttcttccccaagagccccgccctgagcgacgccaacaaggccagcgccagagccagcagagagggcggcagagccgccgccgcccccggcgccagccccagccccggcggcgacgccgcctggagcgaggccggccccggccccagacccctggccagaagcgccagcccccccaaggccaagaacctgaacggcggcctgagaagaagcgtggcccccgccgcccccaccagctgcgacttcagccccggcgacctggtgtgggccaagatggagggctacccctggtggccctgcctggtgtacaaccaccccttcgacggcaccttcatcagagagaagggcaagagcgtgagagtgcacgtgcagttcttcgacgacagccccaccagaggctgggtgagcaagagactgctgaagccctacaccggcagcaagagcaaggaggcccagaagggcggccacttctacagcgccaagcccgagatcctgagagccatgcagagagccgacgaggccctgaacaaggacaagatcaagagactggagctggccgtgtgcgacgagcccagcgagcccgaggaggaggaggagatggaggtgggcaccacctacgtgaccgacaagagcgaggaggacaacgagatcgagagcgaggaggaggtgcagcccaagacccagggcagcagaagaagcagcagacagatcaagaagagaagagtgatcagcgacagcgagagcgacatcggcggcagcgacgtggagttcaagcccgacaccaaggaggagggcagcagcgacgagatcagcagcggcgtgggcgacagcgagagcgagggcctgaacagccccgtgaaggtggccagaaagagaaagagaatggtgaccggcaacggcagcctgaagagaaagagcagcagaaaggagacccccagcgccaccaagcaggccaccagcatcagcagcgagaccaagaacaccctgagagccttcagcgccccccagaacagcgagagccaggcccacgtgagcggcggcggcgacgacagcagcagacccaccgtgtggtaccacgagaccctggagtggctgaaggaggagaagagaagagacgagcacagaagaagacccgaccaccccgacttcgacgccagcaccctgtacgtgcccgaggacttcctgaacagctgcacccccggcatgagaaagtggtggcagatcaagagccagaacttcgacctggtgatctgctacaaggtgggcaagttctacgagctgtaccacatggacgccctgatcggcgtgagcgagctgggcctggtgttcatgaagggcaactgggcccacagcggcttccccgagatcgccttcggcagatacagcgacagcctggtgcagaagggctacaaggtggccagagtggagcagaccgagacccccgagatgatggaggccagatgcagaaagatggcccacatcagcaagtacgacagagtggtgagaagagagatctgcagaatcatcaccaagggcacccagacctacagcgtgctggagggcgaccccagcgagaactacagcaagtacctgctgagcctgaaggagaaggaggaggacagcagcggccacaccagagcctacggcgtgtgcttcgtggacaccagcctgggcaagttcttcatcggccagttcagcgacgacagacactgcagcagattcagaaccctggtggcccactacccccccgtgcaggtgctgttcgagaagggcaacctgagcaaggagaccaagaccatcctgaagagcagcctgagctgcagcctgcaggagggcctgatccccggcagccagttctgggacgccagcaagaccctgagaaccctgctggaggaggagtacttcagagagaagctgagcgacggcatcggcgtgatgctgccccaggtgctgaagggcatgaccagcgagagcgacagcatcggcctgacccccggcgagaagagcgagctggccctgagcgccctgggcggctgcgtgttctacctgaagaagtgcctgatcgaccaggagctgctgagcatggccaacttcgaggagtacatccccctggacagcgacaccgtgagcaccaccagaagcggcgccatcttcaccaaggcctaccagagaatggtgctggacgccgtgaccctgaacaacctggagatcttcctgaacggcaccaacggcagcaccgagggcaccctgctggagagagtggacacctgccacacccccttcggcaagagactgctgaagcagtggctgtgcgcccccctgtgcaaccactacgccatcaacgacagactggacgccatcgaggacctgatggtggtgcccgacaagatcagcgaggtggtggagctgctgaagaagctgcccgacctggagagactgctgagcaagatccacaacgtgggcagccccctgaagagccagaaccaccccgacagcagagccatcatgtacgaggagaccacctacagcaagaagaagatcatcgacttcctgagcgccctggagggcttcaaggtgatgtgcaagatcatcggcatcatggaggaggtggccgacggcttcaagagcaagatcctgaagcaggtgatcagcctgcagaccaagaaccccgagggcagattccccgacctgaccgtggagctgaacagatgggacaccgccttcgaccacgagaaggccagaaagaccggcctgatcacccccaaggccggcttcgacagcgactacgaccaggccctggccgacatcagagagaacgagcagagcctgctggagtacctggagaagcagagaaacagaatcggctgcagaaccatcgtgtactggggcatcggcagaaacagataccagctggagatccccgagaacttcaccaccagaaacctgcccgaggagtacgagctgaagagcaccaagaagggctgcaagagatactggaccaagaccatcgagaagaagctggccaacctgatcaacgccgaggagagaagagacgtgagcctgaaggactgcatgagaagactgttctacaacttcgacaagaactacaaggactggcagagcgccgtggagtgcatcgccgtgctggacgtgctgctgtgcctggccaactacagcagaggcggcgacggccccatgtgcagacccgtgatcctgctgcccgaggacaccccccccttcctggagctgaagggcagcagacacccctgcatcaccaagaccttcttcggcgacgacttcatccccaacgacatcctgatcggctgcgaggaggaggagcaggagaacggcaaggcctactgcgtgctggtgaccggccccaacatgggcggcaagagcaccctgatgagacaggccggcctgctggccgtgatggcccagatgggctgctacgtgcccgccgaggtgtgcagactgacccccatcgacagagtgttcaccagactgggcgccagcgacagaatcatgagcggcgagagcaccttcttcgtggagctgagcgagaccgccagcatcctgatgcacgccaccgcccacagcctggtgctggtggacgagctgggcagaggcaccgccaccttcgacggcaccgccatcgccaacgccgtggtgaaggagctggccgagaccatcaagtgcagaaccctgttcagcacccactaccacagcctggtggaggactacagccagaacgtggccgtgagactgggccacatggcctgcatggtggagaacgagtgcgaggaccccagccaggagaccatcaccttcctgtacaagttcatcaagggcgcctgccccaagagctacggcttcaacgccgccagactggccaacctgcccgaggaggtgatccagaagggccacagaaaggccagagagttcgagaagatgaaccagagcctgagactgttcagagaggtgtgcctggccagcgagagaagcaccgtggacgccgaggccgtgcacaagctgctgaccctgatcaaggagctgtag

SEQ ID NO: 3789 - protein, 1103 aa, Artificial Sequence
  derived and/or modified sequence
MTACARRAGGLPDPGLCGPAWWAPSLPRLPRALPRLPLLLLLLLLQPPALSAVFTVGVLGPWACDPIFSRARPDLAARLAAARLNRDPGLAGGPRFEVALLPEPCRTPGSLGAVSSALARVSGLVGPVNPAACRPAELLAEEAGIALVPWGCPWTQAEGTTAPAVTPAADALYALLRAFGWARVALVTAPQDLWVEAGRSLSTALRARGLPVASVTSMEPLDLSGAREALRKVRDGPRVTAVIMVMHSVLLGGEEQRYLLEAAEELGLTDGSLVFLPFDTIHYALSPGPEALAALANSSQLRRAHDAVLTLTRHCPSEGSVLDSLRRAQERRELPSDLNLQQVSPLFGTIYDAVFLLARGVAEARAAAGGRWVSGAAVARHIRDAQVPGFCGDLGGDEEPPFVLLDTDAAGDRLFATYMLDPARGSFLSAGTRMHFPRGGSAPGPDPSCWFDPNNICGGGLEPGLVFLGFLLVVGMGLAGAFLAHYVRHRLLHMQMVSGPNKIILTVDDITFLHPHGGTSRKVAQGSRSSLGARSMSDIRSGPSQHLDSPNIGVYEGDRVWLKKFPGDQHIAIRPATKTAFSKLQELRHENVALYLGLFLARGAEGPAALWEGNLAVVSEHCTRGSLQDLLAQREIKLDWMFKSSLLLDLIKGIRYLHHRGVAHGRLKSRNCIVDGRFVLKITDHGHGRLLEAQKVLPEPPRAEDQLWTAPELLRDPALERRGTLAGDVFSLAIIMQEVVCRSAPYAMLELTPEEVVQRVRSPPPLCRPLVSMDQAPVECILLMKQCWAEQPELRPSMDHTFDLFKNINKGRKTNIIDSMLRMLEQYSSNLEDLIRERTEELELEKQKTDRLLTQMLPPSVAEALKTGTPVEPEYFEQVTLYFSDIVGFTTISAMSEPIEVVDLLNDLYTLFDAIIGSHDVYKVETIGDAYMVASGLPQRNGQRHAAEIANMSLDILSAVGTFRMRHMPEVPVRIRIGLHSGPCVAGVVGLTMPRYCLFGDTVNTASRMESTGLPYRIHVNLSTVGILRALDSGYQVELRGRTELKGKGAEDTFWLVGRRGFNKPIPKPPDLQPGSSNHGISLQEIPPERRRKLEKARPGQFS

SEQ ID NO: 3790 - DNA, 3312 bp, Artificial Sequence
  derived and/or modified sequence
atgaccgcttgtgcccgtcgcgccggaggattacccgaccccggcctctgtggtcctgcctggtgggccccatccttgccacgactccctcgcgccctgccccgcctgccgctgttactgctattgctgcttttacagccacccgcactgagtgctgtcttcaccgtgggagtgttggggccatgggcctgtgaccccattttctcccgggcacgacccgatttagcagctcgactggccgccgcccgcctcaatcgcgatccaggcctggccggggggcctaggtttgaagttgctttactgccagagccttgtcgcacaccaggcagcttaggcgcagtatcttccgcactggccagagtatcaggtttagtaggacccgtcaacccagcagcatgtaggcctgccgagctattagccgaggaggctggtatagccctcgttccttggggctgcccttggacacaagcggagggcactactgctccagcggtgacgccagcagcagacgccctctatgcattgctgcgcgccttcggttgggcacgggtggcactggttacagccccacaggatctctgggtcgaggctggccgatcattgtctaccgcactcagagcaagaggattacctgtggcatccgtgacgtcaatggagcccctagatctgagcggcgccagggaggctctgagaaaggtgcgcgacggacctagagttacggctgtcatcatggtgatgcattcagtgctactggggggcgaagagcagcgttatttactggaagcggctgaggagcttgggctcaccgatggttctcttgtcttcctccccttcgacaccattcactatgccctaagcccaggccccgaggccctggccgcgttggcgaactcttcccagctgcggcgagctcacgacgcagtgctcactctgacccggcactgtccgtccgagggctccgttctagactccctccgtcgcgctcaggagcgcagagagcttcccagtgacttaaaccttcagcaggtgagcccactgtttggaacaatatacgacgccgtgtttttactcgcccgcggagtagctgaagcaagagccgctgccggtgggcgatgggtgtctggagccgcagtggctcgccacatccgggatgcccaagtgcccgggttttgtggagacttggggggtgatgaggagccccccttcgttttgctggacacagacgcggcgggagaccgcctgtttgccacctacatgctcgatccagccagaggtagctttctgtcagctggcacccggatgcatttccctcgaggcgggagcgcccctggccccgaccctagctgttggtttgatccaaacaatatttgcggtgggggactcgagccagggctggtgtttctgggctttctgctcgttgtgggaatgggcctcgccggcgcattcctcgctcactatgtgcggcatcgcctcctccacatgcagatggtgagcgggccaaacaaaatcatcttgaccgtagacgatatcaccttcctccatccgcatggcggcacgtcccgcaaagtcgcacaggggtctcgtagctcattaggagcacggtcgatgtccgatatacggtctgggccaagccaacatctggacagccccaacataggcgtgtatgagggagaccgagtgtggctcaagaaattccctggcgaccagcacatagccatcagaccagctacaaagacagccttttccaagctgcaggagctgcgacacgagaacgttgctctttatctcgggctttttttagcccggggggccgaaggccctgctgccctctgggagggaaatcttgctgtggtctcagagcactgtacacgagggtcactgcaggaccttctggcccagagggagataaagctggactggatgttcaagagctccctgcttctggacctcataaaggggattcgatatttgcatcataggggagttgcgcacggcaggctgaaatcccggaattgcatcgtggacggccggtttgtgcttaagataactgatcatggccatgggcgtcttctggaagcgcaaaaagtgctcccagagcctccacgagcagaggaccagttgtggactgcaccagagctgctgcgcgatcctgcactcgagagacgaggaactctagcaggggatgtgttttcccttgcgataatcatgcaggaggtggtctgcagatccgccccatatgctatgttggaactgactcctgaagaagtggtacagagggttcgatcgcccccccctctgtgcaggccgttagtgtccatggatcaggctcctgtcgagtgcatactcttaatgaagcagtgttgggccgaacaacctgagctccggccctcaatggatcatacattcgacttatttaagaatatcaataaaggccgaaagactaacataatagactcgatgttacggatgctggagcagtactcctctaaccttgaggatttgataagggagcgaaccgaagaactggagctcgagaagcagaagacagatcggctgttgacacaaatgctgccaccctcggtggctgaagccctcaagaccggcaccccagtcgagcccgaatactttgaacaggtcacactgtacttcagtgacatcgttgggttcaccaccatctcagcgatgagtgagcctatcgaagtggtggacctccttaacgacctctacacactgttcgacgctattatcggttcccacgatgtctataaagtggaaactattggggacgcatatatggttgcaagcgggctgccccagcgtaatggccagcgccacgctgccgagatagccaacatgtctctggacatcctgagcgcagtgggcacctttagaatgagacatatgcccgaggttcccgtgcggatccggatcggattacatagtggcccatgcgtcgccggtgtcgtcggactcactatgccccggtactgtttatttggcgacacagtgaacactgcttctaggatggagtccacaggcttgccatatcgtattcatgtcaacctttccactgtcggcatattgagagcattagacagtgggtaccaggttgagctgcgggggcggacagaactgaaggggaagggggctgaggacaccttctggctggtggggcgccgagggtttaacaagccaatacctaagccccccgacctgcaaccaggatctagcaatcacggcattagtcttcaggaaattcctccggagaggcgcagaaagctagaaaaggcccgcccagggcaattcagttag

SEQ ID NO: 3791 - DNA, 3623 bp, Artificial Sequence
  derived and/or modified sequence
caaaagggggaccggccctgtgacccctcaccgggggccgtgggcccgagcccccggacttccctaagccggcaatgaccgcctgcgcccgccgagcgggtgggcttccggaccccgggctctgcggtcccgcgtggtgggctccgtccctgccccgcctcccccgggccctgccccggctcccgctcctgctgctcctgcttctgctgcagccccccgccctctccgccgtgttcacggtgggggtcctgggcccctgggcttgcgaccccatcttctctcgggctcgcccggacctggccgcccgcctggccgccgcccgcctgaaccgcgaccccggcctggcaggcggtccccgcttcgaggtagcgctgctgcccgagccttgccggacgccgggctcgctgggggccgtgtcctccgcgctggcccgcgtgtcgggcctcgtgggtccggtgaaccctgcggcctgccggccagccgagctgctcgccgaagaagccgggatcgcgctggtgccctggggctgcccctggacgcaggcggagggcaccacggcccctgccgtgacccccgccgcggatgccctctacgccctgcttcgcgcattcggctgggcgcgcgtggccctggtcaccgccccccaggacctgtgggtggaggcgggacgctcactgtccacggcactcagggcccggggcctgcctgtcgcctccgtgacttccatggagcccttggacctgtctggagcccgggaggccctgaggaaggttcgggacgggcccagggtcacagcagtgatcatggtgatgcactcggtgctgctgggtggcgaggagcagcgctacctcctggaggccgcagaggagctgggcctgaccgatggctccctggtcttcctgcccttcgacacgatccactacgccttgtccccaggcccggaggccttggccgcactcgccaacagctcccagcttcgcagggcccacgatgccgtgctcaccctcacgcgccactgtccctctgaaggcagcgtgctggacagcctgcgcagggctcaagagcgccgcgagctgccctctgacctcaatctgcagcaggtctccccactctttggcaccatctatgacgcggtcttcttgctggcaaggggcgtggcagaagcgcgggctgccgcaggtggcagatgggtgtccggagcagctgtggcccgccacatccgggatgcgcaggtccctggcttctgcggggacctaggaggagacgaggagcccccattcgtgctgctagacacggacgcggcgggagaccggctttttgccacatacatgctggatcctgcccggggctccttcctctccgccggtacccggatgcacttcccgcgtgggggatcagcacccggacctgacccctcgtgctggttcgatccaaacaacatctgcggtggaggactggagccgggcctcgtctttcttggcttcctcctggtggttgggatggggctggctggggccttcctggcccattatgtgaggcaccggctacttcacatgcaaatggtctccggccccaacaagatcatcctgaccgtggacgacatcacctttctccacccacatgggggcacctctcgaaaggtggcccaggggagtcgatcaagtctgggtgcccgcagcatgtcagacattcgcagcggccccagccaacacttggacagccccaacattggtgtctatgagggagacagggtttggctgaagaaattcccaggggatcagcacatagctatccgcccagcaaccaagacggccttctccaagctccaggagctccggcatgagaacgtggccctctacctggggcttttcctggctcggggagcagaaggccctgcggccctctgggagggcaacctggctgtggtctcagagcactgcacgcggggctctcttcaggacctcctcgctcagagagaaataaagctggactggatgttcaagtcctccctcctgctggaccttatcaagggaataaggtatctgcaccatcgaggcgtggctcatgggcggctgaagtcacggaactgcatagtggatggcagattcgtactcaagatcactgaccacggccacgggagactgctggaagcacagaaggtgctaccggagcctcccagagcggaggaccagctgtggacagccccggagctgcttagggacccagccctggagcgccggggaacgctggccggcgacgtctttagcttggccatcatcatgcaagaagtagtgtgccgcagtgccccttatgccatgctggagctcactcccgaggaagtggtgcagagggtgcggagcccccctccactgtgtcggcccttggtgtccatggaccaggcacctgtcgagtgtatcctcctgatgaagcagtgctgggcagagcagccggaacttcggccctccatggaccacaccttcgacctgttcaagaacatcaacaagggccggaagacgaacatcattgactcgatgcttcggatgctggagcagtactctagtaacctggaggatctgatccgggagcgcacggaggagctggagctggaaaagcagaagacagaccggctgcttacacagatgctgcctccgtctgtggctgaggccttgaagacggggacaccagtggagcccgagtactttgagcaagtgacactgtactttagtgacattgtgggcttcaccaccatctctgccatgagtgagcccattgaggttgtggacctgctcaacgatctctacacactctttgatgccatcattggttcccacgatgtctacaaggtggagacaataggggacgcctatatggtggcctcggggctgccccagcggaatgggcagcgacacgcggcagagatcgccaacatgtcactggacatcctcagtgccgtgggcactttccgcatgcgccatatgcctgaggttcccgtgcgcatccgcataggcctgcactcgggtccatgcgtggcaggcgtggtgggcctcaccatgccgcggtactgcctgtttggggacacggtcaacaccgcctcgcgcatggagtccaccgggctgccttaccgcatccacgtgaacttgagcactgtggggattctccgtgctctggactcgggctaccaggtggagctgcgaggccgcacggagctgaagggcaagggcgccgaggacactttctggctagtgggcagacgcggcttcaacaagcccatccccaaaccgcctgacctgcaaccggggtccagcaaccacggcatcagcctgcaggagatcccacccgagcggcgacggaagctggagaaggcgcggccgggccagttctcttgagaagtgaggcccggccccggacagggtctgggccctgctccctgtcccatctgcagtggaccccaggcacccccctttgaggaggtggggtgaactgctccttggcagggatttgtgacactgcattgctgggctgtgttcctcgggctcttctggaccttgcaccgtggataccaggccatgtgccatggtatttgggtcctgggagggtgggtgaaataaaggcatgctgtcttc

SEQ ID NO: 3792 - DNA, 3312 bp, Artificial Sequence
  derived and/or modified sequence
atgacagcctgtgcccggcgggccggcggcctgcctgaccccggcctgtgtggccctgcctggtgggcccccagcctgccccggctgccccgggccctgccccggctgcccctgctgctgctgctgctgctgctgcagcccccagccctgtctgctgtgttcaccgtgggcgtgctgggcccctgggcctgtgaccccatcttcagccgggcccggccagacctggccgcccggctggccgccgcccggctgaacagagaccccggcctggccggcggccccaggtttgaggtggccctgctgcctgagccctgcaggaccccaggcagcctgggcgctgtgagcagcgccctggcccgggtgtctggcctggtgggccctgtgaacccagctgcctgcaggcctgctgagctgctggccgaggaggccggcatcgccctggtgccctggggctgcccctggacccaggccgagggcaccacagccccagctgtgaccccagctgctgatgccctgtatgccctgctgcgggccttcggctgggcccgggtggccctggtgacagccccccaggacctgtgggtggaggccggccgcagcctgagcacagccctgcgggcccggggcctgcctgtggcctctgtgacctccatggagcccctggacctgagcggggcccgggaggccctgaggaaggtgagagatggcccccgggtgacagctgtgatcatggtgatgcacagcgtgctgctgggcggggaggagcagcgctacctgctggaggccgctgaggagctgggcctgacagatggcagcctggtgttcctgccctttgacaccatccactacgccctgagccctggccctgaggccctggccgccctggccaacagcagccagctgcggcgggcccatgatgctgtgctgaccctgaccaggcactgccccagcgagggctctgtgctggacagcctgcggcgggcccaggagcggcgggagctgcccagcgacctgaacctgcagcaggtgagccccctgtttggcaccatctatgatgctgtgttcctgctggcccggggcgtggccgaggcccgggctgctgctgggggccgctgggtgtctggagctgctgtggcccggcacatcagagatgcccaggtgcccggcttctgtggggacctgggcggagatgaggagcccccatttgtgctgctggacacagatgctgctggggaccggctgtttgccacctacatgctggaccctgcccggggcagcttcctgtctgctggcaccaggatgcacttcccccggggcggcagcgcccctggccctgaccccagctgctggtttgaccccaacaacatctgtggcggcggcctggagcccggcctggtgttcctgggcttcctgctggtggtgggcatgggcctggccggggccttcctggcccactacgtgcgccaccggctgctgcacatgcagatggtgtctggccccaacaagatcatcctgactgtggatgacatcaccttcctgcacccccacggcggcaccagcaggaaggtggcccagggcagccgcagcagcctgggcgcccgctccatgtctgacatccgcagcggccccagccagcacctggacagccccaacatcggcgtgtatgaaggagacagagtgtggctgaagaagtttcctggggaccagcacatcgccatccggcctgccaccaagacagccttcagcaagctgcaggagctgcggcatgaaaatgtggccctgtacctgggcctcttcctggcccggggagctgagggccctgctgccctgtgggagggcaacctggccgtggtgtctgagcactgcacccggggcagcctgcaggacctgctggcccagcgggagatcaagctggactggatgttcaagagcagcctgctgctggacctgatcaagggcatccgctacctgcaccacagaggagtggcccacggccgcctgaagagcaggaactgcatcgtggatggccgctttgtgctgaagatcacagaccacggccacggccgcctgctggaggcccagaaggtgctgcctgagccccccagggctgaggaccagctgtggacagcccctgagctgctgcgggaccctgccctggagcggcggggcaccctggccggagatgtgttcagcctggccatcatcatgcaggaggtggtgtgccgcagcgccccctatgccatgctggagctgaccccagaggaggtggtgcagagggtgcgcagccccccacccctgtgccggcccctggtgtccatggaccaggcccctgtggagtgcatcctgctgatgaagcagtgctgggccgagcagcctgagctgcggcccagcatggaccacacctttgacctcttcaagaacatcaacaagggcaggaagaccaacatcatcgacagcatgctgaggatgctggagcagtacagcagcaacctggaggacctgatccgggagaggacagaggagctggagctggagaagcagaagacagaccggctgctgacccagatgctgccccccagcgtggccgaggccctgaagacaggcacccctgtggagcctgagtactttgagcaggtgaccctgtacttcagtgacatcgtgggcttcaccaccatcagcgccatgtctgagcccatcgaggtggtggacctgctgaatgacctgtacaccctgtttgatgccatcatcggcagccatgatgtgtacaaggtggagaccatcggagatgcctacatggtggccagcggcctgccccagagaaatggccagagacatgctgctgagatcgccaacatgagcctggacatcctgtctgctgtgggcaccttcaggatgaggcacatgcctgaggtgcctgtgcgcatcagaattggcctgcacagcggcccctgtgtggccggcgtggtgggcctgaccatgccccgctactgcctgtttggagacacagtgaacacagccagcaggatggagagcacaggcctgccctaccgcatccacgtgaacctgagcacagtgggcatcctgcgggccctggacagcggctaccaggtggagctgcggggccgcacagagctgaagggcaaaggagctgaggacaccttctggctggtgggcagaagaggcttcaacaagcccatccccaagcccccagacctgcagcccggcagcagcaaccacggcatcagcctgcaggagatccccccagagaggaggaggaagctggagaaggcccggcccggccagttctcctag

SEQ ID NO: 3793 - DNA, 3312 bp, Artificial Sequence
  derived and/or modified sequence
atgaccgcctgcgcccggcgggccggcggcctgcccgaccccggcctgtgcggccctgcatggtgggcaccatctctcccccgccttcccagggcactgcccaggctgccattgctgctgcttttgctgctgctccagccccctgctttgtcagcagtctttaccgtgggggttctgggcccatgggcatgtgaccccatcttttctcgagccaggccagatctcgccgccagactggccgccgctcgcttgaaccgtgatcctggactggcaggaggaccgcggttcgaggtggctttactcccggagccatgcaggactcctgggtctctcggcgcagtgtcttcagccctcgcaagggtgtctgggttagtgggccctgtaaatcctgcggcttgcaggcctgcggaacttctggctgaagaggccgggatcgcactggtcccatggggctgtccgtggactcaggcggagggaaccaccgccccggcagtgacacccgcggccgacgctctgtacgcgttgctcagagccttcgggtgggcgcgagttgccctcgtaacggcgcctcaggatctgtgggtggaagcagggcgatcactatctaccgcgctgcgcgctagaggactgcctgttgcctccgtgacatctatggagcctctcgacctttctggcgcacgggaagccctccgcaaagtgagggacggcccccgggtaacggccgtcataatggtaatgcattctgtattactcggcggcgaagaacaaagatatctgctggaagctgcagaagagctggggctgacggatggctcactcgtctttctgccttttgacactattcactacgcgttgagtcccggtcctgaagccttggctgctcttgctaatagcagccagctgagacgggcacatgatgccgtgctgacacttacccgccattgcccaagcgagggctctgtcctagacagtctccggagagcccaggaaagacgagaattacctagcgatctgaatttacaacaggtcagccctttgtttgggacaatctacgacgccgtctttttactggctcggggcgtggccgaggcacgcgcagcagccggggggcggtgggtttctggcgcagccgtggccaggcacatccgcgatgcacaggttcccggattttgtggcgaccttgggggggacgaagagcctcctttcgtgcttcttgatacagatgctgctggagaccgattgtttgccacatatatgctcgaccctgcccgcggttcatttctgagcgcgggcacacgaatgcactttcctagaggtggtagtgcccctggcccggaccctagttgctggttcgatcccaataacatatgcggcggcggattagagccaggacttgtctttctgggatttctcctggtagtgggtatgggactggcgggggcttttctggctcactatgtgcgacaccgccttctgcacatgcagatggtgagtggaccaaataagattattctcaccgttgatgatatcacattcctccacccacacggtggaacaagtcgcaaagtggctcagggctcccgctcttctctgggcgcgagatccatgtctgacatccggagtggaccttcccaacatctggactccccaaacatcggagtttacgagggcgacagggtctggctgaaaaagttccctggggaccagcatatcgctattcggcctgccacgaaaactgcgttctccaagctgcaggaactgcgacacgaaaacgtggccctttatctcgggctcttcctggctcggggtgcagagggacctgccgccctgtgggaaggaaatttggccgtcgtctccgagcactgcacccgtggaagtctgcaagatttactcgcgcagagggagatcaagctcgactggatgttcaaaagttcgctgctgcttgatcttatcaagggaattcggtacctgcaccaccggggggtagctcatggaagacttaagagccgtaactgtatcgtggatggaaggttcgtgctgaaaattaccgatcatggacatggcagattgctggaggctcagaaggtgctgcccgaaccaccgcgggccgaggatcaactctggaccgctccggagttgctgcgggaccccgctttggagcggcgcggaaccttggcgggggacgtgttttcactggccataattatgcaggaggtggtctgtcgctccgctccctacgctatgttggagctgacacccgaagaggtggtgcagagagtcaggtctccgcctccattgtgtcgcccactggtgagcatggatcaggctccagtcgaatgcattctgctgatgaagcaatgttgggccgagcaaccagaattgcggccatcaatggaccacacatttgacctgttcaaaaatattaataagggccgcaaaaccaacattatagactctatgcttagaatgctcgagcagtacagcagtaatctggaagacttgatcagggagagaaccgaagagttggagctcgagaaacagaaaacggacagactgctgactcagatgctccctcctagcgtagctgaagctttaaagacaggaacccccgtggagcccgaatattttgaacaggtgacgctttacttttctgacatagtaggctttaccactattagcgctatgtccgagccaattgaggtggtggacctgctcaacgacctctatactctgtttgacgccataattggctcccacgacgtgtacaaagtcgagaccattggagacgcttatatggtagcttcaggcctacctcaaagaaacggtcagcggcatgcagccgaaatcgctaatatgtctctggatatcttgagcgccgtcggcacctttagaatgcgtcatatgcctgaagttccagtccgtattaggattggattgcatagcggcccatgtgtggctggggtggtgggcctgactatgccgcgatactgcctattcggggatacagtgaatactgcatccagaatggagtcaaccggactaccgtataggatccacgtgaatctcagcactgtcggcatattacgggccttggattcaggctaccaggtcgaactgcgagggcgcacagagttaaaaggaaagggggccgaagatacattctggttagtgggccgtagagggttcaataagccaatccctaaaccccccgacctacagccaggaagctctaatcatggaattagtcttcaggagatccctccagagaggcggcggaaactggagaaggccagacccggacaattctcttag

SEQ ID NO: 3794 - DNA, 3312 bp, Artificial Sequence
  derived and/or modified sequence
atgactgcgtgtgcacgccgtgcgggaggcctccccgatccaggcctgtgtggaccggcttggtgggccccttcattgcctcgattacccagggcactgccaaggcttcccttgctgcttctgctgttgttgttgcagcctccggctttgagtgctgtatttacagttggcgtgctgggcccttgggcttgcgacccaatctttagccgcgctcggcctgacctggcggcacgactggctgcagccaggctcaatagagacccagggctcgcgggaggaccaaggtttgaggtagctctcttacccgaaccctgtcgaacccctgggagtctgggcgcagtttcaagcgctctcgcaagagtttcgggactggtcggaccagtcaatcctgctgcctgtagacctgcagagctgctggcggaggaagcgggaatcgctcttgtcccttgggggtgtccttggacccaggctgagggcactacagctccagccgttactcccgctgcagacgccctttacgctctcctgagagcgttcggatgggcgcgagtagcccttgtgaccgctccacaggacctgtgggtagaggccggtcgttctttgtccacagcattgagggctagggggctgcccgttgcctctgttacgagtatggagcctctggacctctccggagcccgagaagctctgagaaaggttcgagacggacctagggtgaccgccgtgataatggtcatgcattccgtcctgttgggcggagaagaacagcggtatctcttagaagccgcagaggagctgggtttaaccgacggaagtttggtgttccttccatttgacacgattcactacgccctctctccaggtccggaagcactcgccgctttggcaaatagctcccagctcaggcgcgctcacgatgccgtcctgacactgacgcggcattgtccatccgagggatcggtgctcgacagtctgagaagagcccaggaacgaagagagttacccagtgacttgaacctacaacaggtttcacctctgttcggaactatctacgatgccgtgttcttgctggctcgaggtgtagccgaagcacgggctgcggctggcggaaggtgggtaagcggggcagcagtagctcgacatattagagacgcacaggtgccaggcttctgcggagacctcggcggagacgaggagccacctttcgttttgctggatactgacgcagccggagataggctgttcgccacctacatgttagaccctgcgagagggtcattcctttcggccggtacccggatgcattttccaagaggcggttcagccccaggacctgaccctagttgttggttcgaccccaacaatatctgcgggggtgggctggaacctggcctggtgttcctgggattcctgttggtagtcggaatgggactggccggagccttcttggcacattacgtgcggcatcgtctgctgcacatgcagatggtgagtgggccaaataaaatcatactcacagtggatgatataacctttctgcatccacacggtggaacaagccggaaggtggctcaaggaagtcggtcctcactgggtgcacgctctatgtcggacatacgttccggaccctcccagcacttggacagcccgaatataggagtgtatgaaggcgaccgagtgtggcttaaaaagttccccggagaccagcacatcgccatccggcctgcaacgaaaaccgcatttagcaaactgcaagagctgcgtcatgagaacgtcgctctgtatcttgggctgtttctggccaggggagcagagggccctgccgcattgtgggaaggaaatttggcagttgttagcgaacactgtacacggggatctctccaggatctcctcgctcagcgggagatcaaactcgattggatgtttaaaagcagcctattactggatctgatcaaaggaattaggtatctccaccaccgaggggtggcccacggtagactgaagtccagaaactgcattgttgacggcagatttgtgttgaagattactgaccacggccacggaaggttgctggaggctcagaaggttctgccagagccaccccgagccgaggaccagctgtggacagcccctgaacttttgcgcgatcccgcactggagcggagagggactctcgcaggtgacgtcttttccctcgccattattatgcaggaagtagtgtgtcgatctgctccatacgctatgctcgaactgactcctgaagaggtagtgcagcgcgtcagatcccccccacctttgtgccgcccacttgtcagtatggatcaggctccagtggaatgtattctgctgatgaagcagtgctgggcggagcagccagagctgcgccctagcatggatcacacatttgacctgttcaaaaacattaataaaggcaggaaaactaacatcatcgactccatgttgcggatgcttgagcaatatagctccaatctcgaagacttaatcagggaacgcacagaggagctggaactggaaaagcagaagacggacaggctgttaacccagatgctccctcccagtgtggcagaagccctgaaaacagggacacccgtggagccagaatactttgagcaggtgacactgtatttttctgacattgtggggtttacaacaatctccgcgatgagcgagcccatcgaggtggtagacctccttaatgacctctacactttatttgacgcaatcatcggtagccacgacgtgtataaggtggagactattggcgacgcttacatggtggcgagtggactgccacaaaggaacggccaacgtcacgctgccgagatcgcaaacatgagcctggacattctttctgctgtgggcacttttcggatgcgccacatgcccgaggttcccgttcgcattagaatagggctgcatagcgggccatgtgtggccggtgtcgtagggcttactatgcccaggtattgtttgttcggcgacacggtgaacacagcctcacgtatggagtcaacaggactgccctacagaatacacgtgaatctatccaccgttggcattctcagggctctggactccggctaccaagtagagcttcggggtagaaccgagttgaaaggaaaaggagccgaggacactttttggctggtcgggagacggggatttaacaagcccatacccaaaccaccagatctgcagcccggttcatccaaccacggtatatccctacaggaaataccccctgagcgtcgtcgcaagttagaaaaggctagaccaggacagttttcctag

SEQ ID NO: 3795 - DNA, 3312 bp, Artificial Sequence
  derived and/or modified sequence
atgaccgcctgcgccagaagagccggcggcctgcccgaccccggcctgtgcggccccgcctggtgggcccccagcctgcccagactgcccagagccctgcccagactgcccctgctgctgctgctgctgctgctgcagccccccgccctgagcgccgtgttcaccgtgggcgtgctgggcccctgggcctgcgaccccatcttcagcagagccagacccgacctggccgccagactggccgccgccagactgaacagagaccccggcctggccggcggccccagattcgaggtggccctgctgcccgagccctgcagaacccccggcagcctgggcgccgtgagcagcgccctggccagagtgagcggcctggtgggccccgtgaaccccgccgcctgcagacccgccgagctgctggccgaggaggccggcatcgccctggtgccctggggctgcccctggacccaggccgagggcaccaccgcccccgccgtgacccccgccgccgacgccctgtacgccctgctgagagccttcggctgggccagagtggccctggtgaccgccccccaggacctgtgggtggaggccggcagaagcctgagcaccgccctgagagccagaggcctgcccgtggccagcgtgaccagcatggagcccctggacctgagcggcgccagagaggccctgagaaaggtgagagacggccccagagtgaccgccgtgatcatggtgatgcacagcgtgctgctgggcggcgaggagcagagatacctgctggaggccgccgaggagctgggcctgaccgacggcagcctggtgttcctgcccttcgacaccatccactacgccctgagccccggccccgaggccctggccgccctggccaacagcagccagctgagaagagcccacgacgccgtgctgaccctgaccagacactgccccagcgagggcagcgtgctggacagcctgagaagagcccaggagagaagagagctgcccagcgacctgaacctgcagcaggtgagccccctgttcggcaccatctacgacgccgtgttcctgctggccagaggcgtggccgaggccagagccgccgccggcggcagatgggtgagcggcgccgccgtggccagacacatcagagacgcccaggtgcccggcttctgcggcgacctgggcggcgacgaggagccccccttcgtgctgctggacaccgacgccgccggcgacagactgttcgccacctacatgctggaccccgccagaggcagcttcctgagcgccggcaccagaatgcacttccccagaggcggcagcgcccccggccccgaccccagctgctggttcgaccccaacaacatctgcggcggcggcctggagcccggcctggtgttcctgggcttcctgctggtggtgggcatgggcctggccggcgccttcctggcccactacgtgagacacagactgctgcacatgcagatggtgagcggccccaacaagatcatcctgaccgtggacgacatcaccttcctgcacccccacggcggcaccagcagaaaggtggcccagggcagcagaagcagcctgggcgccagaagcatgagcgacatcagaagcggccccagccagcacctggacagccccaacatcggcgtgtacgagggcgacagagtgtggctgaagaagttccccggcgaccagcacatcgccatcagacccgccaccaagaccgccttcagcaagctgcaggagctgagacacgagaacgtggccctgtacctgggcctgttcctggccagaggcgccgagggccccgccgccctgtgggagggcaacctggccgtggtgagcgagcactgcaccagaggcagcctgcaggacctgctggcccagagagagatcaagctggactggatgttcaagagcagcctgctgctggacctgatcaagggcatcagatacctgcaccacagaggcgtggcccacggcagactgaagagcagaaactgcatcgtggacggcagattcgtgctgaagatcaccgaccacggccacggcagactgctggaggcccagaaggtgctgcccgagccccccagagccgaggaccagctgtggaccgcccccgagctgctgagagaccccgccctggagagaagaggcaccctggccggcgacgtgttcagcctggccatcatcatgcaggaggtggtgtgcagaagcgccccctacgccatgctggagctgacccccgaggaggtggtgcagagagtgagaagccccccccccctgtgcagacccctggtgagcatggaccaggcccccgtggagtgcatcctgctgatgaagcagtgctgggccgagcagcccgagctgagacccagcatggaccacaccttcgacctgttcaagaacatcaacaagggcagaaagaccaacatcatcgacagcatgctgagaatgctggagcagtacagcagcaacctggaggacctgatcagagagagaaccgaggagctggagctggagaagcagaagaccgacagactgctgacccagatgctgccccccagcgtggccgaggccctgaagaccggcacccccgtggagcccgagtacttcgagcaggtgaccctgtacttcagcgacatcgtgggcttcaccaccatcagcgccatgagcgagcccatcgaggtggtggacctgctgaacgacctgtacaccctgttcgacgccatcatcggcagccacgacgtgtacaaggtggagaccatcggcgacgcctacatggtggccagcggcctgccccagagaaacggccagagacacgccgccgagatcgccaacatgagcctggacatcctgagcgccgtgggcaccttcagaatgagacacatgcccgaggtgcccgtgagaatcagaatcggcctgcacagcggcccctgcgtggccggcgtggtgggcctgaccatgcccagatactgcctgttcggcgacaccgtgaacaccgccagcagaatggagagcaccggcctgccctacagaatccacgtgaacctgagcaccgtgggcatcctgagagccctggacagcggctaccaggtggagctgagaggcagaaccgagctgaagggcaagggcgccgaggacaccttctggctggtgggcagaagaggcttcaacaagcccatccccaagccccccgacctgcagcccggcagcagcaaccacggcatcagcctgcaggagatcccccccgagagaagaagaaagctggagaaggccagacccggccagttcagctag

SEQ ID NO: 3796 - protein, 651 aa, Artificial Sequence
  derived and/or modified sequence
MARGSAVAWAALGPLLWGCALGLQGGMLYPQESPSRECKELDGLWSFRADFSDNRRRGFEEQWYRRPLWESGPTVDMPVPSSFNDISQDWRLRHFVGWVWYEREVILPERWTQDLRTRVVLRIGSAHSYAIVWVNGVDTLEHEGGYLPFEADISNLVQVGPLPSRLRITIAINNTLTPTTLPPGTIQYLTDTSKYPKGYFVQNTYFDFFNYAGLQRSVLLYTTPTTYIDDITVTTSVEQDSGLVNYQISVKGSNLFKLEVRLLDAENKVVANGTGTQGQLKVPGVSLWWPYLMHERPAYLYSLEVQLTAQTSLGPVSDFYTLPVGIRTVAVTKSQFLINGKPFYFHGVNKHEDADIRGKGFDWPLLVKDFNLLRWLGANAFRTSHYPYAEEVMQMCDRYGIVVIDECPGVGLALPQFFNNVSLHHHMQVMEEVVRRDKNHPAVVMWSVANEPASHLESAGYYLKMVIAHTKSLDPSRPVTFVSNSNYAADKGAPYVDVICLNSYYSWYHDYGHLELIQLQLATQFENWYKKYQKPIIQSEYGAETIAGFHQDPPLMFTEEYQKSLLEQYHLGLDQKRRKYVVGELIWNFADFMTEQSPTRVLGNKKGIFTRQRQPKSAAFLLRERYWKIANETRYPHSVAKSQCLENSLFT

SEQ ID NO: 3797 - DNA, 1956 bp, Artificial Sequence
  derived and/or modified sequence
atggcccggggtagtgcagtggcatgggctgccctgggcccactcctctgggggtgtgcgttaggactgcagggtggtatgctgtatcctcaagagtcaccatctcgagagtgcaaggaactagatggtttatggtctttccgagccgatttctccgataaccgtagacggggcttcgaggaacaatggtatcggagaccactgtgggaaagcggccctactgttgatatgcccgtgccatcgagctttaacgatattagtcaagattggcgtctccgtcatttcgttggctgggtatggtacgagcgtgaagtgatcttgcccgagagatggactcaagatctgcgaacacgggtagtgctgcgcattggcagcgcccacagctacgcaatcgtatgggtgaatggagtggacacacttgaacatgaaggcggttacttaccttttgaagctgacatctccaacctggtgcaggttggccccttgccatcacgtttgaggatcacaatcgccatcaataatactcttacgccaaccacgctgcctcctggcaccattcagtatctgacggatacaagcaagtatccaaagggctacttcgtgcagaacacctacttcgactttttcaactacgcgggcttgcaacgctccgttctgctgtacaccacaccaaccacgtatattgatgacatcacagtgaccacatctgtggaacaagactcaggcttggtgaactatcaaattagtgtgaaggggagcaatctttttaagctggaagtgcgccttcttgacgccgagaacaaggttgtggcaaacggcaccggcacacaggggcagctgaaagtcccgggtgtcagtttgtggtggccatatttgatgcatgagcgtccagcttacctctacagcctggaagtccaactgaccgcacagactagcctcggacctgttagcgacttttatacactccctgtgggcattcgtaccgtcgctgtcactaagtcccagttccttatcaatggtaagcccttctattttcatggggtaaacaagcatgaagacgctgatatcaggggaaagggcttcgactggcccctcttggtcaaggactttaatctgttacggtggctgggggctaacgcttttaggacatcccattatccttatgccgaagaggtaatgcagatgtgtgacagatacggcatcgtcgttatcgacgaatgccctggagttgggctggccctcccgcagtttttcaataacgtgtccctccatcatcatatgcaggtgatggaggaggtcgtcagacgagataagaaccatcccgcggttgtcatgtggtctgtggccaacgaacccgcgagccatctcgagagcgccgggtactacctgaagatggttattgcacacactaaaagtttagacccctctaggccagtgacattcgtctccaactccaactatgccgcagacaagggcgccccttatgtcgatgtcatctgcctgaattcatattacagctggtatcatgattatggtcacctggagctgatccagctacagcttgcaacacaatttgagaactggtataaaaagtatcagaaaccaataatacagagtgagtatggggctgagaccatagctggtttccaccaggaccctccactgatgttcaccgaggagtatcagaaaagtctactggagcaataccatctgggcctggatcagaagcgccgcaagtatgtcgtgggggaacttatttggaatttcgcagattttatgacagagcaatctccaactagagtcctgggcaataagaagggcatttttacccgacagagacaaccgaagagcgccgcctttctcctgcgagagcgatattggaagattgctaacgaaaccaggtacccacactccgtcgcaaaatcacagtgcctggaaaacagcctgtttacttag

SEQ ID NO: 3798 - DNA, 2300 bp, Artificial Sequence
  derived and/or modified sequence
gtcctcaaccaagatggcgcggatggcttcaggcgcatcacgacaccggcgcgtcacgcgacccgccctacgggcacctcccgcgcttttcttagcgccgcagacggtggccgagcgggggaccgggaagcatggcccgggggtcggcggttgcctgggcggcgctcgggccgttgttgtggggctgcgcgctggggctgcagggcgggatgctgtacccccaggagagcccgtcgcgggagtgcaaggagctggacggcctctggagcttccgcgccgacttctctgacaaccgacgccggggcttcgaggagcagtggtaccggcggccgctgtgggagtcaggccccaccgtggacatgccagttccctccagcttcaatgacatcagccaggactggcgtctgcggcattttgtcggctgggtgtggtacgaacgggaggtgatcctgccggagcgatggacccaggacctgcgcacaagagtggtgctgaggattggcagtgcccattcctatgccatcgtgtgggtgaatggggtcgacacgctagagcatgaggggggctacctccccttcgaggccgacatcagcaacctggtccaggtggggcccctgccctcccggctccgaatcactatcgccatcaacaacacactcacccccaccaccctgccaccagggaccatccaatacctgactgacacctccaagtatcccaagggttactttgtccagaacacatattttgactttttcaactacgctggactgcagcggtctgtacttctgtacacgacacccaccacctacatcgatgacatcaccgtcaccaccagcgtggagcaagacagtgggctggtgaattaccagatctctgtcaagggcagtaacctgttcaagttggaagtgcgtcttttggatgcagaaaacaaagtcgtggcgaatgggactgggacccagggccaacttaaggtgccaggtgtcagcctctggtggccgtacctgatgcacgaacgccctgcctatctgtattcattggaggtgcagctgactgcacagacgtcactggggcctgtgtctgacttctacacactccctgtggggatccgcactgtggctgtcaccaagagccagttcctcatcaatgggaaacctttctatttccacggtgtcaacaagcatgaggatgcggacatccgagggaagggcttcgactggccgctgctggtgaaggacttcaacctgcttcgctggcttggtgccaacgctttccgtaccagccactacccctatgcagaggaagtgatgcagatgtgtgaccgctatgggattgtggtcatcgatgagtgtcccggcgtgggcctggcgctgccgcagttcttcaacaacgtttctctgcatcaccacatgcaggtgatggaagaagtggtgcgtagggacaagaaccaccccgcggtcgtgatgtggtctgtggccaacgagcctgcgtcccacctagaatctgctggctactacttgaagatggtgatcgctcacaccaaatccttggacccctcccggcctgtgacctttgtgagcaactctaactatgcagcagacaagggggctccgtatgtggatgtgatctgtttgaacagctactactcttggtatcacgactacgggcacctggagttgattcagctgcagctggccacccagtttgagaactggtataagaagtatcagaagcccattattcagagcgagtatggagcagaaacgattgcagggtttcaccaggatccacctctgatgttcactgaagagtaccagaaaagtctgctagagcagtaccatctgggtctggatcaaaaacgcagaaaatacgtggttggagagctcatttggaattttgccgatttcatgactgaacagtcaccgacgagagtgctggggaataaaaaggggatcttcactcggcagagacaaccaaaaagtgcagcgttccttttgcgagagagatactggaagattgccaatgaaaccaggtatccccactcagtagccaagtcacaatgtttggaaaacagcctgtttacttgagcaagactgataccacctgcgtgtcccttcctccccgagtcagggcgacttccacagcagcagaacaagtgcctcctggactgttcacggcagaccagaacgtttctggcctgggttttgtggtcatctattctagcagggaacactaaaggtggaaataaaagattttctattatggaaataaagagttggcatgaaagtggctactgaaaa

SEQ ID NO: 3799 - DNA, 1956 bp, Artificial Sequence
  derived and/or modified sequence
atggcccggggcagcgctgtggcctgggccgccctgggccccctgctgtggggctgtgccctgggcctgcagggcggcatgctgtacccccaggagagccccagccgggagtgcaaggagctggatggcctgtggagcttccgggctgacttcagtgacaacagaagaagaggatttgaggagcagtggtacagaagacccctgtgggagagcggccccaccgtggacatgcctgtgcccagcagcttcaatgacatcagccaggactggaggctgcggcactttgtgggctgggtgtggtatgagcgggaggtgatcctgcctgagcgctggacccaggacctgcggaccagggtggtgctgagaattggcagcgcccacagctatgccatcgtgtgggtgaatggagtggacaccctggagcacgagggcggctacctgccctttgaagctgacatcagcaacctggtgcaggtgggccccctgcccagccggctgcgcatcaccatcgccatcaacaacaccctgacccccaccaccctgcccccaggcaccatccagtacctgacagacaccagcaagtaccccaagggctactttgtgcagaacacctactttgacttcttcaactatgccggcctgcagaggtctgtgctgctgtacaccacccccaccacctacattgatgacatcaccgtgaccacctctgtggagcaggacagcggcctggtgaactaccagatctctgtgaagggcagcaacctcttcaagctggaggtgcggctgctggatgctgagaacaaggtggtggccaacggcaccggcacccagggccagctgaaggtgcctggggtgtccctgtggtggccctacctgatgcatgagaggcctgcctacctgtacagcctggaggtgcagctgacagcccagaccagcctgggccctgtgtctgacttctacaccctgcctgtgggcatcagaacagtggccgtgaccaagagccagttcctgatcaatggcaagcccttctacttccacggcgtgaacaagcatgaagatgctgacatccggggcaaaggatttgactggcccctgctggtgaaggacttcaacctgctgcgctggctgggcgccaatgccttccgcaccagccactacccctatgcagaggaggtgatgcagatgtgtgacagatatggaattgtggtgattgatgagtgccctggggtgggcctggccctgccccagttcttcaacaacgtgtccctgcaccaccacatgcaggtgatggaggaggtggtgagaagagacaagaaccaccctgctgtggtgatgtggagcgtggccaatgagcccgccagccacctggagagcgctggctactacctgaagatggtgattgcccacaccaagagcctggaccccagcaggcctgtgacctttgtgagcaacagcaactatgctgctgacaagggggccccctacgtggatgtgatctgcctgaacagctactacagctggtaccatgactatggccacctggagctgatccagctgcagctggccacccagtttgagaactggtacaagaagtaccagaagcccatcatccagagtgaatatggagctgagaccatcgccggcttccaccaggacccccccctgatgttcacagaggagtaccagaagagcctgctggagcagtaccacctgggcctggaccagaagaggaggaaatatgtggtgggggagctgatctggaactttgctgacttcatgacagagcagagccccaccagggtgctgggcaacaagaagggcatcttcacccggcagaggcagcccaagtctgctgccttcctgctgcgggagcgctactggaagatcgccaatgagacccgctacccccacagcgtggccaagagccagtgcctggagaacagcctcttcacctag

SEQ ID NO: 3800 - DNA, 1956 bp, Artificial Sequence
  derived and/or modified sequence
atggcccggggcagcgccgtggcctgggccgccctgggccccctgctgtggggctgtgcactgggcctccaggggggaatgctttatcctcaagaatctccaagccgtgagtgtaaggaactagatggcctctggagctttcgcgcggatttttcagataaccgaaggagagggtttgaggagcagtggtaccggcgcccactctgggaaagcggccccaccgtggatatgccagtgccatctagctttaatgacatttctcaggactggaggttacggcatttcgtgggctgggtgtggtatgaacgcgaagtgatactgcccgagagatggacacaggacttgaggacaagagtggtgctcaggataggcagtgcccactcttacgccatcgtgtgggtcaatggagttgacacactcgaacacgaaggcggctacctgcctttcgaggccgatatttcaaacctcgtacaggtggggcctctgccttcccggctccgaataaccatcgccatcaataataccctgacccccacaacgctaccacctggcactatccaataccttaccgacaccagcaaatatcccaaggggtacttcgtgcagaatacgtactttgacttctttaactatgccggcctccaaagaagtgtattgctctacaccactcctacaacctacatcgacgacattacagtcaccacgagtgtcgagcaagatagcggccttgtcaactatcagatctccgtgaaaggatctaacctgtttaagctggaggtgcgcctgctcgacgccgagaacaaggtggtcgctaacggcacaggtactcaaggtcaactgaaagtgccgggggtttcgttatggtggccgtacctaatgcatgagcggccggcttatctctattcccttgaggttcagttgaccgcccagaccagtctgggccctgtcagtgacttttataccctgccggtagggattcggacggttgccgtcacgaaatcccagttcctcatcaacggcaaacctttttacttccacggcgtgaacaaacacgaggacgcagacatccgcggcaaaggattcgattggccattgctcgtgaaggactttaacttgcttcgatggctgggggccaatgcattccgaacctcccactacccatatgccgaggaggtgatgcagatgtgcgaccgatatggaatcgtagtcatcgatgagtgccccggtgtgggcttagcactgcctcaattcttcaataatgtctcccttcaccatcatatgcaggttatggaagaggtggttagacgcgacaagaatcaccctgcggtggtgatgtggtctgtcgcaaatgagcctgcctcccaccttgagagcgcaggttattacttaaagatggtgatagcccacactaagagcctggaccctagtagacctgttaccttcgtgtctaattcaaactatgccgcagataagggcgcaccctatgtcgacgtcatatgtcttaacagctactactcatggtaccacgactatggccacttagaactgatccaactgcagctggctacccaatttgaaaattggtacaagaaataccagaaacctatcattcagagcgaatatggcgctgagactatcgccggatttcatcaggatccacctttaatgtttacagaggagtaccagaagagcttactggaacagtatcatctgggactcgatcagaagcgtaggaagtacgtggtgggggagctcatatggaattttgccgacttcatgacggagcagtcccccaccagagtcttgggaaacaaaaaaggaatttttacccgccagcgccaacctaaaagtgccgcttttctgttgcgagaaagatattggaagatagctaacgagacaagatatccccacagcgtggcaaaatctcagtgcctggagaacagcctgtttacttag

SEQ ID NO: 3801 - DNA, 1956 bp, Artificial Sequence
  derived and/or modified sequence
atggccaggggctcagccgtcgcatgggctgctctgggacctctgctctgggggtgcgcgctgggcctccaggggggaatgctttatcctcaggagagcccctcaagggagtgtaaggagcttgacggcctctggtcattcagggccgacttttcagacaatagacgacggggattcgaagaacagtggtaccggcgtcctctgtgggaaagcggcccaacagtagatatgccagtgcctagtagctttaatgacattagtcaggattggcgccttcggcactttgtgggttgggtctggtatgagagggaagtgattctccctgagcgttggacccaggacctgcgcacacgagttgtcctgcggatcggctccgcacattcatatgctattgtctgggttaatggagttgatacactggaacatgagggcggatacctgcctttcgaagctgacatctccaatctcgtccaggttggcccacttcccagccgactgcgaatcactatcgctataaacaacacccttactcctaccactcttcctcccggaacgatacaatatttgacggatacatctaagtatcctaaaggatactttgtgcaaaatacttattttgacttcttcaactatgccggactccagcggagcgtgctcctgtataccacaccgaccacctacatcgacgacattaccgttaccaccagtgtggagcaggacagtgggcttgtcaactaccaaataagtgtgaagggttcgaacctgtttaagttggaggtgcgattgctggatgccgaaaataaggtagtggctaacggtactggaacccagggccaactcaaggtcccaggggtgagcctttggtggccctatctgatgcacgagagacctgcttacttgtactccctggaggttcagctgactgcacagacatccctggggccagttagcgacttttacacgctgccagtgggaattcgcaccgtcgcagtgacgaaaagtcaatttttgataaatgggaaaccattctacttccacggcgttaataaacatgaagacgctgacattagaggaaaggggttcgactggccactgctggttaaagactttaaccttttgaggtggttaggcgcaaatgctttccgaacatcacactatccctatgcagaggaggttatgcagatgtgtgaccggtacgggattgtagtaatagatgaatgtccaggtgttggacttgcgctgccacagttcttcaataatgtgagtctccaccatcatatgcaggtgatggaggaagtagtccgccgagacaaaaatcatcctgccgtcgtgatgtggtccgtcgccaacgagcccgcaagccacttagagtccgctgggtattacctcaaaatggtaatagcacatacaaaatcgctggaccccagtcggccagtaactttcgtgtcaaatagcaattatgctgccgacaaaggtgccccttatgtggatgtgatatgtctcaactcatactattcttggtaccatgactatgggcacttggagctgatccagctccagctcgccactcagtttgagaactggtacaaaaagtaccagaaaccgatcattcagagtgaatacggggcagaaacaatcgccggtttccaccaggatccccctctgatgtttacagaggaataccaaaagagtctgctggaacagtaccacctgggcctggatcagaagaggaggaaatacgttgtgggtgagctgatctggaacttcgcagatttcatgaccgaacagagtcccacccgggtccttgggaataagaagggcatattcactagacagcggcagccaaagagcgctgcgtttttactgagagagagatactggaaaatagcaaacgagacaagataccctcatagcgtggctaaatcccaatgtctagagaattctctgttcacatag

SEQ ID NO: 3802 - DNA, 1956 bp, Artificial Sequence
  derived and/or modified sequence
atggccagaggcagcgccgtggcctgggccgccctgggccccctgctgtggggctgcgccctgggcctgcagggcggcatgctgtacccccaggagagccccagcagagagtgcaaggagctggacggcctgtggagcttcagagccgacttcagcgacaacagaagaagaggcttcgaggagcagtggtacagaagacccctgtgggagagcggccccaccgtggacatgcccgtgcccagcagcttcaacgacatcagccaggactggagactgagacacttcgtgggctgggtgtggtacgagagagaggtgatcctgcccgagagatggacccaggacctgagaaccagagtggtgctgagaatcggcagcgcccacagctacgccatcgtgtgggtgaacggcgtggacaccctggagcacgagggcggctacctgcccttcgaggccgacatcagcaacctggtgcaggtgggccccctgcccagcagactgagaatcaccatcgccatcaacaacaccctgacccccaccaccctgccccccggcaccatccagtacctgaccgacaccagcaagtaccccaagggctacttcgtgcagaacacctacttcgacttcttcaactacgccggcctgcagagaagcgtgctgctgtacaccacccccaccacctacatcgacgacatcaccgtgaccaccagcgtggagcaggacagcggcctggtgaactaccagatcagcgtgaagggcagcaacctgttcaagctggaggtgagactgctggacgccgagaacaaggtggtggccaacggcaccggcacccagggccagctgaaggtgcccggcgtgagcctgtggtggccctacctgatgcacgagagacccgcctacctgtacagcctggaggtgcagctgaccgcccagaccagcctgggccccgtgagcgacttctacaccctgcccgtgggcatcagaaccgtggccgtgaccaagagccagttcctgatcaacggcaagcccttctacttccacggcgtgaacaagcacgaggacgccgacatcagaggcaagggcttcgactggcccctgctggtgaaggacttcaacctgctgagatggctgggcgccaacgccttcagaaccagccactacccctacgccgaggaggtgatgcagatgtgcgacagatacggcatcgtggtgatcgacgagtgccccggcgtgggcctggccctgccccagttcttcaacaacgtgagcctgcaccaccacatgcaggtgatggaggaggtggtgagaagagacaagaaccaccccgccgtggtgatgtggagcgtggccaacgagcccgccagccacctggagagcgccggctactacctgaagatggtgatcgcccacaccaagagcctggaccccagcagacccgtgaccttcgtgagcaacagcaactacgccgccgacaagggcgccccctacgtggacgtgatctgcctgaacagctactacagctggtaccacgactacggccacctggagctgatccagctgcagctggccacccagttcgagaactggtacaagaagtaccagaagcccatcatccagagcgagtacggcgccgagaccatcgccggcttccaccaggacccccccctgatgttcaccgaggagtaccagaagagcctgctggagcagtaccacctgggcctggaccagaagagaagaaagtacgtggtgggcgagctgatctggaacttcgccgacttcatgaccgagcagagccccaccagagtgctgggcaacaagaagggcatcttcaccagacagagacagcccaagagcgccgccttcctgctgagagagagatactggaagatcgccaacgagaccagatacccccacagcgtggccaagagccagtgcctggagaacagcctgttcacctag

SEQ ID NO: 3803 - protein, 763 aa, Artificial Sequence
  derived and/or modified sequence
MVACRAIGILSRFSAFRILRSRGYICRNFTGSSALLTRTHINYGVKGDVAVVRINSPNSKVNTLSKELHSEFSEVMNEIWASDQIRSAVLISSKPGCFIAGADINMLAACKTLQEVTQLSQEAQRIVEKLEKSTKPIVAAINGSCLGGGLEVAISCQYRIATKDRKTVLGTPEVLLGALPGAGGTQRLPKMVGVPAALDMMLTGRSIRADRAKKMGLVDQLVEPLGPGLKPPEERTIEYLEEVAITFAKGLADKKISPKRDKGLVEKLTAYAMTIPFVRQQVYKKVEEKVRKQTKGLYPAPLKIIDVVKTGIEQGSDAGYLCESQKFGELVMTKESKALMGLYHGQVLCKKNKFGAPQKDVKHLAILGAGLMGAGIAQVSVDKGLKTILKDATLTALDRGQQQVFKGLNDKVKKKALTSFERDSIFSNLTGQLDYQGFEKADMVIEAVFEDLSLKHRVLKEVEAVIPDHCIFASNTSALPISEIAAVSKRPEKVIGMHYFSPVDKMQLLEIITTEKTSKDTSASAVAVGLKQGKVIIVVKDGPGFYTTRCLAPMMSEVIRILQEGVDPKKLDSLTTSFGFPVGAATLVDEVGVDVAKHVAEDLGKVFGERFGGGNPELLTQMVSKGFLGRKSGKGFYIYQEGVKRKDLNSDMDSILASLKLPPKSEVSSDEDIQFRLVTRFVNEAVMCLQEGILATPAEGDIGAVFGLGFPPCLGGPFRFVDLYGAQKIVDRLKKYEAAYGKQFTPCQLLADHANSPNKKFYQ

SEQ ID NO: 3804 - protein, 260 aa, Artificial Sequence
  derived and/or modified sequence
MESKGMWQLFELTLPIQSMLAACKTLQEVTQLSQEAQRIVEKLEKSTKPIVAAINGSCLGGGLEVAISCQYRIATKDRKTVLGTPEVLLGALPGAGGTQRLPKMVGVPAALDMMLTGRSIRADRAKKMGLVDQLVEPLGPGLKPPEERTIEYLEEVAITFAKGLADKKISPKRDKGLVEKLTAYAMTIPFVRQQVYKKVEEKVRKQTKGLYPAPLKIIDVVKTGIEQGSDAGYLCESQVNLFPFNVLLSVKGKLKIQSSV

SEQ ID NO: 3805 - DNA, 2292 bp, Artificial Sequence
  derived and/or modified sequence
atggtggcttgcagggcgataggcatcctgagccgattcagcgcctttagaattttacgctcccggggatatatctgtcgaaatttcaccggaagttccgcgctcctcacacggacacacatcaactacggtgtcaaaggagatgtggccgtggtacgcatcaacagccccaatagcaaagtcaacacactgtccaaagagttgcacagcgagttcagcgaagttatgaacgagatctgggcaagcgaccagataaggtcagctgtcctcatttcttccaaacctgggtgtttcatcgccggtgccgatattaatatgctggccgcttgcaaaaccttacaggaagtaacccagctgagtcaagaggctcagcggattgtcgaaaaactggaaaaatctactaaacccatcgtcgcagcaatcaatggcagctgtctgggaggcggtctagaggtcgctattagctgtcagtatcgaatcgcaacaaaagatcgcaaaactgtgctcggaacccctgaggtgttgctgggcgccctgccgggtgcaggagggacccagcggctgccaaaaatggttggggttccggccgccctggatatgatgctaacggggagaagcattcgcgcggatagagctaaaaagatgggactcgtggaccaacttgtggagccccttggccctggcttaaaacctccggaagagaggactattgagtatctcgaggaagttgcaattacattcgccaagggattggccgataagaaaatatcaccaaagagggacaagggactagtggagaaactcaccgcctatgcaatgactattccattcgtgaggcagcaagtttataagaaagttgaggaaaaagtgcgcaagcagactaaaggattatatcccgcccctctgaagatcattgacgtagtgaagactggaatagaacaaggatcagatgccggctacctgtgtgagtcacagaagttcggagagctggtcatgaccaaggaatccaaggccttgatgggactgtatcacggacaggtgttatgtaaaaagaacaaattcggcgcccctcagaaggacgtcaagcacttggctattctgggagccgggctaatgggggctgggatagctcaggtcagtgtggacaaagggctgaagacaatcctcaaagatgcaacattgacagccctcgacagaggtcagcagcaggtgtttaaagggcttaatgataaggtgaaaaaaaaggcacttactagctttgaaagagactctattttctcaaatttgacgggacagctagattatcaagggttcgaaaaggccgacatggtgatcgaggccgtgtttgaggacttgtcactgaagcatagagtcctcaaagaggtggaagctgtgattccagatcactgtatcttcgcctctaacacaagtgccctacccatttccgaaatcgccgcagtcagcaagagaccagaaaaggtaatcgggatgcattattttagtcctgtggataagatgcagctgctggagattattactaccgaaaagactagcaaggacactagtgcttccgccgtggccgtgggactgaaacaggggaaggtgataatcgtcgtgaaggacggtcccgggttctacactactagatgtcttgcacctatgatgagcgaggtcattagaattttgcaggagggtgtggaccctaagaaactcgacagcctgaccactagtttcggatttccggttggcgccgctaccctcgtggatgaggtcggagtggacgttgctaagcacgtagctgaagaccttggaaaggttttcggagagaggttcggaggcggaaaccccgaacttctgactcagatggtgagcaagggatttctggggcggaaatctgggaaaggcttctacatataccaggaaggtgtgaagaggaaagaccttaactcagacatggacagcatcctggcgtctcttaaactacctcctaagtccgaggtgtcctctgatgaggatatccagttccgcctggtaacccgcttcgtaaacgaagccgtgatgtgcctgcaggaagggatcctcgcaacccccgcggaaggtgacattggggcagtgttcggcctcggtttccccccatgtctcggaggcccctttaggtttgtcgacttatacggtgctcaaaagatagtagaccgactaaagaagtatgaggccgcctatggaaagcagttcaccccctgccagttactcgcggaccacgccaatagtcctaacaaaaagttttatcagtag

SEQ ID NO: 3806 - DNA, 783 bp, Artificial Sequence
  derived and/or modified sequence
atggaaagtaaaggtatgtggcaattgtttgagctgaccctgccgatccaatcaatgcttgccgcctgcaaaaccctccaggaagttacgcagctctctcaagaggcgcagaggattgttgagaaactcgagaaatccactaagcccattgtggccgcaattaacgggagttgtctgggcggcgggctggaagttgccatctcctgtcagtatagaattgctaccaaggaccgaaaaaccgtgttggggacacccgaggttcttctgggcgctcttccaggagcagggggaacacaaagactgcctaagatggtaggcgtaccagccgctctcgacatgatgctgaccggacgttccatccgggctgaccgggctaaaaaaatgggactcgtggaccagctggttgaacccctaggacctgggctgaagcctcctgaggaacgtacaatcgaataccttgaagaagtcgccataacgtttgccaagggcttggccgataaaaagatttccccaaaacgggataaagggctggtggagaagctaacggcttacgccatgaccattccatttgtaaggcagcaagtctataagaaagtggaggagaaagtccgaaagcagacaaagggcttatatccagctcctctgaaaatcatagatgtcgtgaagacgggcatagagcagggatcagacgccggctacctctgtgaatctcaagtcaatttattccccttcaacgtgctcctgtccgtaaaaggcaagctcaaaattcagtctagtgtgtag

SEQ ID NO: 3807 - DNA, 3037 bp, Artificial Sequence
  derived and/or modified sequence
cggccactcggcatctgggttttagtcaggcagtgctccaggcgcctggctgccaggctacgggagaaaagtcctccgctcggccgcacccgttagaggcgctctccactgctgtcctcttcagctcaagatggtggcctgccgggcgattggcatcctcagccgcttttctgccttcaggatcctccgctcccgaggttatatatgccgcaattttacagggtcttctgctttgctgaccagaacccatattaactatggagtcaaaggggatgtggcagttgttcgaattaactctcccaattcaaaggtaaatacactgagtaaagagctacattcagagttctcagaagttatgaatgaaatctgggctagtgatcaaatcagaagtgccgtccttatctcatcaaagccaggctgctttattgcaggtgctgatatcaacatgttagccgcttgcaagacccttcaagaagtaacacagctatcacaagaagcacagagaatagttgagaaacttgaaaagtccacaaagcctattgtggctgccatcaatggatcctgcctgggaggaggacttgaggttgccatttcatgccaatacagaatagcaacaaaagacagaaaaacagtattaggtacccctgaagttttgctgggggccttaccaggagcaggaggcacacaaaggctgcccaaaatggtgggtgtgcctgctgctttggacatgatgctgactggtagaagcattcgtgcagacagggcaaagaaaatgggactggttgaccaactggtggaacccctgggaccaggactaaaacctccagaggaacggacaatagaatacctagaagaagttgcaattacttttgccaaaggactagctgataagaagatctctccaaagagagacaagggattggtggaaaaattgacagcgtatgccatgactattccatttgtcaggcaacaggtttacaaaaaagtggaagaaaaagtgcgaaagcagactaaaggcctttatcctgcacctctgaaaataattgatgtggtaaagactggaattgagcaagggagtgatgccggttatctctgtgaatctcagaaatttggagagcttgtaatgaccaaagaatcaaaggccttgatgggactctaccatggtcaggtcctgtgcaagaagaataaatttggagctccacagaaggatgttaagcatctggctattcttggtgcagggctgatgggagcaggcatcgcccaagtctccgtggataaggggctaaagactatacttaaagatgccaccctcactgcgctagaccgaggacagcaacaagtgttcaaaggattgaatgacaaagtgaagaagaaagctctaacatcatttgaaagggattccatcttcagcaacttgactgggcagcttgattaccaaggttttgaaaaggccgacatggtgattgaagctgtgtttgaggaccttagtcttaagcacagagtgctaaaggaagtagaagcggtgattccagatcactgtatctttgccagtaacacatctgctctcccaatcagtgaaatcgctgctgtcagcaaaagacctgagaaggtgattggcatgcactacttctctcccgtggacaagatgcagctgctggagattatcacgaccgagaaaacttccaaagacaccagtgcttcagctgtagcagttggtctcaagcaggggaaggtcatcattgtggttaaggatggacctggcttctatactaccaggtgtcttgcgcccatgatgtctgaagtcatccgaatcctccaggaaggagttgacccgaagaagctggattccctgaccacaagctttggctttcctgtgggtgccgccacactggtggatgaagttggtgtggatgtagcgaaacatgtggcggaagatctgggcaaagtctttggggagcggtttggaggtggaaacccagaactgctgacacagatggtgtccaagggcttcctaggtcgtaaatctgggaagggcttttacatctatcaggagggtgtgaagaggaaggatttgaattctgacatggatagtattttagcgagtctgaagctgcctcctaagtctgaagtctcatcagacgaagacatccagttccgcctggtgacaagatttgtgaatgaggcagtcatgtgcctgcaagaggggatcttggccacacctgcagagggagacatcggagccgtctttgggcttggcttcccgccttgtctgggagggcctttccgctttgtggatctgtatggcgcccagaagatagtggaccggctcaagaaatatgaagctgcctatggaaaacagttcaccccatgccagctgctagctgaccatgctaacagccctaacaagaagttctaccagtgagcaggcctcatgcctcgctcagtcagtgcactaaccccagctgccggcagtgctggttctccaacagagtggtgtctagatttatcagagtaacgagaagacaaactccggcactgggtttgctccctgattaaagtgccttcagccaagaccatctctccctcctggtgaagtgtgacttcgaattagtttgcacttcctgttggaaggtagagcccactgctcattgtataagccccgaggcctagagtggcagccaagagccatctgaagccacctctctgcctgttcctcccaagaggccagggtggccaggggtggtgagggcagttctgcacccagccaaacacataacaataaaaaccaaactctgtgtcagcatctttgcccttctggtttaaacgcctccttcaaaaagcaatctggaagaaagccctgtgctttgggggagtaagaatgtgtgtgcagaattctaggcagcaccttagggagggactgggatgagagaaagtgggacctggtgggctcaaccacacacacctgtctgtgcagatgctttgcccaggcttctcaccacggtgtaccgggatattaaacctctttccccagcctgga

SEQ ID NO: 3808 - DNA, 1485 bp, Artificial Sequence
  derived and/or modified sequence
ttcagctcaagatggtggcctgccgggcgattggcatcctcagccgcttttctgccttcaggatcctccgctcccgaggttatatatgccgcaattttacagggtcttctgctttgctgaccagaacccatattaactatggagtcaaaggggatgtggcagttgttcgaattaactctcccaattcaaagcatgttagccgcttgcaagacccttcaagaagtaacacagctatcacaagaagcacagagaatagttgagaaacttgaaaagtccacaaagcctattgtggctgccatcaatggatcctgcctgggaggaggacttgaggttgccatttcatgccaatacagaatagcaacaaaagacagaaaaacagtattaggtacccctgaagttttgctgggggccttaccaggagcaggaggcacacaaaggctgcccaaaatggtgggtgtgcctgctgctttggacatgatgctgactggtagaagcattcgtgcagacagggcaaagaaaatgggactggttgaccaactggtggaacccctgggaccaggactaaaacctccagaggaacggacaatagaatacctagaagaagttgcaattacttttgccaaaggactagctgataagaagatctctccaaagagagacaagggattggtggaaaaattgacagcgtatgccatgactattccatttgtcaggcaacaggtttacaaaaaagtggaagaaaaagtgcgaaagcagactaaaggcctttatcctgcacctctgaaaataattgatgtggtaaagactggaattgagcaagggagtgatgccggttatctctgtgaatctcaggtaaacttatttcctttcaatgttttattatcagttaaaggaaaactaaagatccaatcctctgtataaagctgaaaaaggaaaaaaatatccaaagcctagtaaaaatttttttcttccagtgcttatcatctcttatgattaatctcagtgagcaagtggatgctaagaataccctaatggggccaggcgtggtggtttacccctgtaatcccaacattctgggaggccgaggtgggcagatcgtttgagctcaggagttcaagaccagcatgtgcaacatggcaaaaccccatctttacaaaaactacaaaagttagccaggcatggtggcatgcacccacagtcccagctacttgcagggctgaggcaggagaattgtttgagtccaggaggtcagggctgcagtgagctaagtaagatcgcaccactgcattccagcctgggtgacaaagtgagaccctgtctccaaaaaaaaagaaaaaaaagaaaaaaccctatggtctgcagatgtttgaacttacttttagtaataaggttgtctctacgaagggcaggaacagagttctaatcctttcaaaacaagtcacttgggtgttttttgttccgcacttgggcaggttttattgagac

SEQ ID NO: 3809 - DNA, 2292 bp, Artificial Sequence
  derived and/or modified sequence
atggtggcctgccgggccatcggcatcctgagccgcttcagcgccttccgcatcctgcggagccggggctacatctgcaggaacttcaccggcagcagcgccctgctgaccaggacccacatcaactatggagtgaagggagatgtggccgtggtgcgcatcaacagccccaacagcaaggtgaacaccctgagcaaggagctgcacagcgagttcagcgaggtgatgaatgagatctgggccagtgaccagatccgctctgctgtgctgatcagcagcaagccaggctgcttcatcgccggggctgacatcaacatgctggccgcctgcaagaccctgcaggaggtgacccagctgagccaggaggcccagagaattgtggagaagctggagaagagcaccaagcccatcgtggccgccatcaatggcagctgcctgggcggcggcctggaggtggccatcagctgccagtaccgcatcgccaccaaggacaggaagacagtgctgggcaccccagaggtgctgctgggcgccctgcccggggccggcggcacccagaggctgcccaagatggtgggcgtgcctgctgccctggacatgatgctgaccggccgcagcatccgggctgaccgggccaagaagatgggcctggtggaccagctggtggagcccctgggccctggcctgaagcccccagaggagaggaccatcgagtacctggaggaggtggccatcacctttgccaagggcctggccgacaagaagatcagccccaagagggacaagggcctggtggagaagctgacagcctatgccatgaccatcccctttgtgcggcagcaggtgtacaagaaggtggaggagaaggtgaggaagcagaccaagggcctgtacccagcccccctgaagatcattgatgtggtgaagacaggcatcgagcagggcagtgatgctggctacctgtgtgagagccagaagtttggagagctggtgatgaccaaggagagcaaggccctgatgggcctgtaccacggccaggtgctgtgcaagaagaacaagtttggagccccccagaaggatgtgaagcacctggccatcctgggcgccggcctgatgggcgccggcatcgcccaggtgtctgtggacaagggcctgaagaccatcctgaaggatgccaccctgacagccctggaccggggccagcagcaggtgttcaagggcctgaatgacaaggtgaagaagaaggccctgaccagctttgagcgggacagcatcttcagcaacctgaccggccagctggactaccagggctttgagaaggctgacatggtgattgaagctgtgtttgaggacctgagcctgaagcaccgggtgctgaaggaggtggaggccgtcatcccagaccactgcatctttgccagcaacaccagcgccctgcccatcagcgagattgctgctgtgtccaagaggcctgagaaggtgattggcatgcactacttcagccctgtggacaagatgcagctgctggagatcatcaccacagagaagaccagcaaggacaccagcgccagcgctgtggccgtgggcctgaagcagggcaaggtgatcatcgtggtgaaggatggccctggcttctacaccacccgctgcctggcccccatgatgtctgaggtgatccgcatcctgcaggagggcgtggaccccaagaagctggacagcctgaccaccagctttggcttccctgtgggcgccgccaccctggtggatgaggtgggcgtggatgtggccaagcacgtggccgaggacctgggcaaggtgtttggagagagatttggaggcggcaaccctgagctgctgacccagatggtgtccaagggcttcctgggcaggaagagcggcaagggcttctacatctaccaggagggcgtgaagaggaaggacctgaacagcgacatggacagcatcctggccagcctgaagctgccccccaagtctgaggtgtccagtgatgaggacatccagttccggctggtgaccaggtttgtgaatgaagctgtgatgtgcctgcaggagggcatcctggccaccccagctgagggggacatcggggctgtgtttggcctgggcttccccccctgcctgggcggccccttccgctttgtggacctgtatggagcccagaagatcgtggaccggctgaagaagtatgaggccgcctacggcaagcagttcaccccctgccagctgctggccgaccacgccaacagccccaacaagaagttctaccagtag

SEQ ID NO: 3810 - DNA, 783 bp, Artificial Sequence
  derived and/or modified sequence
atggagagcaagggcatgtggcagctgtttgagctgaccctgcccatccagagcatgctggccgcctgcaagaccctgcaggaggtgacccagctgagccaggaggcccagagaattgtggagaagctggagaagagcaccaagcccatcgtggccgccatcaatggcagctgcctgggcggcggcctggaggtggccatcagctgccagtacagaattgccaccaaggacaggaagacagtgctgggcaccccagaggtgctgctgggcgccctgcctggagctgggggcacccagaggctgcccaagatggtgggcgtgcctgctgccctggacatgatgctgaccggccgcagcatccgggctgaccgggccaagaagatgggcctggtggaccagctggtggagcccctgggccctggcctgaagcccccagaggagaggaccatcgagtacctggaggaggtggccatcacctttgccaagggcctggccgacaagaagatcagccccaagagggacaagggcctggtggagaagctgacagcctatgccatgaccatcccctttgtgcggcagcaggtgtacaagaaggtggaggagaaggtgaggaagcagaccaagggcctgtacccagcccccctgaagatcattgatgtggtgaagacaggaattgagcagggcagtgatgctggctacctgtgtgagagccaggtgaacctcttccccttcaacgtgctgctgtctgtgaagggcaagctgaagatccagagctctgtgtag

SEQ ID NO: 3811 - DNA, 2292 bp, Artificial Sequence
  derived and/or modified sequence
atggtggcctgccgggccatcggcatcctgagccggttcagcgcctttaggattctacgcagcagaggctacatctgtaggaatttcactggctccagtgcccttttgacccgcacccacataaactatggagttaaaggggatgttgccgtggtacgaataaactcacccaactccaaggtgaatacgctctctaaggagctgcacagtgagttctctgaggtgatgaacgaaatatgggctagtgaccagataaggagtgcagttctgatatccagtaaaccaggatgctttatcgccggcgccgatataaacatgctggcagcttgcaaaacccttcaagaagtgactcagctgtcccaggaagcccagcgcattgttgagaagcttgagaaatctacgaagcccatcgttgctgctataaacggttcctgtctgggcggcgggctcgaggttgccattagctgccagtacagaatcgccacaaaggacagaaaaactgttttgggaacaccagaggttcttctgggcgctctgcctggtgctggaggcacacagaggctccccaaaatggttggcgtgcctgccgccctcgatatgatgctgaccgggagaagtatcagggcagatagggccaagaagatggggttagtcgaccagctcgtggagcccctgggcccagggctaaaaccccccgaggaacgtactatagaatacctcgaggaagtggccattactttcgcgaaaggattggccgataagaagattagtccaaaaagggataagggactggtggagaaactgaccgcttacgccatgaccatcccattcgtcagacagcaagtctacaagaaggtggaggaaaaggtcaggaagcagacaaaaggcctctatcctgccccactcaaaattattgacgtggtcaagacgggcatcgagcaggggtcggacgcagggtatttgtgcgagtcacagaaattcggagaattggtgatgactaaagagagcaaggcactcatgggattgtatcatggtcaagtgttgtgcaagaagaataagtttggagccccacagaaggacgtcaaacacctggcgattctgggagcagggctaatgggcgccggcattgcccaggtgtcggtggataagggtctcaagacgatacttaaggatgccacactgacggcactcgacaggggccagcagcaagtgttcaagggtcttaacgacaaagtgaaaaagaaggccctgacctcttttgagagggatagcatcttttcaaacttgacaggtcaactggattaccagggctttgaaaaagctgacatggtgatagaagccgtttttgaggacctgtccctcaaacaccgcgtgctcaaggaggtggaggccgtcatccccgatcactgcatatttgccagcaacacttctgctttgcctatctcagagattgcagcagtttccaaacgaccagaaaaggttattggcatgcattacttcagtcctgtagataagatgcagttgctggagatcattaccactgagaagaccagtaaggatacctctgcctcagcagttgcagtcggactgaaacaggggaaggttatcatcgtggttaaagacggccccggcttctacactacgcgttgtttagcacctatgatgagcgaagtcattcgaatcctacaagagggcgttgaccccaagaagctggactcattgactacttctttcggatttcccgttggggccgccaccttggtagatgaggtgggcgtcgatgttgctaaacacgttgcagaagatctggggaaggtcttcggggagcggtttggaggagggaatccagaactgcttacccagatggttagtaaaggcttcctcgggcgaaaatctggcaagggcttctatatctaccaagaaggggtcaagagaaaggatttgaattctgacatggactccattcttgcatccctgaagcttccacctaaatcagaagttagctcagacgaggatattcagtttcgtctggtaaccaggttcgtaaatgaagcggtcatgtgcctccaagagggaattcttgcgacacccgctgaaggcgatatcggcgcagtgttcggcttgggttttccgccctgcttgggaggaccatttcggttcgttgacttatacggtgcccagaagattgttgatcggctgaaaaaatacgaggctgcatatggcaagcaattcacgccatgccaacttctcgcagatcatgctaactcaccaaataaaaagttttatcagtag

SEQ ID NO: 3812 - DNA, 783 bp, Artificial Sequence
  derived and/or modified sequence
atggagagcaagggcatgtggcagctgttcgagctgaccctgcccatacagtccatgctcgccgcctgcaagacgcttcaggaagtgacacaacttagtcaagaggcacaacggattgtggaaaaacttgagaagagcaccaagcctatcgtggccgctataaatggctcatgcctgggggggggcctcgaagttgccatttcttgtcagtatcgtatagccaccaaggaccggaaaactgtgctgggcacccccgaagtgctgctgggggctcttccaggggcagggggcactcagcgcctccctaagatggtaggggtgcccgccgccctcgatatgatgctcactggaaggtccatcagagctgaccgggctaaaaaaatgggtctggtcgatcagttggtggaaccacttggcccggggctgaagcctcccgaagagagaacaattgagtatctggaagaggttgctataacattcgcgaagggcctggctgataagaaaataagtccaaagagggacaaagggctcgttgagaagctgacggcttacgccatgacaatccctttcgtccgtcagcaggtgtataaaaaagtagaggaaaaggttcgtaagcagaccaaagggctatacccagcccctctgaagataatcgacgtcgtgaagacaggcatcgagcaagggtctgacgccggctatctctgcgagagccaggttaatctattcccatttaacgttctgctgtccgtcaagggtaagttgaagatccagagtagcgtttag

SEQ ID NO: 3813 - DNA, 2292 bp, Artificial Sequence
  derived and/or modified sequence
atggtggcctgtcgagctatcgggattctgtcccgcttttcagccttccggatccttcggtctaggggctacatttgcaggaacttcacaggtagctccgctctgctcacacgaactcacatcaattatggagttaagggagacgtcgccgtggtccgcatcaatagcccaaattctaaggtgaatactctgagcaaagaactgcattcagagttcagtgaggtgatgaacgagatttgggcctccgaccagatccgcagtgccgtgcttatctctagcaagccaggctgcttcatcgcgggagctgacattaatatgctggccgcttgtaaaacactgcaggaggtcactcagctgtcgcaggaagcccagagaatcgtagaaaagctcgaaaaatctaccaagccgatcgtcgccgctatcaacggatcttgtctagggggagggctcgaggtggcaataagctgtcagtatcgaatagcaactaaggatcggaaaactgtgttgggcactcccgaagttctgctcggagcactccccggagccggaggaacccaaagactgccgaagatggtgggcgttcccgcagctctggatatgatgctgacaggaaggtctattcgggctgaccgtgccaagaaaatgggccttgttgaccagctggtggagccactaggacccggattgaagccccctgaggagaggactattgagtatctggaggaggtggcaatcacgtttgccaaaggcctggctgacaaaaagatatccccaaagcgagataagggacttgtagaaaagttgacagcttacgctatgaccattcccttcgtcagacaacaagtatacaagaaggtggaggagaaagtgcgcaagcagactaaaggcctgtaccccgctcccttgaaaatcatagatgtggtgaaaaccggaatcgaacagggatctgatgccggttatctttgtgagtcccaaaagtttggcgagcttgttatgaccaaagaatccaaggctctcatggggctgtatcacggccaagtgctttgtaagaagaacaaatttggcgcaccccagaaagacgttaagcatttagccatcctgggcgctggcttaatgggcgcagggatcgcccaggtttccgtggacaagggtctgaaaactatattgaaagatgccactctcacggcacttgaccggggacaacagcaggtatttaaggggctgaacgacaaggtgaagaaaaaagctttaaccagcttcgaaagggacagtatattcagcaacctcaccggtcagctggattaccagggatttgagaaggcggacatggtgattgaggccgtcttcgaagatctctcactgaagcacagggtgctgaaggaggtggaggcggtgattccagatcattgcatcttcgcctcaaacaccagtgcgctccccatttccgagattgctgcggtgtccaagagacctgaaaaggtgattggcatgcactacttcagtccagtggataaaatgcaactgttagagattatcacaactgaaaagacgtctaaagataccagcgcctccgccgtggccgtgggtctgaaacagggtaaagtgatcatcgttgtgaaagatgggcctggcttttacacaacgagatgcctcgcccctatgatgtcggaggtgatccggatcctacaggaaggcgtggacccaaagaaattggattccttgacaactagctttgggtttcccgtgggagcagcaacactggtcgatgaagtgggagtggatgtggctaagcatgtggcagaggaccttggcaaggtgttcggtgaacggttcggcggtggcaacccagagttgcttacccagatggtatccaaaggctttttgggcagaaagtcaggaaagggcttttacatttatcaggagggagtcaagaggaaggatttaaactctgacatggacagcatactcgcttctcttaaactccccccaaaaagtgaagtcagtagtgacgaggatattcagtttagattggttactcggttcgtgaacgaggcagttatgtgcctgcaggaaggcattctggctactcccgcagagggtgacattggcgcagtgtttggccttggctttcccccttgcctcgggggtccattcaggttcgttgatctttacggagcccagaagatcgtggaccgcttgaaaaagtacgaagctgcctatggaaagcagttcaccccctgccagttgctggcagatcacgccaacagtcctaataagaaattttaccagtag

SEQ ID NO: 3814 - DNA, 783 bp, Artificial Sequence
  derived and/or modified sequence
atggaatcaaagggcatgtggcagctgttcgaactgactctcccaatccagtcaatgctggccgcttgcaagacactccaggaggtcactcaactctcccaggaagcccagcggatcgttgagaaactggaaaaatccacaaaaccaattgtggccgctatcaacgggtcctgcctcggtggtggcctcgaggtcgctattagttgtcaatatcgaattgccaccaaggaccggaaaactgttctgggtacccctgaagtccttcttggcgctctgccgggagccggaggaacacagcgcttaccgaaaatggtgggggtgcctgccgcactggacatgatgttgaccggaaggtctattcgggcagatagagccaagaaaatgggcctcgtggaccagcttgtcgaacccctgggcccaggtctaaaaccacctgaggaacgaacgattgagtaccttgaggaggtggctattaccttcgctaaagggctggcagataagaagataagtcctaagagagacaagggcctggtggagaagcttactgcgtacgccatgacgatcccatttgttcggcagcaggtgtacaagaaagttgaagaaaaggtccggaagcagacaaaagggctgtatcccgcacccctcaaaatcatcgacgttgttaaaacaggcattgagcagggtagtgatgccggatacttgtgtgagagccaggtgaacctgtttccatttaatgtactgctaagtgtcaagggcaagctcaagatacaaagttccgtctag

SEQ ID NO: 3815 - DNA, 2292 bp, Artificial Sequence
  derived and/or modified sequence
atggtggcctgcagagccatcggcatcctgagcagattcagcgccttcagaatcctgagaagcagaggctacatctgcagaaacttcaccggcagcagcgccctgctgaccagaacccacatcaactacggcgtgaagggcgacgtggccgtggtgagaatcaacagccccaacagcaaggtgaacaccctgagcaaggagctgcacagcgagttcagcgaggtgatgaacgagatctgggccagcgaccagatcagaagcgccgtgctgatcagcagcaagcccggctgcttcatcgccggcgccgacatcaacatgctggccgcctgcaagaccctgcaggaggtgacccagctgagccaggaggcccagagaatcgtggagaagctggagaagagcaccaagcccatcgtggccgccatcaacggcagctgcctgggcggcggcctggaggtggccatcagctgccagtacagaatcgccaccaaggacagaaagaccgtgctgggcacccccgaggtgctgctgggcgccctgcccggcgccggcggcacccagagactgcccaagatggtgggcgtgcccgccgccctggacatgatgctgaccggcagaagcatcagagccgacagagccaagaagatgggcctggtggaccagctggtggagcccctgggccccggcctgaagccccccgaggagagaaccatcgagtacctggaggaggtggccatcaccttcgccaagggcctggccgacaagaagatcagccccaagagagacaagggcctggtggagaagctgaccgcctacgccatgaccatccccttcgtgagacagcaggtgtacaagaaggtggaggagaaggtgagaaagcagaccaagggcctgtaccccgcccccctgaagatcatcgacgtggtgaagaccggcatcgagcagggcagcgacgccggctacctgtgcgagagccagaagttcggcgagctggtgatgaccaaggagagcaaggccctgatgggcctgtaccacggccaggtgctgtgcaagaagaacaagttcggcgccccccagaaggacgtgaagcacctggccatcctgggcgccggcctgatgggcgccggcatcgcccaggtgagcgtggacaagggcctgaagaccatcctgaaggacgccaccctgaccgccctggacagaggccagcagcaggtgttcaagggcctgaacgacaaggtgaagaagaaggccctgaccagcttcgagagagacagcatcttcagcaacctgaccggccagctggactaccagggcttcgagaaggccgacatggtgatcgaggccgtgttcgaggacctgagcctgaagcacagagtgctgaaggaggtggaggccgtgatccccgaccactgcatcttcgccagcaacaccagcgccctgcccatcagcgagatcgccgccgtgagcaagagacccgagaaggtgatcggcatgcactacttcagccccgtggacaagatgcagctgctggagatcatcaccaccgagaagaccagcaaggacaccagcgccagcgccgtggccgtgggcctgaagcagggcaaggtgatcatcgtggtgaaggacggccccggcttctacaccaccagatgcctggcccccatgatgagcgaggtgatcagaatcctgcaggagggcgtggaccccaagaagctggacagcctgaccaccagcttcggcttccccgtgggcgccgccaccctggtggacgaggtgggcgtggacgtggccaagcacgtggccgaggacctgggcaaggtgttcggcgagagattcggcggcggcaaccccgagctgctgacccagatggtgagcaagggcttcctgggcagaaagagcggcaagggcttctacatctaccaggagggcgtgaagagaaaggacctgaacagcgacatggacagcatcctggccagcctgaagctgccccccaagagcgaggtgagcagcgacgaggacatccagttcagactggtgaccagattcgtgaacgaggccgtgatgtgcctgcaggagggcatcctggccacccccgccgagggcgacatcggcgccgtgttcggcctgggcttccccccctgcctgggcggccccttcagattcgtggacctgtacggcgcccagaagatcgtggacagactgaagaagtacgaggccgcctacggcaagcagttcaccccctgccagctgctggccgaccacgccaacagccccaacaagaagttctaccagtag

SEQ ID NO: 3816 - DNA, 783 bp, Artificial Sequence
  derived and/or modified sequence
atggagagcaagggcatgtggcagctgttcgagctgaccctgcccatccagagcatgctggccgcctgcaagaccctgcaggaggtgacccagctgagccaggaggcccagagaatcgtggagaagctggagaagagcaccaagcccatcgtggccgccatcaacggcagctgcctgggcggcggcctggaggtggccatcagctgccagtacagaatcgccaccaaggacagaaagaccgtgctgggcacccccgaggtgctgctgggcgccctgcccggcgccggcggcacccagagactgcccaagatggtgggcgtgcccgccgccctggacatgatgctgaccggcagaagcatcagagccgacagagccaagaagatgggcctggtggaccagctggtggagcccctgggccccggcctgaagccccccgaggagagaaccatcgagtacctggaggaggtggccatcaccttcgccaagggcctggccgacaagaagatcagccccaagagagacaagggcctggtggagaagctgaccgcctacgccatgaccatccccttcgtgagacagcaggtgtacaagaaggtggaggagaaggtgagaaagcagaccaagggcctgtaccccgcccccctgaagatcatcgacgtggtgaagaccggcatcgagcagggcagcgacgccggctacctgtgcgagagccaggtgaacctgttccccttcaacgtgctgctgagcgtgaagggcaagctgaagatccagagcagcgtgtag

SEQ ID NO: 3817 - protein, 147 aa, Artificial Sequence
  derived and/or modified sequence
MGHFTEEDKATITSLWGKVNVEDAGGETLGRLLVVYPWTQRFFDSFGNLSSASAIMGNPKVKAHGKKVLTSLGDAIKHLDDLKGTFAQLSELHCDKLHVDPENFKLLGNVLVTVLAIHFGKEFTPEVQASWQKMVTGVASALSSRYH

SEQ ID NO: 3818 - protein, 158 aa, Artificial Sequence
  derived and/or modified sequence
MGHFTEEDKATITSLWGKVNVEDAGGETLGRLLVVYPWTQRFFDSFGNLSSASAIMGNPKVKAHGKKVLTSLGDAIKHLDDLKGTFAQLSELHCDKLHVDPENFKLLGNVLVTVLAIHFGKEFTPEVQASWQKMDWSGQCPVLQIPLSSLPMMQSFQG

SEQ ID NO: 3819 - protein, 137 aa, Artificial Sequence
  derived and/or modified sequence
MVVLGEMKRKVLPLHFLPFMRLLVVYPWTQRFFDSFGNLSSASAIMGNPKVKAHGKKVLTSLGDAIKHLDDLKGTFAQLSELHCDKLHVDPENFKLLGNVLVTVLAIHFGKEFTPEVQASWQKMVTGVASALSSRYH

SEQ ID NO: 3820 - DNA, 444 bp, Artificial Sequence
  derived and/or modified sequence
atgggacacttcactgaggaagataaagccacaatcacctctctgtggggcaaggtgaatgtcgaagatgctgggggagaaacattaggcagactcctggtcgtctatccgtggactcaaaggttcttcgactcctttggcaacctgtcgagcgcaagcgcgatcatgggcaaccctaaggttaaggctcacggcaaaaaggtgctcaccagcctgggggacgccattaagcacctggacgacctgaagggaacatttgcacagctgagcgagctgcattgcgacaagttgcacgtggatccagaaaatttcaaactgcttggaaatgtccttgttaccgttctggccattcattttggcaaagaatttacccccgaggtccaagcctcctggcagaagatggtgaccggagtcgcctcggccctatctagccggtatcactag

SEQ ID NO: 3821 - DNA, 477 bp, Artificial Sequence
  derived and/or modified sequence
atgggccattttaccgaggaggataaggcgaccattaccagtctgtggggcaaggtaaatgtggaggacgcagggggcgagactctcggacgactgctcgtagtttacccatggactcaacgcttcttcgattccttcggaaacttgagctctgcgagcgctataatggggaaccccaaagtaaaagcccacggaaagaaggtgctcacctcactgggggacgccatcaagcacctcgatgatctaaaagggacattcgcacagctgtctgagttgcactgtgataagctgcatgtcgatcccgaaaatttcaaactgctgggcaacgtacttgtgactgtgctcgcaatccatttcggaaaggagtttactccagaggttcaagcgtcatggcagaagatggattggtcaggccagtgccccgtcttgcaaattcccttgtcatccttaccgatgatgcagtcttttcagggctag

SEQ ID NO: 3822 - DNA, 414 bp, Artificial Sequence
  derived and/or modified sequence
atggtcgtgttaggagagatgaagcgaaaggttttgcctctccacttcctcccctttatgcgcttactggtggtgtacccctggactcagagattttttgatagtttcggaaacttatcctctgctagtgccatcatgggaaaccccaaagtgaaagcccatggtaagaaagtcttgacatcactcggcgatgcaatcaaacacctggacgacttgaaaggtacatttgcacagttgtcagaactccactgtgacaagctccatgtggatcctgaaaacttcaaactcctgggaaatgtgcttgtgactgtgctggccatccatttcggtaaagagtttacacctgaagttcaagcctcctggcagaaaatggtaaccggcgtggcgtcggcactctccagcagataccactag

SEQ ID NO: 3823 - DNA, 444 bp, Artificial Sequence
  derived and/or modified sequence
atgggccatttcaccgaggaggacaaggccacaataacatccctctgggggaaagtgaacgtcgaggatgctggcggagagacactcggcaggctcctagtcgtctacccctggacccaaagattcttcgatagcttcggtaatctgagtagcgcctcagccatcatgggaaacccaaaagtcaaagcccacggtaagaaggtgctaacaagcctgggcgacgctattaagcacctggatgacctgaagggaacttttgcacagctaagcgagctgcattgtgataagctgcacgtggaccctgaaaactttaaactgctggggaatgttctcgtgaccgtcctggccattcactttgggaaagaatttactccagaagtccaggcatcatggcaaaaaatggtaacaggcgtagccagcgccttaagttctcggtatcactag

SEQ ID NO: 3824 - DNA, 602 bp, Artificial Sequence
  derived and/or modified sequence
ataaaaggaagcacccttcagcagttccacacactcgcttctggaacgtctgaggttatcaataagctcctagtccagacgccatgggtcatttcacagaggaggacaaggctactatcacaagcctgtggggcaaggtgaatgtggaagatgctggaggagaaaccctgggaaggctcctggttgtctacccatggacccagaggttctttgacagctttggcaacctgtcctctgcctctgccatcatgggcaaccccaaagtcaaggcacatggcaagaaggtgctgacttccttgggagatgccataaagcacctggatgatctcaagggcacctttgcccagctgagtgaactgcactgtgacaagctgcatgtggatcctgagaacttcaagctcctgggaaatgtgctggtgaccgttttggcaatccatttcggcaaagaattcacccctgaggtgcaggcttcctggcagaagatggtgactggagtggccagtgccctgtcctccagataccactgagctcactgcccatgatgcagagctttcaaggataggctttattctgcaagcaatcaaataataaatctattctgc

SEQ ID NO: 3825 - DNA, 560 bp, Artificial Sequence
  derived and/or modified sequence
ataaaaggaagcacccttcagcagttccacacactcgcttctggaacgtctgaggttatcaataagctcctagtccagacgccatgggtcatttcacagaggaggacaaggctactatcacaagcctgtggggcaaggtgaatgtggaagatgctggaggagaaaccctgggaaggctcctggttgtctacccatggacccagaggttctttgacagctttggcaacctgtcctctgcctctgccatcatgggcaaccccaaagtcaaggcacatggcaagaaggtgctgacttccttgggagatgccataaagcacctggatgatctcaagggcacctttgcccagctgagtgaactgcactgtgacaagctgcatgtggatcctgagaacttcaagctcctgggaaatgtgctggtgaccgttttggcaatccatttcggcaaagaattcacccctgaggtgcaggcttcctggcagaagatggactggagtggccagtgccctgtcctccagataccactgagctcactgcccatgatgcagagctttcaaggatag

SEQ ID NO: 3826 - DNA, 694 bp, Artificial Sequence
  derived and/or modified sequence
ggccatggttgtgaggcctccccagctatgtggaactgtaagtccggtaaacctctttcttttataaattgcccagtctcgggtatatcttcattagcagcgtgaaaacggacaaatacagcttcagtttcccctcactccactccccattaggggatagtttttgtccagattaaagaaaaacctattgtttatggtggtgctaggggaaatgaagaggaaagtcttgcctctccattttcttccgttcatgaggctcctggttgtctacccatggacccagaggttctttgacagctttggcaacctgtcctctgcctctgccatcatgggcaaccccaaagtcaaggcacatggcaagaaggtgctgacttccttgggagatgccataaagcacctggatgatctcaagggcacctttgcccagctgagtgaactgcactgtgacaagctgcatgtggatcctgagaacttcaagctcctgggaaatgtgctggtgaccgttttggcaatccatttcggcaaagaattcacccctgaggtgcaggcttcctggcagaagatggtgactggagtggccagtgccctgtcctccagataccactgagctcactgcccatgatgcagagctttcaaggataggctttattctgcaagcaatcaaataataaatctattctgctaagagatcaca

SEQ ID NO: 3827 - DNA, 1772 bp, Artificial Sequence
  derived and/or modified sequence
gaatgtatccagagaatcaacatacaatgagcaaaagtgaagcttttcctagacttgaccctcatcaaatctcctctgtccccactctcttctgaagaaggaaaggctggagtacaatggcgagatcttggctcactgcaacctccacctcctgggttcaactgattctcctgcctcagcctcccgagtagctgggactacaggcatccgccaccacacccggctaatttttgcatttttttagtagagacacagtttcaccacattggccaggctggtcttgaactcctgatctctggtgatcttcctgccttgtcctccctaagtgctgggattacaagcgtgaaccaccgcgcctggtctgatgaatacatgtaaagcttattgagcctcagaactctaactacagggtttcaatagcacagaaactctgagaagaaaaagaatgtcaaagttcctccctaaggagactgattagatgcaagtgtgtccggaattggtgggttcttggtctgacttcaagaatgaagccgcggaccctcacggtgagtattacagttcttgaagactgcgtgtccagagtttgttccttctgatgttcagatgtgtttggagttttttccttctggtgggttcgtggtctcgctagctcaggagtgaagctgcataccttcgcgtcctaggacagaatatggatgctgaaaaatgattctttcaaagtgctgagttgttgcctcacgcccagttgtctggcatctcttcactgaaactattacagttagatctcatctctatgggtggaaggcctcactggagctacagacaagaaggtgaaaaacggctgacaaaagaagtcctggtatcttctatggtgggagaagaaaactagctaaagggaagaataaattagagaaaaattggaatgactgaatcggaacaaggcaaaggctataaaaaaaattaagcagcagtatcctcttgggggccccttccccacactatctcaatgcaaatatctgtctgaaacggtccctggctaaactccacccatgggttggccagccttgccttgaccaatagccttgacaaggcaaacttgaccaatagtcttagagtatccagtgaggccaggggccggcggctggctagggatgaagaataaaaggaagcacccttcagcagttccacacactcgcttctggaacgtctgaggttatcaataagctcctagtccagacgccatgggtcatttcacagaggaggacaaggctactatcacaagcctgtggggcaaggtgaatgtggaagatgctggaggagaaaccctgggaaggctcctggttgtctacccatggacccagaggttctttgacagctttggcaacctgtcctctgcctctgccatcatgggcaaccccaaagtcaaggcacatggcaagaaggtgctgacttccttgggagatgccataaagcacctggatgatctcaagggcacctttgcccagctgagtgaactgcactgtgacaagctgcatgtggatcctgagaacttcaagctcctgggaaatgtgctggtgaccgttttggcaatccatttcggcaaagaattcacccctgaggtgcaggcttcctggcagaagatggtgactggagtggccagtgccctgtcctccagataccactgagctcactgcccatgatgcagagctttcaaggataggctttattctgcaagcaatcaaataataaatctattctgctaagagatcaca

SEQ ID NO: 3828 - DNA, 444 bp, Artificial Sequence
  derived and/or modified sequence
atgggccacttcacagaggaggacaaggccaccatcaccagcctgtggggcaaggtgaatgtggaggatgctggaggagagaccctgggccgcctgctggtggtgtacccctggacccagcgcttctttgacagctttggaaacctgagcagcgccagcgccatcatgggcaaccccaaggtgaaggcccacggcaagaaggtgctgaccagcctgggagatgccatcaagcacctggatgacctgaagggcacctttgcccagctgtctgagctgcactgtgacaagctgcacgtggaccctgagaacttcaagctgctgggcaatgtgctggtgacagtgctggccatccactttgggaaggagttcaccccagaggtgcaggcctcctggcagaagatggtgactggagtggccagcgccctgagcagccgctaccactag

SEQ ID NO: 3829 - DNA, 477 bp, Artificial Sequence
  derived and/or modified sequence
atgggccacttcacagaggaggacaaggccaccatcaccagcctgtggggcaaggtgaatgtggaggatgctggaggagagaccctgggccgcctgctggtggtgtacccctggacccagcgcttctttgacagctttggaaacctgagcagcgccagcgccatcatgggcaaccccaaggtgaaggcccacggcaagaaggtgctgaccagcctgggagatgccatcaagcacctggatgacctgaagggcacctttgcccagctgtctgagctgcactgtgacaagctgcacgtggaccctgagaacttcaagctgctgggcaatgtgctggtgacagtgctggccatccactttgggaaggagttcaccccagaggtgcaggcctcctggcagaagatggactggagcggccagtgccctgtgctgcagatccccctgagcagcctgcccatgatgcagagcttccagggctag

SEQ ID NO: 3830 - DNA, 414 bp, Artificial Sequence
  derived and/or modified sequence
atggtggtgctgggggagatgaagaggaaggtgctgcccctgcacttcctgcccttcatgaggctgctggtggtgtacccctggacccagcgcttctttgacagctttggaaacctgagcagcgccagcgccatcatgggcaaccccaaggtgaaggcccacggcaagaaggtgctgaccagcctgggagatgccatcaagcacctggatgacctgaagggcacctttgcccagctgtctgagctgcactgtgacaagctgcacgtggaccctgagaacttcaagctgctgggcaatgtgctggtgacagtgctggccatccactttgggaaggagttcaccccagaggtgcaggcctcctggcagaagatggtgactggagtggccagcgccctgagcagccgctaccactag

SEQ ID NO: 3831 - DNA, 444 bp, Artificial Sequence
  derived and/or modified sequence
atgggccacttcaccgaggaggacaaggccaccatcaccagcctgtggggcaaggtaaacgttgaggacgcaggtggtgaaactctgggtcgcctgctggttgtctacccatggacccaacgctttttcgactccttcgggaatcttagtagtgcatccgccatcatgggaaaccctaaggtgaaggcacatgggaagaaggtacttacaagtctgggcgatgccatcaaacatctcgacgatctcaaaggaaccttcgcccaactttcggagctgcactgtgataagcttcacgtggatccagaaaactttaaactgctgggtaatgtccttgttactgttctcgcaattcattttggtaaggagtttacaccagaagtgcaggccagttggcaaaaaatggtgaccggggtagctagtgccctttccagtcgatatcattag

SEQ ID NO: 3832 - DNA, 477 bp, Artificial Sequence
  derived and/or modified sequence
atgggccacttcaccgaggaggacaaggccaccatcaccagcctgtggggcaaagtgaatgtggaggatgctgggggggagacactcgggcgcctcctggtggtgtatccctggactcagcgatttttcgattccttcggcaatctctcttccgcaagcgctattatggggaatcctaaggtgaaggctcatggaaaaaaggtgctgaccagccttggcgatgcaatcaagcacctcgacgacctgaagggtacttttgctcagcttagcgagctgcattgcgacaagttacatgtggatcccgagaacttcaaactgcttggcaatgtcctggtgaccgtgctggccatccacttcggcaaagaattcacaccggaggttcaggcatcatggcagaagatggactggagtggtcaatgtccagtacttcagatccctctgtcttcattgcccatgatgcagagctttcaaggatag

SEQ ID NO: 3833 - DNA, 414 bp, Artificial Sequence
  derived and/or modified sequence
atggtggtgctgggcgagatgaagcggaaggtgctgcccctgcactttctgcctttcatgcggctgctggtcgtgtacccatggacccaaaggttttttgactccttcggcaaccttagcagtgcaagtgctatcatgggaaatcccaaagtcaaggctcatgggaaaaaagtcttgacatcgctgggtgatgccattaagcacttggacgatttaaagggaacgttcgcccagctgtccgagctgcactgtgataaattacatgtggatcctgaaaactttaaactgcttggaaacgtattggttaccgttctggcgatccactttggcaaagagtttacccccgaggtccaagctagttggcagaaaatggttaccggggtggcatcagccttatcctccagatatcactag

SEQ ID NO: 3834 - DNA, 444 bp, Artificial Sequence
  derived and/or modified sequence
atgggccacttcaccgaggaggacaaggccaccatcaccagcctgtggggtaaagtcaatgttgaagatgctggcggagagaccctcggacgcctcctggtggtttacccctggacacagaggtttttcgacagttttgggaatcttagttcagcttccgctatcatgggaaatcctaaggtgaaggctcatggtaagaaagtcctgacctctctcggcgatgctattaagcacctcgatgatctgaaaggcacgtttgcgcagctcagtgagctgcactgcgacaagctgcatgtggaccccgaaaatttcaagctgctgggaaacgtcctggttacagtactggccattcacttcggcaaagagttcacccctgaggtgcaagccagctggcagaagatggtaacgggcgtagcctccgctctttcctctcggtatcattag

SEQ ID NO: 3835 - DNA, 444 bp, Artificial Sequence
  derived and/or modified sequence
atgggccatttcaccgaagaagacaaggccaccattacaagtctgtggggcaaggtgaacgtggaagacgcgggaggagagaccctaggcaggttgcttgtggtctacccatggactcagaggttcttcgattcatttgggaatctgtcatctgctagcgcaatcatgggcaaccctaaggttaaggcccatggcaagaaggtcctgaccagcctgggggacgctatcaagcaccttgatgaccttaagggcactttcgctcaattaagcgaactccattgtgacaaactgcacgtggaccccgagaacttcaagctcctgggcaacgtgctggtaacagtgctggccatacacttcggaaaggagtttacaccagaagttcaggcgagctggcagaaaatggtaacaggggttgcatctgcactgagcagccgataccattag

SEQ ID NO: 3836 - DNA, 477 bp, Artificial Sequence
  derived and/or modified sequence
atgggccacttcactgaggaggataaagcaaccattacatcgctgtggggcaaggttaacgtggaagacgcaggcggtgagacattaggacgcctcctggtagtgtacccatggacacagaggttctttgacagcttcggcaatctttccagcgctagtgccataatgggcaatcccaaggttaaagcccacgggaagaaagtgttgacttctctgggcgacgccatcaagcaccttgacgatctgaagggcacatttgctcagctcagcgaattacactgtgataagctgcatgttgaccccgagaattttaagcttctggggaatgttctcgttacagtgctggctatccactttgggaaagaattcacccccgaggtacaggcctcatggcagaagatggactggtcaggccaatgtccagtgctgcaaattcccctatcctcgttgcctatgatgcagagcttccaagggtag

SEQ ID NO: 3837 - DNA, 414 bp, Artificial Sequence
  derived and/or modified sequence
atggtggtgctgggcgaaatgaagagaaaggtcttacctctacatttcctccccttcatgcgcctcctggtcgtatacccatggacacagcgttttttcgactctttcgggaatctgtcatccgccagcgctatcatggggaatcctaaggtcaaggcgcacgggaaaaaggtcctcacctctctgggtgacgccattaagcacctggacgatcttaagggaacgtttgctcagctgtcagagctgcattgtgacaagctgcacgtggatcctgagaatttcaagctgctgggcaatgtgctggtcaccgtgctggcgattcatttcggaaaagagttcacacccgaggtccaggccagctggcagaaaatggttactggtgtagcatcagcactgagttcaaggtaccactag

SEQ ID NO: 3838 - DNA, 444 bp, Artificial Sequence
  derived and/or modified sequence
atgggtcattttacagaggaagacaaagccaccattactagtctgtggggcaaggtgaatgtggaggatgcaggcggagagaccttggggagattgctggtagtgtacccttggactcagcggttctttgatagctttggaaatctgagctccgcctccgcaataatgggcaatcccaaagttaaagctcatggaaagaaggtgcttacctctttgggtgacgctataaagcatctggacgacctgaaaggaaccttcgctcagctttctgagctgcattgtgataagctgcatgtggaccctgaaaatttcaaactcttgggcaacgtgctcgttaccgttctggccatccatttcgggaaggaatttactcctgaagtgcaggcgagctggcaaaaaatggtgaccggcgtagcctcagccctatcatctcgatatcactag

SEQ ID NO: 3839 - DNA, 444 bp, Artificial Sequence
  derived and/or modified sequence
atgggccacttcaccgaggaggacaaggccaccatcaccagcctgtggggcaaggtgaacgtggaggacgccggcggcgagaccctgggcagactgctggtggtgtacccctggacccagagattcttcgacagcttcggcaacctgagcagcgccagcgccatcatgggcaaccccaaggtgaaggcccacggcaagaaggtgctgaccagcctgggcgacgccatcaagcacctggacgacctgaagggcaccttcgcccagctgagcgagctgcactgcgacaagctgcacgtggaccccgagaacttcaagctgctgggcaacgtgctggtgaccgtgctggccatccacttcggcaaggagttcacccccgaggtgcaggccagctggcagaagatggtgaccggcgtggccagcgccctgagcagcagataccactag

SEQ ID NO: 3840 - DNA, 477 bp, Artificial Sequence
  derived and/or modified sequence
atgggccacttcaccgaggaggacaaggccaccatcaccagcctgtggggcaaggtgaacgtggaggacgccggcggcgagaccctgggcagactgctggtggtgtacccctggacccagagattcttcgacagcttcggcaacctgagcagcgccagcgccatcatgggcaaccccaaggtgaaggcccacggcaagaaggtgctgaccagcctgggcgacgccatcaagcacctggacgacctgaagggcaccttcgcccagctgagcgagctgcactgcgacaagctgcacgtggaccccgagaacttcaagctgctgggcaacgtgctggtgaccgtgctggccatccacttcggcaaggagttcacccccgaggtgcaggccagctggcagaagatggactggagcggccagtgccccgtgctgcagatccccctgagcagcctgcccatgatgcagagcttccagggctag

SEQ ID NO: 3841 - DNA, 414 bp, Artificial Sequence
  derived and/or modified sequence
atggtggtgctgggcgagatgaagagaaaggtgctgcccctgcacttcctgcccttcatgagactgctggtggtgtacccctggacccagagattcttcgacagcttcggcaacctgagcagcgccagcgccatcatgggcaaccccaaggtgaaggcccacggcaagaaggtgctgaccagcctgggcgacgccatcaagcacctggacgacctgaagggcaccttcgcccagctgagcgagctgcactgcgacaagctgcacgtggaccccgagaacttcaagctgctgggcaacgtgctggtgaccgtgctggccatccacttcggcaaggagttcacccccgaggtgcaggccagctggcagaagatggtgaccggcgtggccagcgccctgagcagcagataccactag

SEQ ID NO: 3842 - protein, 499 aa, Artificial Sequence
  derived and/or modified sequence
MKHSLNALLIFLIITSAWGGSKGPLDQLEKGGETAQSADPQWEQLNNKNLSMPLLPADFHKENTVTNDWIPEGEEDDDYLDLEKIFSEDDDYIDIVDSLSVSPTDSDVSAGNILQLFHGKSRIQRLNILNAKFAFNLYRVLKDQVNTFDNIFIAPVGISTAMGMISLGLKGETHEQVHSILHFKDFVNASSKYEITTIHNLFRKLTHRLFRRNFGYTLRSVNDLYIQKQFPILLDFKTKVREYYFAEAQIADFSDPAFISKTNNHIMKLTKGLIKDALENIDPATQMMILNCIYFKGSWVNKFPVEMTHNHNFRLNEREVVKVSMMQTKGNFLAANDQELDCDILQLEYVGGISMLIVVPHKMSGMKTLEAQLTPRVVERWQKSMTNRTREVLLPKFKLEKNYNLVESLKLMGIRMLFDKNGNMAGISDQRIAIDLFKHQGTITVNEEGTQATTVTTVGFMPLSTQVRFTVDRPFLFLIYEHRTSCLLFMGRVANPSRS

SEQ ID NO: 3843 - DNA, 1500 bp, Artificial Sequence
  derived and/or modified sequence
atgaagcattcattgaacgccctgcttatattcctgataataactagtgcctggggcggctcaaagggccccctggatcagctggagaaaggaggagaaacagctcaatcggccgatcctcagtgggagcagctcaataataagaatttgtccatgccactcttaccagcggactttcataaggagaatactgtgacaaatgactggatacctgagggggaagaggatgatgattatctggacctcgagaagatctttagcgaagacgatgattacattgatatcgtcgactctctctcggtttctccaactgatagtgacgttagtgcaggtaatatactccagcttttccatggcaagagcaggattcaacgactcaacatcctcaatgcaaagtttgcatttaacttgtatcgagtgcttaaagaccaggtgaatacgttcgataatatcttcatagccccagttggaatttccaccgcaatgggtatgattagcctaggactgaagggtgaaacacacgagcaggtgcactcaattctgcattttaaggacttcgtcaatgcttcttccaagtacgaaatcaccactattcacaatctgttccgaaagctcactcaccgactgttccgccggaattttggatacactctgcgaagtgttaatgacttgtacattcagaaacagtttcccatcctcctggacttcaagacaaaggtgcgcgagtactacttcgccgaagcccaaatagccgatttcagtgaccctgctttcattagcaagactaataaccatattatgaaacttactaaaggactgatcaaggatgcactcgaaaacatcgacccggctacacagatgatgatcctgaactgcatctatttcaaagggtcctgggtcaacaagttccctgtcgagatgacacataatcacaatttccgcctgaatgaacgggaagtggtcaaagtgagtatgatgcagacgaaaggaaactttctcgcggcaaacgaccaggagctggattgcgatatcctgcagttggaatacgtaggggggatctcgatgctgattgtagttccccataagatgtcaggtatgaaaaccctggaggcacagctgacccccagagtcgtcgaaaggtggcagaagtctatgaccaatcggactcgggaggtgctcttgcccaagtttaagctcgaaaaaaattataacctcgttgagagcctgaagctgatgggcataagaatgctgttcgataaaaatggtaatatggcaggaatctctgatcagcggattgctatagatctgtttaagcaccagggtaccattacagtgaacgaggagggcacccaagcgacaacagtcacaaccgtcggatttatgcccctgagcacccaggtgagattcaccgttgacagaccgttcctgttcctgatctacgagcaccggaccagttgtctcctgttcatgggccgcgtagccaaccctagccgaagctag

SEQ ID NO: 3844 - DNA, 1500 bp, Artificial Sequence
  derived and/or modified sequence
atgaagcactctctcaacgctttgctgatcttcctgataattacttctgcatggggaggttcaaagggaccacttgatcagcttgaaaaagggggcgagactgctcagtcagctgatccacagtgggagcagttaaacaataaaaatctttctatgccgctattacccgccgatttccacaaggaaaacacagtaaccaatgattggattccagaaggggaggaggatgatgactatctggacctcgaaaaaatcttctccgaagacgatgactacatagatattgtggacagcctgagtgtgtctccaacagacagcgacgtgagcgccggcaatatactgcaactgttccacggaaaaagtaggatacagagattgaacattttgaatgctaagttcgctttcaacctttacagggtgttgaaggaccaggtaaatactttcgacaatatctttattgcgcctgtagggatctccaccgcgatggggatgatcagtctgggactgaaaggcgaaacccatgaacaggtgcattctatccttcacttcaaggattttgttaacgcatcttctaaatatgagatcaccactatccacaacctgtttaggaaattgacacatagattgtttcgccggaatttcggttacaccctccgtagcgtgaacgacctttacattcagaagcagttccccatactcctggactttaaaaccaaagtccgcgagtattacttcgctgaggcccagatagccgactttagcgatcccgccttcattagcaagactaacaaccatatcatgaagctcaccaaaggccttatcaaagatgcattggaaaacattgatcccgctacccagatgatgatactgaactgcatctatttcaaaggttcatgggtaaataagtttcccgttgagatgacacataaccataacttccgcttaaacgaacgcgaagtggtgaaggtttcaatgatgcagactaagggtaatttccttgcggccaatgaccaggaacttgactgcgacattctgcagttagagtacgtcggcggcatttccatgcttatcgtcgtgcctcacaagatgtctggaatgaagaccctggaggctcagctaacccctagggtagtcgaaagatggcagaaaagcatgacaaatcgcacaagggaagtcctgctacctaagttcaagctggaaaagaactataacctggtagagtccctcaagctgatgggaatccggatgcttttcgacaagaacggcaatatggccggaatatccgaccagagaatagccatagacttgtttaagcaccaaggaactataacagtgaatgaggaaggtacacaggctaccaccgtcactacagtgggcttcatgccactcagcactcaggtgcgattcacggttgaccgccctttcctctttctgatttatgagcaccggacatcctgtctgctgtttatgggcagagtggcaaatcccagccgaagttag

SEQ ID NO: 3845 - DNA, 1500 bp, Artificial Sequence
  derived and/or modified sequence
atgaagcacagcctgaatgccctgctgatcttcctgatcatcaccagcgcctggggcggcagcaagggccccctggaccagctggagaagggcggggagacagcccagagcgctgacccccagtgggagcagctgaacaacaagaacctgtccatgcccctgctgcctgctgacttccacaaggagaacacagtgaccaatgactggatccctgagggggaggaggatgatgactacctggacctggagaagatcttctctgaagatgatgactacattgatattgtggacagcctgtctgtgagccccacagacagtgatgtgtctgctggcaacatcctgcagctgttccacggcaagagccgcatccagaggctgaacatcctgaatgccaagtttgccttcaacctgtacagagtgctgaaggaccaggtgaacacctttgacaacatcttcatcgcccctgtgggcatcagcacagccatgggcatgatcagcctgggcctgaagggggagacccatgagcaggtgcacagcatcctgcacttcaaggactttgtgaatgccagcagcaaatatgagatcaccaccatccacaacctcttcaggaagctgacccacaggctcttcagaagaaactttggctacaccctgcggtctgtgaatgacctgtacatccagaagcagttccccatcctgctggacttcaagaccaaggtgcgggagtactactttgctgaggcccagattgctgacttcagtgaccctgccttcatcagcaagaccaacaaccacatcatgaagctgaccaagggcctcatcaaggatgccctggagaacattgatcctgccacccagatgatgatcctgaactgcatctacttcaagggctcctgggtgaacaagtttcctgtggagatgacccacaaccacaacttccggctgaatgaaagagaggtggtgaaggtgtccatgatgcagaccaagggcaacttcctggccgccaatgaccaggagctggactgtgacatcctgcagctggagtatgtgggcggcatctccatgctgattgtggtgccccacaagatgagcggcatgaagaccctggaggcccagctgaccccccgggtggtggagcgctggcagaagtccatgaccaacagaacccgggaggtgctgctgcccaagttcaagctggagaagaactacaacctggtggagagcctgaagctgatgggcatccgcatgctgtttgacaagaatggaaacatggccggcatcagtgaccagagaattgccatcgacctcttcaagcaccagggcaccatcaccgtgaatgaggagggcacccaggccaccaccgtgaccaccgtgggcttcatgcccctgagcacccaggtgcgcttcaccgtggaccggcccttcctgttcctgatctatgagcacaggaccagctgcctgctcttcatgggccgggtggccaaccccagccgctcctag

SEQ ID NO: 3846 - DNA, 1500 bp, Artificial Sequence
  derived and/or modified sequence
atgaagcacagcctgaacgccctgctgatcttcctgatcatcaccagcgcttggggtggtagcaaaggccccctagatcaactggaaaagggtggtgaaactgcacagagcgccgaccctcagtgggagcagctgaataacaagaacttgtctatgccacttttacccgctgattttcacaaggaaaacaccgtgacaaatgattggattccggagggggaagaggacgacgattacctggacttggaaaaaattttttcggaagacgacgactatattgacattgtggatagcttatcagtcagtcccacagactcagatgtatccgcaggtaatatcctgcagttattccatgggaagtcgcgtattcagaggctgaatatcctaaacgccaaattcgccttcaatctttatagggtgctgaaagatcaggtgaacacatttgataatatattcatcgcccctgtgggcatttctaccgccatgggcatgatctcactcggcctcaaaggggaaacgcacgagcaggtgcattcaatcctgcactttaaagattttgttaatgcttccagtaaatacgagataacgaccatccataacctgttccgcaagcttactcaccggttgtttaggcgtaattttggatatacactgaggagcgtcaacgatctctacattcagaagcaatttcccattctgctggacttcaagaccaaagtgcgggaatactacttcgcagaggctcagatcgcggatttttccgaccccgccttcatctcgaagaccaataaccatataatgaaactgactaaaggattgatcaaggatgccttggaaaatatcgaccccgccacccagatgatgatcctgaactgtatctactttaagggatcatgggtcaacaagtttcctgtggagatgacccacaaccacaatttcaggttgaacgagcgagaagtggttaaagtcagcatgatgcaaactaagggaaacttccttgccgctaacgaccaggagctcgactgtgatattctccagctggagtatgtgggcggcatttctatgctaatcgtcgtgcctcacaagatgagtggtatgaagacactcgaagcccagctgacgccccgggttgtcgaaaggtggcaaaagtcaatgactaatcggactcgcgaggttctgctgccaaagttcaagctcgaaaaaaactataacctggtagagagcctcaaacttatgggtatcaggatgctgtttgataagaatgggaacatggcaggcattagcgaccagcgtattgctatcgacttgtttaagcaccagggaacaataactgttaacgaggaggggacccaagccaccaccgtgaccactgtgggttttatgcccctgtcgacacaggtgagatttacggtagaccgcccgttcctttttcttatatacgaacataggacttcatgccttcttttcatgggaagggtggcaaacccatcccgctcctag

SEQ ID NO: 3847 - DNA, 1500 bp, Artificial Sequence
  derived and/or modified sequence
atgaagcacagcctgaacgccctgctgatcttcctgatcatcaccagtgcctggggaggaagtaagggtccactggaccagttagagaaggggggagagacagctcagagcgctgaccctcagtgggagcagttaaacaacaagaacctgtcaatgcctctcctccctgccgattttcacaaagaaaatacagtcactaacgactggatccctgagggcgaagaagacgatgactatcttgacttggaaaagatcttctctgaggacgatgattacatcgacattgttgactccctgtctgtttctccaaccgactctgatgtctcggccggaaatattttgcagctctttcatggaaagagtcggattcaaagattaaatatcctcaacgcaaagttcgcattcaatctgtaccgggtgctgaaggatcaggtgaatacatttgataacatttttatcgctccagtcgggatttcgaccgccatgggaatgattagtctgggcctaaagggggagacacacgagcaagtgcactcgatcctgcattttaaggacttcgtcaatgctagtagtaaatacgaaatcacaactattcataatttgttccggaaactgacgcataggctgttccgcagaaactttggatacacactgagatccgttaacgacctttacatccaaaaacagttccctatcctcttggattttaaaactaaggtgcgcgagtattattttgccgaagcacaaattgccgacttcagcgacccagcgttcatcagtaaaacaaataaccacatcatgaaacttaccaaggggctgattaaagatgccctggaaaatatcgaccccgccacccagatgatgatattgaactgcatctacttcaagggttcttgggtgaacaaatttcctgttgaaatgacccacaaccacaattttagactgaatgagcgagaagtggttaaagtgtctatgatgcagactaagggtaactttctcgcggctaatgatcaggaactggactgtgacatcctgcagttggaatacgtaggtggcatcagcatgttgattgtagtgccccacaagatgagcgggatgaagactcttgaagcccagcttaccccacgggtggtggaaaggtggcagaagtctatgacaaatcggacgcgagaagtgttattaccaaaatttaagctggaaaagaactataacctggtcgaatctcttaagttgatgggtataaggatgctgtttgataagaatgggaatatggccgggatctccgaccagcggatcgccatagaccttttcaaacaccaagggaccattactgtgaatgaggaagggacccaggcgacaaccgtcactacagtgggattcatgccactaagtacccaggtgcgattcactgtcgatcgccctttcctgttcctaatctacgagcacagaaccagttgtcttctgttcatgggccgggtcgccaacccctcccggtcgtag

SEQ ID NO: 3848 - DNA, 1500 bp, Artificial Sequence
  derived and/or modified sequence
atgaagcattcccttaacgcgctcctaatcttcctcattataacaagcgcttggggcggttccaaaggaccactcgatcagctcgaaaagggcggagagacagcacaatctgcagatccccagtgggaacaactgaataataagaatttgtccatgccactgcttcctgcagactttcataaggagaacactgttacaaacgattggatccctgaaggtgaagaagacgatgactatcttgatttagagaagatctttagtgaggatgatgattacatagatatagtggacagcctgagcgtaagccctactgactctgatgtttctgctggaaacatacttcagttgttccacgggaaaagtaggatccagaggctcaacattctgaacgctaaattcgcgttcaatctgtaccgcgtactaaaggaccaagtgaacactttcgataacattttcatcgccccagttgggatcagtacagcgatggggatgatctctttgggattgaagggggaaacacacgaacaagtccatagcattctgcattttaaagatttcgtgaacgcttcctcaaaatacgagattaccacaatccacaatctgttccgtaagctcacccacaggctgttccgcagaaacttcgggtataccctaagatctgttaacgacctgtacattcagaaacagttccccattctgttggatttcaaaaccaaagtgagggagtactatttcgcagaagctcagatcgccgatttctctgacccagcatttatcagcaaaaccaataaccacattatgaagttaactaagggcctcataaaagatgctttggagaatattgaccccgcaacacagatgatgattctgaactgcatttacttcaagggatcctgggtgaacaaatttcctgtcgaaatgacgcacaaccacaactttcggttaaatgaaagagaggtcgtgaaggtttctatgatgcagactaagggaaacttcctcgctgccaatgaccaggaacttgactgtgatatcctgcagttagaatatgtggggggaataagcatgctgattgtagtgccacacaagatgtccgggatgaagacgctggaagcccaactcaccccaagggttgtcgagagatggcagaagagcatgacaaaccggactcgagaggtcctgctccccaagttcaagctcgaaaaaaattacaacttagtcgaatccttgaaactcatgggcataagaatgctgtttgataagaatgggaatatggcgggtatctcggatcaaaggattgcaatagacctcttcaagcaccaggggaccatcacggtgaacgaagaaggaacgcaggccactacagtaacaaccgtgggtttcatgccactgtcaacacaagtgagattcactgtggaccgccctttcctgttcctgatctatgagcataggacaagctgtcttctcttcatggggagagtggcgaacccctctcggagctag

SEQ ID NO: 3849 - DNA, 1500 bp, Artificial Sequence
  derived and/or modified sequence
atgaaacacagtctgaacgctcttttgatctttctcatcattacttcagcttggggcggaagtaagggacctcttgatcagctggagaagggcggtgagacagctcagagcgcggatccgcagtgggagcagctaaataacaagaacttgagcatgccactcttacccgctgatttccataaagaaaacaccgtgaccaacgactggatcccagaaggcgaggaggacgatgactacctcgatctggaaaaaatcttctccgaagatgatgactatatcgacattgtcgattctcttagtgtttcccccacggactcagacgtgtctgcagggaacatcctgcaactgttccatgggaaaagtagaatacaaagactcaacattctgaacgctaaattcgcctttaatttgtatagggttctaaaggatcaggttaacactttcgataatatctttatcgccccagtgggtatcagcactgccatggggatgattagtctcggcttgaaaggcgagacccacgagcaagtgcattccattttacacttcaaggatttcgtgaatgcatcatctaaatatgaaattaccactatacataatctcttcagaaagcttacccaccgccttttcaggcgaaactttggatataccctccgttcagtgaatgacctttacatccagaaacagttccccatcttacttgatttcaaaacgaaagtgcgggaatattattttgctgaggcccagatcgctgatttttccgaccccgctttcatttctaaaaccaataaccacatcatgaaactgacaaaaggactgatcaaggacgctttggagaacattgaccctgctacccagatgatgattctgaattgtatttacttcaagggatcgtgggtcaataaattcccagtcgagatgacccacaatcacaatttccggttgaacgagcgagaagtcgtgaaagtgtctatgatgcagacgaaagggaattttctcgccgctaatgaccaggagctggattgcgacattctgcaactggaatacgtcggcggaattagtatgctgattgtggtaccacacaagatgtcaggcatgaagaccctggaggctcagctcacccctagggtagtagaaagatggcagaagagcatgacaaaccgaacccgggaggtgctgctgcccaaattcaagctggagaagaactataacttagtggagtcccttaaattgatgggaatcaggatgctgttcgacaagaacggcaacatggctgggatttctgatcaacgtatcgccattgacctgtttaaacatcaaggcaccatcactgtaaatgaggaggggacccaagcaacaacagtcaccactgtgggttttatgccactgtctacacaagtcaggttcactgtggacaggcctttcctttttctgatttatgagcacagaacatcatgtctcctttttatgggccgagtcgctaacccttcccgaagctag

SEQ ID NO: 3850 - DNA, 2437 bp, Artificial Sequence
  derived and/or modified sequence
atgtgtgcatgctaacacagtaaccgtcatatactcaaagtgtcagctctaagaactggagatgaggagctgcaagccactctacagttatcaaaggcacagctgagggggtttgtgctgaccaagctggttgcctggtgtttggattgggacttatttactttggaaaatatgcagcaacagcccagcaccaaagttcacatcaaaatcccactgatgaccttggctgctttcatctctgaagcgccacttctcagaaacacagagctttagctccgccaaaatgaaacactcattaaacgcacttctcattttcctcatcataacatctgcgtggggtgggagcaaaggcccgctggatcagctagagaaaggaggggaaactgctcagtctgcagatccccagtgggagcagttaaataacaaaaacctgagcatgcctcttctccctgccgacttccacaaggaaaacaccgtcaccaacgactggattccagagggggaggaggacgacgactatctggacctggagaagatattcagtgaagacgacgactacatcgacatcgtcgacagtctgtcagtttccccgacagactctgatgtgagtgctgggaacatcctccagctttttcatggcaagagccggatccagcgtcttaacatcctcaacgccaagttcgctttcaacctctaccgagtgctgaaagaccaggtcaacactttcgataacatcttcatagcacccgttggcatttctactgcgatgggtatgatttccttaggtctgaagggagagacccatgaacaagtgcactcgattttgcattttaaagactttgttaatgccagcagcaagtatgaaatcacgaccattcataatctcttccgtaagctgactcatcgcctcttcaggaggaattttgggtacacactgcggtcagtcaatgacctttatatccagaagcagtttccaatcctgcttgacttcaaaactaaagtaagagagtattactttgctgaggcccagatagctgacttctcagaccctgccttcatatcaaaaaccaacaaccacatcatgaagctcaccaagggcctcataaaagatgctctggagaatatagaccctgctacccagatgatgattctcaactgcatctacttcaaaggatcctgggtgaataaattcccagtggaaatgacacacaaccacaacttccggctgaatgagagagaggtagttaaggtttccatgatgcagaccaaggggaacttcctcgcagcaaatgaccaggagctggactgcgacatcctccagctggaatacgtggggggcatcagcatgctaattgtggtcccacacaagatgtctgggatgaagaccctcgaagcgcaactgacaccccgggtggtggagagatggcaaaaaagcatgacaaacagaactcgagaagtgcttctgccgaaattcaagctggagaagaactacaatctagtggagtccctgaagttgatggggatcaggatgctgtttgacaaaaatggcaacatggcaggcatctcagaccaaaggatcgccatcgacctgttcaagcaccaaggcacgatcacagtgaacgaggaaggcacccaagccaccactgtgaccacggtggggttcatgccgctgtccacccaagtccgcttcactgtcgaccgcccctttcttttcctcatctacgagcatcgcaccagctgcctgctcttcatgggaagagtggccaaccccagcaggtcctagaggtggaggtctaggtgtctgaagtgccttgggggcaccctcattttgtttccattccaacaacgagaacagagatgttctggcatcatttacgtagtttacgctaccaatctgaattcgaggcccatatgagaggagcttagaaacgaccaagaagagaggcttgttggaatcaattctgcacaatagcccatgctgtaagctcatagaagtcactgtaactgtagtgtgtctgctgttacctagagggtctcacctccccactcttcacagcaaacctgagcagcgcgtcctaagcacctcccgctccggtgaccccatccttgcacacctgactctgtcactcaagcctttctccaccaggcccctcatctgaataccaagcacagaaatgagtggtgtgactaattccttacctctcccaaggagggtacacaactagcaccattcttgatgtccagggaagaagccacctcaagacatatgaggggtgccctgggctaatgttagggcttaattttctcaaagcctgacctttcaaatccatgatgaatgccatcagtccctcctgctgttgcctccctgtgacctggaggacagtgtgtgccatgtctcccatactagagataaataaatgtagccacatttactgtg

SEQ ID NO: 3851 - DNA, 1798 bp, Artificial Sequence
  derived and/or modified sequence
taatgctgtgagggcctcttcctgggtcaaagccacagggaacctgccatgtggatgctgcagcggggtgtggatcagccaggccgcctttcactgtgttctgttttccctcccagctttagctccgccaaaatgaaacactcattaaacgcacttctcattttcctcatcataacatctgcgtggggtgggagcaaaggcccgctggatcagctagagaaaggaggggaaactgctcagtctgcagatccccagtgggagcagttaaataacaaaaacctgagcatgcctcttctccctgccgacttccacaaggaaaacaccgtcaccaacgactggattccagagggggaggaggacgacgactatctggacctggagaagatattcagtgaagacgacgactacatcgacatcgtcgacagtctgtcagtttccccgacagactctgatgtgagtgctgggaacatcctccagctttttcatggcaagagccggatccagcgtcttaacatcctcaacgccaagttcgctttcaacctctaccgagtgctgaaagaccaggtcaacactttcgataacatcttcatagcacccgttggcatttctactgcgatgggtatgatttccttaggtctgaagggagagacccatgaacaagtgcactcgattttgcattttaaagactttgttaatgccagcagcaagtatgaaatcacgaccattcataatctcttccgtaagctgactcatcgcctcttcaggaggaattttgggtacacactgcggtcagtcaatgacctttatatccagaagcagtttccaatcctgcttgacttcaaaactaaagtaagagagtattactttgctgaggcccagatagctgacttctcagaccctgccttcatatcaaaaaccaacaaccacatcatgaagctcaccaagggcctcataaaagatgctctggagaatatagaccctgctacccagatgatgattctcaactgcatctacttcaaaggatcctgggtgaataaattcccagtggaaatgacacacaaccacaacttccggctgaatgagagagaggtagttaaggtttccatgatgcagaccaaggggaacttcctcgcagcaaatgaccaggagctggactgcgacatcctccagctggaatacgtggggggcatcagcatgctaattgtggtcccacacaagatgtctgggatgaagaccctcgaagcgcaactgacaccccgggtggtggagagatggcaaaaaagcatgacaaacagaactcgagaagtgcttctgccgaaattcaagctggagaagaactacaatctagtggagtccctgaagttgatggggatcaggatgctgtttgacaaaaatggcaacatggcaggcatctcagaccaaaggatcgccatcgacctgttcaagcaccaaggcacgatcacagtgaacgaggaaggcacccaagccaccactgtgaccacggtggggttcatgccgctgtccacccaagtccgcttcactgtcgaccgcccctttcttttcctcatctacgagcatcgcaccagctgcctgctcttcatgggaagagtggccaaccccagcaggtcctagaggtggaggtctaggtgtctgaagtgccttgggggcaccctcattttgtttccattccaacaacgagaacagagatgttctggcatcatttacgtagtttacgctaccaatctgaattcgaggcccatatgagaggagcttagaaacgaccaagaagagaggcttg

SEQ ID NO: 3852 - DNA, 1500 bp, Artificial Sequence
  derived and/or modified sequence
atgaagcacagcctgaacgccctgctgatcttcctgatcatcaccagcgcctggggcggcagcaagggccccctggaccagctggagaagggcggcgagaccgcccagagcgccgacccccagtgggagcagctgaacaacaagaacctgagcatgcccctgctgcccgccgacttccacaaggagaacaccgtgaccaacgactggatccccgagggcgaggaggacgacgactacctggacctggagaagatcttcagcgaggacgacgactacatcgacatcgtggacagcctgagcgtgagccccaccgacagcgacgtgagcgccggcaacatcctgcagctgttccacggcaagagcagaatccagagactgaacatcctgaacgccaagttcgccttcaacctgtacagagtgctgaaggaccaggtgaacaccttcgacaacatcttcatcgcccccgtgggcatcagcaccgccatgggcatgatcagcctgggcctgaagggcgagacccacgagcaggtgcacagcatcctgcacttcaaggacttcgtgaacgccagcagcaagtacgagatcaccaccatccacaacctgttcagaaagctgacccacagactgttcagaagaaacttcggctacaccctgagaagcgtgaacgacctgtacatccagaagcagttccccatcctgctggacttcaagaccaaggtgagagagtactacttcgccgaggcccagatcgccgacttcagcgaccccgccttcatcagcaagaccaacaaccacatcatgaagctgaccaagggcctgatcaaggacgccctggagaacatcgaccccgccacccagatgatgatcctgaactgcatctacttcaagggcagctgggtgaacaagttccccgtggagatgacccacaaccacaacttcagactgaacgagagagaggtggtgaaggtgagcatgatgcagaccaagggcaacttcctggccgccaacgaccaggagctggactgcgacatcctgcagctggagtacgtgggcggcatcagcatgctgatcgtggtgccccacaagatgagcggcatgaagaccctggaggcccagctgacccccagagtggtggagagatggcagaagagcatgaccaacagaaccagagaggtgctgctgcccaagttcaagctggagaagaactacaacctggtggagagcctgaagctgatgggcatcagaatgctgttcgacaagaacggcaacatggccggcatcagcgaccagagaatcgccatcgacctgttcaagcaccagggcaccatcaccgtgaacgaggagggcacccaggccaccaccgtgaccaccgtgggcttcatgcccctgagcacccaggtgagattcaccgtggacagacccttcctgttcctgatctacgagcacagaaccagctgcctgctgttcatgggcagagtggccaaccccagcagaagctag

SEQ ID NO: 3853 - protein, 1231 aa, Artificial Sequence
  derived and/or modified sequence
MRLLAKIICLMLWAICVAEDCNELPPRRNTEILTGSWSDQTYPEGTQAIYKCRPGYRSLGNVIMVCRKGEWVALNPLRKCQKRPCGHPGDTPFGTFTLTGGNVFEYGVKAVYTCNEGYQLLGEINYRECDTDGWTNDIPICEVVKCLPVTAPENGKIVSSAMEPDREYHFGQAVRFVCNSGYKIEGDEEMHCSDDGFWSKEKPKCVEISCKSPDVINGSPISQKIIYKENERFQYKCNMGYEYSERGDAVCTESGWRPLPSCEEKSCDNPYIPNGDYSPLRIKHRTGDEITYQCRNGFYPATRGNTAKCTSTGWIPAPRCTLKPCDYPDIKHGGLYHENMRRPYFPVAVGKYYSYYCDEHFETPSGSYWDHIHCTQDGWSPAVPCLRKCYFPYLENGYNQNHGRKFVQGKSIDVACHPGYALPKAQTTVTCMENGWSPTPRCIRVKTCSKSSIDIENGFISESQYTYALKEKAKYQCKLGYVTADGETSGSITCGKDGWSAQPTCIKSCDIPVFMNARTKNDFTWFKLNDTLDYECHDGYESNTGSTTGSIVCGYNGWSDLPICYERECELPKIDVHLVPDRKKDQYKVGEVLKFSCKPGFTIVGPNSVQCYHFGLSPDLPICKEQVQSCGPPPELLNGNVKEKTKEEYGHSEVVEYYCNPRFLMKGPNKIQCVDGEWTTLPVCIVEESTCGDIPELEHGWAQLSSPPYYYGDSVEFNCSESFTMIGHRSITCIHGVWTQLPQCVAIDKLKKCKSSNLIILEEHLKNKKEFDHNSNIRYRCRGKEGWIHTVCINGRWDPEVNCSMAQIQLCPPPPQIPNSHNMTTTLNYRDGEKVSVLCQENYLIQEGEEITCKDGRWQSIPLCVEKIPCSQPPQIEHGTINSSRSSQESYAHGTKLSYTCEGGFRISEENETTCYMGKWSSPPQCEGLPCKSPPEISHGVVAHMSDSYQYGEEVTYKCFEGFGIDGPAIAKCLGEKWSHPPSCIKTDCLSLPSFENAIPMGEKKDVYKAGEQVTYTCATYYKMDGASNVTCINSRWTGRPTCRDTSCVNPPTVQNAYIVSRQMSKYPSGERVRYQCRSPYEMFGDEEVMCLNGNWTEPPQCKDSTGKCGPPPPIDNGDITSFPLSVYAPASSVEYQCQNLYQLEGNKRITCRNGQWSEPPKCLHPCVISREIMENYNIALRWTAKQKLYSRTGESVEFVCKRGYRLSSRSHTLRTTCWDGKLEYPTCAKR

SEQ ID NO: 3854 - protein, 449 aa, Artificial Sequence
  derived and/or modified sequence
MRLLAKIICLMLWAICVAEDCNELPPRRNTEILTGSWSDQTYPEGTQAIYKCRPGYRSLGNVIMVCRKGEWVALNPLRKCQKRPCGHPGDTPFGTFTLTGGNVFEYGVKAVYTCNEGYQLLGEINYRECDTDGWTNDIPICEVVKCLPVTAPENGKIVSSAMEPDREYHFGQAVRFVCNSGYKIEGDEEMHCSDDGFWSKEKPKCVEISCKSPDVINGSPISQKIIYKENERFQYKCNMGYEYSERGDAVCTESGWRPLPSCEEKSCDNPYIPNGDYSPLRIKHRTGDEITYQCRNGFYPATRGNTAKCTSTGWIPAPRCTLKPCDYPDIKHGGLYHENMRRPYFPVAVGKYYSYYCDEHFETPSGSYWDHIHCTQDGWSPAVPCLRKCYFPYLENGYNQNHGRKFVQGKSIDVACHPGYALPKAQTTVTCMENGWSPTPRCIRVIFQL

SEQ ID NO: 3855 - DNA, 3693 bp, Artificial Sequence
  derived and/or modified sequence
atgcgcctgctggccaagatcatctgcctgatgctgtgggccatctgcgtggccgaggactgcaacgagctgcccccccgccgcaacaccgagatcctgaccggcagctggagcgaccagacctaccccgagggcacccaggccatctacaagtgccgccccggctaccgcagcctgggcaacgtgatcatggtgtgccgcaagggcgagtgggtggccctgaaccccctgcgcaagtgccagaagcgcccctgcggccaccccggcgacacccccttcggcaccttcaccctgaccggcggcaacgtgttcgagtacggcgtgaaggccgtgtacacctgcaacgagggctaccagctgctgggcgagatcaactaccgcgagtgcgacaccgacggctggaccaacgacatccccatctgcgaggtggtgaagtgcctgcccgtgaccgcccccgagaacggcaagatcgtgagcagcgccatggagcccgaccgcgagtaccacttcggccaggccgtgcgcttcgtgtgcaacagcggctacaagatcgagggcgacgaggagatgcactgcagcgacgacggcttctggagcaaggagaagcccaagtgcgtggagatcagctgcaagagccccgacgtgatcaacggcagccccatcagccagaagatcatctacaaggagaacgagcgcttccagtacaagtgcaacatgggctacgagtacagcgagcgcggcgacgccgtgtgcaccgagagcggctggcgccccctgcccagctgcgaggagaagagctgcgacaacccctacatccccaacggcgactacagccccctgcgcatcaagcaccgcaccggcgacgagatcacctaccagtgccgcaacggcttctaccccgccacccgcggcaacaccgccaagtgcaccagcaccggctggatccccgccccccgctgcaccctgaagccctgcgactaccccgacatcaagcacggcggcctgtaccacgagaacatgcgccgcccctacttccccgtggccgtgggcaagtactacagctactactgcgacgagcacttcgagacccccagcggcagctactgggaccacatccactgcacccaggacggctggagccccgccgtgccctgcctgcgcaagtgctacttcccctacctggagaacggctacaaccagaaccacggccgcaagttcgtgcagggcaagagcatcgacgtggcctgccaccccggctacgccctgcccaaggcccagaccaccgtgacctgcatggagaacggctggagccccaccccccgctgcatccgcgtgaagacctgcagcaagagcagcatcgacatcgagaacggcttcatcagcgagagccagtacacctacgccctgaaggagaaggccaagtaccagtgcaagctgggctacgtgaccgccgacggcgagaccagcggcagcatcacctgcggcaaggacggctggagcgcccagcccacctgcatcaagagctgcgacatccccgtgttcatgaacgcccgcaccaagaacgacttcacctggttcaagctgaacgacaccctggactacgagtgccacgacggctacgagagcaacaccggcagcaccaccggcagcatcgtgtgcggctacaacggctggagcgacctgcccatctgctacgagcgcgagtgcgagctgcccaagatcgacgtgcacctggtgcccgaccgcaagaaggaccagtacaaggtgggcgaggtgctgaagttcagctgcaagcccggcttcaccatcgtgggccccaacagcgtgcagtgctaccacttcggcctgagccccgacctgcccatctgcaaggagcaggtgcagagctgcggccccccccccgagctgctgaacggcaacgtgaaggagaagaccaaggaggagtacggccacagcgaggtggtggagtactactgcaacccccgcttcctgatgaagggccccaacaagatccagtgcgtggacggcgagtggaccaccctgcccgtgtgcatcgtggaggagagcacctgcggcgacatccccgagctggagcacggctgggcccagctgagcagccccccctactactacggcgacagcgtggagttcaactgcagcgagagcttcaccatgatcggccaccgcagcatcacctgcatccacggcgtgtggacccagctgccccagtgcgtggccatcgacaagctgaagaagtgcaagagcagcaacctgatcatcctggaggagcacctgaagaacaagaaggagttcgaccacaacagcaacatccgctaccgctgccgcggcaaggagggctggatccacaccgtgtgcatcaacggccgctgggaccccgaggtgaactgcagcatggcccagatccagctgtgccccccccccccccagatccccaacagccacaacatgaccaccaccctgaactaccgcgacggcgagaaggtgagcgtgctgtgccaggagaactacctgatccaggagggcgaggagatcacctgcaaggacggccgctggcagagcatccccctgtgcgtggagaagatcccctgcagccagcccccccagatcgagcacggcaccatcaacagcagccgcagcagccaggagagctacgcccacggcaccaagctgagctacacctgcgagggcggcttccgcatcagcgaggagaacgagaccacctgctacatgggcaagtggagcagccccccccagtgcgagggcctgccctgcaagagcccccccgagatcagccacggcgtggtggcccacatgagcgacagctaccagtacggcgaggaggtgacctacaagtgcttcgagggcttcggcatcgacggccccgccatcgccaagtgcctgggcgagaagtggagccacccccccagctgcatcaagaccgactgcctgagcctgcccagcttcgagaacgccatccccatgggcgagaagaaggacgtgtacaaggccggcgagcaggtgacctacacctgcgccacctactacaagatggacggcgccagcaacgtgacctgcatcaacagccgctggaccggccgccccacctgccgcgacaccagctgcgtgaacccccccaccgtgcagaacgcctacatcgtgagccgccagatgagcaagtaccccagcggcgagcgcgtgcgctaccagtgccgcagcccctacgagatgttcggcgacgaggaggtgatgtgcctgaacggcaactggaccgagcccccccagtgcaaggacagcaccggcaagtgcggcccccccccccccatcgacaacggcgacatcaccagcttccccctgagcgtgtacgcccccgccagcagcgtggagtaccagtgccagaacctgtaccagctggagggcaacaagcgcatcacctgccgcaacggccagtggagcgagccccccaagtgcctgcacccctgcgtgatcagccgcgagatcatggagaactacaacatcgccctgcgctggaccgccaagcagaagctgtacagccgcaccggcgagagcgtggagttcgtgtgcaagcgcggctaccgcctgagcagccgcagccacaccctgcgcaccacctgctgggacggcaagctggagtaccccacctgcgccaagcgc

SEQ ID NO: 3856 - DNA, 3696 bp, Artificial Sequence
  derived and/or modified sequence
atgagactgctggccaagatcatctgcctgatgctgtgggccatctgcgtggccgaggactgcaacgagctgccccccagaagaaacaccgagatcctgaccggcagctggagcgaccagacctaccccgagggcacccaggccatctacaagtgcagacccggctacagaagcctgggcaacgtgatcatggtgtgcagaaagggcgagtgggtggccctgaaccccctgagaaagtgccagaagagaccctgcggccaccccggcgacacccccttcggcaccttcaccctgaccggcggcaacgtgttcgagtacggcgtgaaggccgtgtacacctgcaacgagggctaccagctgctgggcgagatcaactacagagagtgcgacaccgacggctggaccaacgacatccccatctgcgaggtggtgaagtgcctgcccgtgaccgcccccgagaacggcaagatcgtgagcagcgccatggagcccgacagagagtaccacttcggccaggccgtgagattcgtgtgcaacagcggctacaagatcgagggcgacgaggagatgcactgcagcgacgacggcttctggagcaaggagaagcccaagtgcgtggagatcagctgcaagagccccgacgtgatcaacggcagccccatcagccagaagatcatctacaaggagaacgagagattccagtacaagtgcaacatgggctacgagtacagcgagagaggcgacgccgtgtgcaccgagagcggctggagacccctgcccagctgcgaggagaagagctgcgacaacccctacatccccaacggcgactacagccccctgagaatcaagcacagaaccggcgacgagatcacctaccagtgcagaaacggcttctaccccgccaccagaggcaacaccgccaagtgcaccagcaccggctggatccccgcccccagatgcaccctgaagccctgcgactaccccgacatcaagcacggcggcctgtaccacgagaacatgagaagaccctacttccccgtggccgtgggcaagtactacagctactactgcgacgagcacttcgagacccccagcggcagctactgggaccacatccactgcacccaggacggctggagccccgccgtgccctgcctgagaaagtgctacttcccctacctggagaacggctacaaccagaaccacggcagaaagttcgtgcagggcaagagcatcgacgtggcctgccaccccggctacgccctgcccaaggcccagaccaccgtgacctgcatggagaacggctggagccccacccccagatgcatcagagtgaagacctgcagcaagagcagcatcgacatcgagaacggcttcatcagcgagagccagtacacctacgccctgaaggagaaggccaagtaccagtgcaagctgggctacgtgaccgccgacggcgagaccagcggcagcatcacctgcggcaaggacggctggagcgcccagcccacctgcatcaagagctgcgacatccccgtgttcatgaacgccagaaccaagaacgacttcacctggttcaagctgaacgacaccctggactacgagtgccacgacggctacgagagcaacaccggcagcaccaccggcagcatcgtgtgcggctacaacggctggagcgacctgcccatctgctacgagagagagtgcgagctgcccaagatcgacgtgcacctggtgcccgacagaaagaaggaccagtacaaggtgggcgaggtgctgaagttcagctgcaagcccggcttcaccatcgtgggccccaacagcgtgcagtgctaccacttcggcctgagccccgacctgcccatctgcaaggagcaggtgcagagctgcggccccccccccgagctgctgaacggcaacgtgaaggagaagaccaaggaggagtacggccacagcgaggtggtggagtactactgcaaccccagattcctgatgaagggccccaacaagatccagtgcgtggacggcgagtggaccaccctgcccgtgtgcatcgtggaggagagcacctgcggcgacatccccgagctggagcacggctgggcccagctgagcagccccccctactactacggcgacagcgtggagttcaactgcagcgagagcttcaccatgatcggccacagaagcatcacctgcatccacggcgtgtggacccagctgccccagtgcgtggccatcgacaagctgaagaagtgcaagagcagcaacctgatcatcctggaggagcacctgaagaacaagaaggagttcgaccacaacagcaacatcagatacagatgcagaggcaaggagggctggatccacaccgtgtgcatcaacggcagatgggaccccgaggtgaactgcagcatggcccagatccagctgtgccccccccccccccagatccccaacagccacaacatgaccaccaccctgaactacagagacggcgagaaggtgagcgtgctgtgccaggagaactacctgatccaggagggcgaggagatcacctgcaaggacggcagatggcagagcatccccctgtgcgtggagaagatcccctgcagccagcccccccagatcgagcacggcaccatcaacagcagcagaagcagccaggagagctacgcccacggcaccaagctgagctacacctgcgagggcggcttcagaatcagcgaggagaacgagaccacctgctacatgggcaagtggagcagccccccccagtgcgagggcctgccctgcaagagcccccccgagatcagccacggcgtggtggcccacatgagcgacagctaccagtacggcgaggaggtgacctacaagtgcttcgagggcttcggcatcgacggccccgccatcgccaagtgcctgggcgagaagtggagccacccccccagctgcatcaagaccgactgcctgagcctgcccagcttcgagaacgccatccccatgggcgagaagaaggacgtgtacaaggccggcgagcaggtgacctacacctgcgccacctactacaagatggacggcgccagcaacgtgacctgcatcaacagcagatggaccggcagacccacctgcagagacaccagctgcgtgaacccccccaccgtgcagaacgcctacatcgtgagcagacagatgagcaagtaccccagcggcgagagagtgagataccagtgcagaagcccctacgagatgttcggcgacgaggaggtgatgtgcctgaacggcaactggaccgagcccccccagtgcaaggacagcaccggcaagtgcggcccccccccccccatcgacaacggcgacatcaccagcttccccctgagcgtgtacgcccccgccagcagcgtggagtaccagtgccagaacctgtaccagctggagggcaacaagagaatcacctgcagaaacggccagtggagcgagccccccaagtgcctgcacccctgcgtgatcagcagagagatcatggagaactacaacatcgccctgagatggaccgccaagcagaagctgtacagcagaaccggcgagagcgtggagttcgtgtgcaagagaggctacagactgagcagcagaagccacaccctgagaaccacctgctgggacggcaagctggagtaccccacctgcgccaagagatag

SEQ ID NO: 3857 - DNA, 3839 bp, Artificial Sequence
  derived and/or modified sequence
gggaaataagagagaaaagaagagtaagaagaaatataagagccaccatgaggttgttggctaagatcatttgccttatgctgtgggcgatctgtgtcgccgaggactgtaatgagcttccgcctcggaggaatacggaaatcctcacgggtagctggtcggatcagacctatcccgagggaacccaggcgatctacaagtgccgaccggggtatcgatcactcgggaacgtgatcatggtatgccggaagggagaatgggtggcgctgaacccccttcgcaaatgtcagaaaagaccgtgcggccaccccggtgacaccccttttgggacttttacactgactggaggcaatgtctttgagtacggggtcaaggcggtatacacttgtaatgagggatatcaactgctcggagaaatcaactacagggagtgtgatacggacggatggacgaacgacatccccatttgtgaggtcgtgaagtgccttcccgtgaccgcgcctgaaaacggaaaaatcgtatcgagcgcaatggaaccagaccgggaatatcacttcgggcaggccgtacggttcgtatgcaacagcggctataagatcgagggtgacgaagaaatgcattgttcggatgatgggttttggtccaaagaaaaacccaaatgtgtagagatctcgtgcaaatcacctgacgtcatcaacggctcccccattagccagaagatcatctacaaggaaaatgagcgcttccagtacaaatgtaacatgggctacgaatacagcgaacggggtgacgcagtgtgcacagaatcgggatggaggccgctcccttcgtgtgaagaaaaatcatgtgataacccgtacattcccaatggtgattactcgccgcttaggatcaaacacagaaccggtgacgagattacgtatcaatgccgaaacgggttttaccccgccactcgggggaacacggctaagtgcacctccacgggatggattccagcaccgcggtgcacattgaaaccttgtgactaccccgacattaaacacggcggtttgtaccatgagaacatgcgacggccatatttccccgtggcggtcggaaaatactactcatattactgtgatgaacactttgaaaccccgagcggatcgtactgggatcacattcactgtacgcaagacgggtggtccccggcagtgccgtgcctcagaaagtgctatttcccatacttggaaaatgggtacaaccaaaaccacgggagaaaattcgtccagggaaaatcaattgacgtggcgtgtcatcccggatatgccctgcccaaggctcagacgacggtcacgtgtatggagaacggatggagccctactcctcggtgtattagggtgaaaacatgctcgaagtccagcattgatatcgaaaatggctttatctcggaatcgcagtacacctacgctctgaaggagaaagcgaaatatcagtgcaaactcggttatgtgacggcggacggagaaacttcgggatcgattacgtgcggtaaagatggctggtcggcacaacccacatgcatcaagtcgtgtgacatcccggtgttcatgaatgcgcgcacgaagaacgatttcacgtggtttaagttgaacgacacgctcgattatgaatgtcatgacgggtacgagtcaaacaccgggtcaaccactggaagcatcgtatgtgggtacaatgggtggagcgacctccccatttgctatgaaagagagtgcgaacttcccaaaatcgatgtgcatctcgtgccggaccgaaagaaggaccagtataaagtgggagaagtcctcaagtttagctgcaaaccggggttcactatcgtcgggcccaattcagtccagtgctatcactttggactctcacccgatttgccaatttgcaaggaacaagtgcagagctgtggaccacccccagagctgcttaatggcaacgtaaaagagaaaacaaaggaagagtacggacattcggaggtggtggagtattactgcaacccccggtttctgatgaagggacccaacaagatccaatgcgtcgatggagaatggaccactctgcctgtctgtattgtcgaagaatcaacatgcggagacattcccgagttggaacacgggtgggctcagctttcgagccctccttactattatggggattccgtagagttcaattgcagcgagtcattcacaatgatcggccaccgatcaattacttgtatccacggggtctggacacagcttccacagtgtgtcgcaatcgataagctcaagaagtgcaaatcaagcaacctgatcattttggaggagcatctcaagaacaagaaagaatttgatcataattcaaacattaggtatcgctgcagaggaaaagaaggttggattcacactgtatgcatcaacgggcgatgggaccccgaggtgaactgttcgatggcacaaatccagctttgcccgcctccgcctcagattccaaactcccacaatatgaccacaacattgaattatcgggacggagagaaagtatccgtgctgtgccaagagaattatctcatccaagagggtgaggaaatcacgtgtaaggatggccggtggcagtcgatcccgttgtgtgtagaaaagatcccgtgctcgcaaccccctcaaatcgagcacggaacaatcaattcatcgcggtcaagccaagaaagctacgcgcatggaacaaagttgtcctacacgtgtgaaggagggttcagaatcagcgaagaaaacgaaaccacctgttatatggggaagtggtcgtcaccaccccagtgtgaggggctgccatgtaagtcccctcccgagatctcccatggggtcgtcgcgcacatgtcggacagctaccagtacggagaggaggtcacttacaaatgtttcgagggatttggaatcgacggtccagcgatcgccaaatgcttgggagaaaagtggtcccatcccccgagctgtattaagacggactgtctcagcctcccctcgttcgagaatgccattccgatgggggagaagaaagatgtgtacaaggcgggagaacaggtcacatacacatgtgcgacatactataagatggatggggcgagcaacgtcacttgcatcaactcacggtggacaggcagaccgacgtgccgcgatacctcatgtgtcaatcctcctactgtgcagaacgcatacatcgtatcacggcagatgtcgaagtacccctccggtgagagagtgagataccagtgcagaagcccctatgaaatgtttggcgacgaggaagtgatgtgccttaacggtaactggaccgaacctccccagtgtaaagatagcacggggaagtgcggaccgcctcctcccattgacaatggagatattacgtcgtttccactgtcggtgtacgcaccagcttcgtccgtcgagtaccagtgccaaaatctctatcagttggagggaaacaaacggattacgtgtcgcaacggacagtggagcgagccccctaagtgtctccacccctgcgtaattagcagggagattatggaaaactataacattgcgcttcggtggacggctaagcagaaactctacagcagaactggagagagcgtcgagtttgtatgcaagcgaggttataggttgtcatcgaggtcccacacattgaggacgacgtgctgggacggcaaactggagtatcccacgtgcgctaaaaggtaatgagctgccttctgcggggcttgccttctggccatgcccttcttctctcccttgcacctgtacctcttggtctttgaataaagcctgagtaggaag

SEQ ID NO: 3858 - DNA, 3696 bp, Artificial Sequence
  derived and/or modified sequence
atgaggctgttggccaaaattatatgtctaatgctgtgggccatctgcgttgccgaggactgcaacgagctcccacccaggagaaatacagaaatcttgacaggatcttggtcagaccagacttatcctgaaggaacccaggcgatttacaaatgtcgacctgggtaccgcagcctcggtaatgttatcatggtgtgtaggaaaggagagtgggtggcgttaaacccacttcggaaatgtcaaaaacgaccctgcggtcacccaggtgataccccctttgggactttcacgctcacaggcggtaacgttttcgagtatggtgtgaaggcagtgtatacctgtaacgaaggttatcagttacttggcgagatcaactaccgcgagtgcgacactgacggttggaccaacgacatccctatctgtgaagtcgtcaagtgtttgccggtaaccgctcccgaaaacggaaagatagttagcagtgccatggaaccagatcgggagtaccactttggccaggctgtgagattcgtgtgcaactctggatacaagatcgaaggagatgaggaaatgcactgttcagatgatggcttttggagtaaggaaaaacctaaatgcgtcgaaatctcttgcaaaagccccgacgtaataaatggtagccctatctctcagaagatcatctataaggagaatgagcggtttcagtataagtgcaatatgggatacgaatattccgaaaggggcgacgcggtgtgtaccgaaagtggttggcgtccgctgccaagctgtgaagagaagtcttgtgacaacccatacattcccaatggtgactacagtccacttcgtatcaaacatcgaactggtgacgagatcacatatcaatgccgtaacggtttttaccctgctaccagaggaaataccgcgaaatgcacttctaccggctggattccagctccacggtgtactctcaagccgtgcgactaccccgatatcaagcacggcgggctctatcacgaaaacatgcgccggccgtatttcccagttgctgtgggcaagtactactcatactactgtgacgagcactttgagactccaagcggcagctattgggaccatatccattgtactcaggacggatggtcccccgcagtgccatgcctgagaaagtgctactttccttatctcgaaaatggttacaaccagaatcacggcagaaaatttgtacagggcaaatcaatcgacgtggcgtgtcatccaggctacgccctgcccaaagctcagactacagtgacatgtatggaaaatgggtggtcccccaccccccggtgtattagggtcaaaacttgttcaaagagctccatcgacattgagaacggcttcatttctgaatcacagtacacttatgctctgaaggagaaggccaagtaccagtgcaagctcggttacgtgacagccgatggcgaaactagcgggtccatcacttgtggcaaagacgggtggtcagctcagccaacttgtatcaaaagctgcgacatccctgtctttatgaatgcacgcaccaaaaatgatttcacttggttcaaactgaacgacaccctggattacgagtgtcacgacggctacgaaagtaacacaggctccacaactggaagcattgtatgcgggtataacggctggagtgaccttcctatttgctacgagcgggaatgcgagctgcctaagattgacgttcatcttgttccagataggaagaaggaccaatacaaagtgggggaggttctcaaattctcttgcaagcccggatttaccattgtaggacctaatagtgtacagtgctatcacttcggccttagcccagacctgcctatctgcaaggagcaggtgcagtcctgcggaccacccccagagctgctgaacgggaacgtgaaggagaaaaccaaagaggaatatggccatagcgaagtggtggaatactactgtaatcctcgcttcttgatgaaaggccctaataaaattcagtgcgtcgatggggaatggacaacgttgccggtgtgtatagtagaggagtcaacctgtggggatatccccgaactcgaacacggctgggcacagctgagtagccccccgtactactatggggatagcgtggagttcaattgctccgaatccttcacgatgattggtcaccgatctatcacctgtattcacggggtgtggacgcaattaccccaatgcgtggccatcgataagctaaaaaaatgcaagtcgtcaaacctgataatcttagaagagcacctaaagaacaaaaaggagttcgaccacaatagcaacatcaggtacagatgcagaggtaaagaggggtggattcataccgtatgtattaacggacggtgggaccctgaggtgaactgttcaatggcacagattcagctctgcccgcccccccctcagattcccaatagccacaatatgaccaccactctgaactatagagacggggagaaggtgagtgttctatgccaagagaactaccttatccaggagggggaggaaatcacatgcaaagacggcaggtggcagtctatcccactctgcgttgaaaagatcccatgctcacagccaccacagatcgagcacgggaccatcaacagctcaagatcttcccaagaaagctacgcgcatgggaccaagctgtcatacacatgcgaaggcggttttagaatctctgaggaaaacgagacaacttgctatatgggaaaatggtccagtccaccacagtgcgaaggcctcccttgtaaatcccctcccgagattagccatggagtggtagcccacatgtccgattcataccaatatggtgaggaagttacctacaagtgctttgaagggtttgggatcgacggtcctgcaatagcgaagtgcctcggtgaaaagtggtcccatcccccctcgtgtattaaaacagactgtttatcactcccttcatttgagaatgcaatcccgatgggcgaaaagaaagacgtttataaagctggagagcaggtgacttacacctgtgcaacttactacaagatggacggagcatcaaatgtcacctgcatcaattcgaggtggaccggccggccaacgtgtcgggatacttcatgcgtgaatccacctacggtccagaatgcgtatatagtctcacgacagatgtctaagtatccatcgggtgagcgagtccgataccagtgccgcagtccatatgaaatgttcggcgatgaagaggttatgtgcctgaatggcaactggacagagcccccccagtgtaaagattctaccggtaagtgtggcccaccgcctcctatcgataatggcgacattacctcatttccgctgtccgtctacgctcctgcttcatctgttgagtaccaatgccaaaatttgtaccagttggaaggtaataaacgaataacctgtcgaaacggacaatggagcgaaccgcctaaatgtctgcatccatgcgtgatttctcgagagataatggagaactacaatattgcattacgctggaccgctaaacaaaaattgtactcccggacaggggagtctgtggagtttgtctgcaagcgaggataccgcctctcctctagaagccataccctaagaactacttgttgggacggaaaactggagtatcccacatgtgccaagcgatag

SEQ ID NO: 3859 - DNA, 3696 bp, Artificial Sequence
  derived and/or modified sequence
atgaggctgctggccaagatcatctgcctgatgctgtgggccatctgtgtggccgaggactgcaatgagctgcccccaagaagaaacacagagatcctgaccggctcctggagcgaccagacctacccagagggcacccaggccatctacaagtgccggcccggctaccgcagcctgggcaatgtcatcatggtgtgcaggaagggggagtgggtggccctgaaccccctgaggaagtgccagaagaggccctgtggccaccctggggacaccccatttggcaccttcaccctgactggaggaaatgtgtttgaatatggagtgaaggctgtgtacacctgcaatgaaggctaccagctgctgggggagatcaactaccgggagtgtgacacagatggctggaccaatgacatccccatctgtgaggtggtgaagtgcctgcctgtgacagccccagaaaatggcaagatcgtgagcagcgccatggagccagaccgggagtaccacttcggccaggccgtgcgctttgtgtgcaacagcggctacaagattgaaggagatgaggagatgcactgcagtgatgatggcttctggagcaaggagaagcccaagtgtgtggagatcagctgcaagagcccagatgtgatcaatggcagccccatcagccagaagatcatctacaaggaaaatgaacgcttccagtacaagtgcaacatgggctatgagtacagcgagagaggagatgctgtgtgcacagagagcggctggaggcccctgcccagctgtgaggagaagagctgtgacaacccctacatccccaacggggactacagccccctgcgcatcaagcacaggactggagatgagatcacctaccagtgcagaaatggcttctacccagccacccggggcaacacagccaagtgcaccagcacaggctggatcccagccccccgctgcaccctgaagccctgtgactacccagacatcaagcacggcggcctgtaccacgagaacatgagaagaccctacttccctgtggccgtgggcaagtactacagctactactgtgatgagcactttgagaccccatctggcagctactgggaccacatccactgcacccaggacggctggagccctgctgtgccctgcctgaggaagtgctacttcccctacctggagaatggctacaaccagaaccacggcaggaagtttgtgcagggcaagagcattgatgtggcctgccaccctggctacgccctgcccaaggcccagaccaccgtgacctgcatggagaatggctggagccccaccccccgctgcatccgggtgaagacctgcagcaagagcagcattgatattgaaaatggcttcatcagcgagagccagtacacctacgccctgaaggagaaggccaagtaccagtgcaagctgggctacgtgacagcagatggagagaccagcggcagcatcacctgtgggaaggatggctggagcgcccagcccacctgcatcaagagctgtgacatccctgtgttcatgaatgcccggaccaagaatgacttcacctggttcaagctgaatgacaccctggactatgaatgtcatgatggctatgagagcaacacaggcagcaccaccggcagcatcgtgtgtggctacaacggctggagcgacctgcccatctgctatgagcgggagtgtgagctgcccaagattgatgtgcacctggtgcctgacaggaagaaggaccagtacaaggtgggggaggtgctgaagttcagctgcaagccaggcttcaccatcgtgggccccaacagcgtgcagtgctaccacttcggcctgagcccagacctgcccatctgcaaggagcaggtgcagagctgtggccccccacctgagctgctgaatggaaatgtgaaggagaagaccaaggaggagtatggccacagcgaggtggtggagtactactgcaacccccgcttcctgatgaagggccccaacaagatccagtgtgtggatggagagtggaccaccctgcctgtgtgcatcgtggaggagagcacctgtggggacatccctgagctggagcacggctgggcccagctgagcagccccccctactactatggagacagcgtggagttcaactgcagcgagagcttcaccatgattggccacaggagcatcacctgcatccatggagtgtggacccagctgccccagtgtgtggccatcgacaagctgaagaagtgcaagagcagcaacctgatcatcctggaggagcacctgaagaacaagaaggagtttgaccacaacagcaacatccgctaccgctgccggggcaaggagggctggatccacacagtgtgcatcaatggccgctgggaccctgaggtgaactgcagcatggcccagatccagctgtgccccccaccaccccagatccccaacagccacaacatgaccaccaccctgaactacagagatggagagaaggtgtctgtgctgtgccaggagaactacctgatccaggagggggaggagatcacctgcaaggatggccgctggcagagcatccccctgtgtgtggagaagatcccctgcagccagcccccccagatcgagcacggcaccatcaacagcagccgcagcagccaggagagctatgcccacggcaccaagctgagctacacctgtgagggcggcttccgcatcagcgaggagaatgagaccacctgctacatgggcaagtggagcagccccccccagtgtgagggcctgccctgcaagagccccccagagatcagccatggagtggtggcccacatgtctgacagctaccagtatggagaggaggtgacctacaagtgctttgagggctttggaattgatggccctgccatcgccaagtgcctgggggagaagtggagccacccccccagctgcatcaagacagactgcctgagcctgcccagctttgaaaatgccatccccatgggagagaagaaggatgtgtacaaggccggggagcaggtgacctacacctgtgccacctactacaagatggatggagccagcaatgtgacctgcatcaacagccgctggacaggccggcccacctgccgggacaccagctgtgtgaaccccccaacagtgcagaatgcctacatcgtgtcccggcagatgagcaagtaccccagcggggagcgggtgcgctaccagtgccgcagcccctatgagatgtttggagatgaggaggtgatgtgcctgaatggaaactggacagagcccccccagtgcaaggacagcactggaaaatgtggccccccaccacccatcgacaatggagacatcaccagcttccccctgtctgtgtatgccccagccagctctgtggagtaccagtgccagaacctgtaccagctggagggcaacaagaggatcacctgcagaaatggccagtggagcgagccccccaagtgcctgcacccctgtgtgatcagccgggagatcatggagaactacaacatcgccctgcgctggacagccaagcagaagctgtacagcaggactggagagagcgtggagtttgtgtgcaagaggggctaccgcctgagcagccgcagccacaccctgcggaccacctgctgggatggcaagctggagtaccccacctgtgccaagaggtag

SEQ ID NO: 3860 - DNA, 4127 bp, Artificial Sequence
  derived and/or modified sequence
acagcattaacatttagtgggagtgcagtgagaattgggtttaacttctggcatttctgggcttgtggcttgtggttgattttttatttactttgcaaaagtttctgataggcggagcatctagtttcaacttccttttgcagcaagttctttcctgcactaatcacaattcttggaagaggagaactggacgttgtgaacagagttagctggtaaatgtcctcttaaaagatccaaaaaatgagacttctagcaaagattatttgccttatgttatgggctatttgtgtagcagaagattgcaatgaacttcctccaagaagaaatacagaaattctgacaggttcctggtctgaccaaacatatccagaaggcacccaggctatctataaatgccgccctggatatagatctcttggaaatgtaataatggtatgcaggaagggagaatgggttgctcttaatccattaaggaaatgtcagaaaaggccctgtggacatcctggagatactccttttggtacttttacccttacaggaggaaatgtgtttgaatatggtgtaaaagctgtgtatacatgtaatgaggggtatcaattgctaggtgagattaattaccgtgaatgtgacacagatggatggaccaatgatattcctatatgtgaagttgtgaagtgtttaccagtgacagcaccagagaatggaaaaattgtcagtagtgcaatggaaccagatcgggaataccattttggacaagcagtacggtttgtatgtaactcaggctacaagattgaaggagatgaagaaatgcattgttcagacgatggtttttggagtaaagagaaaccaaagtgtgtggaaatttcatgcaaatccccagatgttataaatggatctcctatatctcagaagattatttataaggagaatgaacgatttcaatataaatgtaacatgggttatgaatacagtgaaagaggagatgctgtatgcactgaatctggatggcgtccgttgccttcatgtgaagaaaaatcatgtgataatccttatattccaaatggtgactactcacctttaaggattaaacacagaactggagatgaaatcacgtaccagtgtagaaatggtttttatcctgcaacccggggaaatacagcaaaatgcacaagtactggctggatacctgctccgagatgtaccttgaaaccttgtgattatccagacattaaacatggaggtctatatcatgagaatatgcgtagaccatactttccagtagctgtaggaaaatattactcctattactgtgatgaacattttgagactccgtcaggaagttactgggatcacattcattgcacacaagatggatggtcgccagcagtaccatgcctcagaaaatgttattttccttatttggaaaatggatataatcaaaatcatggaagaaagtttgtacagggtaaatctatagacgttgcctgccatcctggctacgctcttccaaaagcgcagaccacagttacatgtatggagaatggctggtctcctactcccagatgcatccgtgtcaaaacatgttccaaatcaagtatagatattgagaatgggtttatttctgaatctcagtatacatatgccttaaaagaaaaagcgaaatatcaatgcaaactaggatatgtaacagcagatggtgaaacatcaggatcaattacatgtgggaaagatggatggtcagctcaacccacgtgcattaaatcttgtgatatcccagtatttatgaatgccagaactaaaaatgacttcacatggtttaagctgaatgacacattggactatgaatgccatgatggttatgaaagcaatactggaagcaccactggttccatagtgtgtggttacaatggttggtctgatttacccatatgttatgaaagagaatgcgaacttcctaaaatagatgtacacttagttcctgatcgcaagaaagaccagtataaagttggagaggtgttgaaattctcctgcaaaccaggatttacaatagttggacctaattccgttcagtgctaccactttggattgtctcctgacctcccaatatgtaaagagcaagtacaatcatgtggtccacctcctgaactcctcaatgggaatgttaaggaaaaaacgaaagaagaatatggacacagtgaagtggtggaatattattgcaatcctagatttctaatgaagggacctaataaaattcaatgtgttgatggagagtggacaactttaccagtgtgtattgtggaggagagtacctgtggagatatacctgaacttgaacatggctgggcccagctttcttcccctccttattactatggagattcagtggaattcaattgctcagaatcatttacaatgattggacacagatcaattacgtgtattcatggagtatggacccaacttccccagtgtgtggcaatagataaacttaagaagtgcaaatcatcaaatttaattatacttgaggaacatttaaaaaacaagaaggaattcgatcataattctaacataaggtacagatgtagaggaaaagaaggatggatacacacagtctgcataaatggaagatgggatccagaagtgaactgctcaatggcacaaatacaattatgcccacctccacctcagattcccaattctcacaatatgacaaccacactgaattatcgggatggagaaaaagtatctgttctttgccaagaaaattatctaattcaggaaggagaagaaattacatgcaaagatggaagatggcagtcaataccactctgtgttgaaaaaattccatgttcacaaccacctcagatagaacacggaaccattaattcatccaggtcttcacaagaaagttatgcacatgggactaaattgagttatacttgtgagggtggtttcaggatatctgaagaaaatgaaacaacatgctacatgggaaaatggagttctccacctcagtgtgaaggccttccttgtaaatctccacctgagatttctcatggtgttgtagctcacatgtcagacagttatcagtatggagaagaagttacgtacaaatgttttgaaggttttggaattgatgggcctgcaattgcaaaatgcttaggagaaaaatggtctcaccctccatcatgcataaaaacagattgtctcagtttacctagctttgaaaatgccatacccatgggagagaagaaggatgtgtataaggcgggtgagcaagtgacttacacttgtgcaacatattacaaaatggatggagccagtaatgtaacatgcattaatagcagatggacaggaaggccaacatgcagagacacctcctgtgtgaatccgcccacagtacaaaatgcttatatagtgtcgagacagatgagtaaatatccatctggtgagagagtacgttatcaatgtaggagcccttatgaaatgtttggggatgaagaagtgatgtgtttaaatggaaactggacggaaccacctcaatgcaaagattctacaggaaaatgtgggccccctccacctattgacaatggggacattacttcattcccgttgtcagtatatgctccagcttcatcagttgagtaccaatgccagaacttgtatcaacttgagggtaacaagcgaataacatgtagaaatggacaatggtcagaaccaccaaaatgcttacatccgtgtgtaatatcccgagaaattatggaaaattataacatagcattaaggtggacagccaaacagaagctttattcgagaacaggtgaatcagttgaatttgtgtgtaaacggggatatcgtctttcatcacgttctcacacattgcgaacaacatgttgggatgggaaactggagtatccaacttgtgcaaaaagatagaatcaatcataaagtgcacacctttattcagaactttagtattaaatcagttctcaatttcattttttatgtattgttttactcctttttattcatacgtaaaattttggattaatttgtgaaaatgtaattataagctgagaccggtggctctcttcttaaaagcaccatattaaatcctggaaaactaa

SEQ ID NO: 3861 - DNA, 3696 bp, Artificial Sequence
  derived and/or modified sequence
atgcggctgctggccaagatcatctgcctgatgctgtgggccatctgtgtcgcagaggattgcaacgaacttcctccaaggagaaacaccgagattctgactggatcttggtcggaccagacatacccagaaggcacccaggctatttacaaatgcagaccaggctacaggtcgcttgggaacgtcattatggtgtgcaggaagggcgaatgggtcgctctgaatccccttcgcaagtgtcagaagagaccctgtggccaccctggagacactccattcggaacattcacactgactggaggaaacgtgttcgagtacggggtcaaagccgtctacacatgtaatgagggatatcagctgctaggcgaaatcaactaccgagagtgcgacacagatggatggaccaatgatattccaatttgcgaagtggtgaaatgtctgcccgtcaccgcccccgagaacggcaagatcgtctcctctgccatggagcccgacagggaataccacttcggacaggcggtccgatttgtttgcaactctggttacaaaattgagggcgacgaggaaatgcactgtagcgacgatggcttctggagcaaggagaaaccaaagtgtgtggagattagctgcaagagtcctgatgttatcaacggtagccccatctcccagaaaatcatatacaaagaaaacgagcggtttcagtacaagtgcaacatggggtatgaatactctgagaggggtgatgccgtctgtactgagagcggctggcgtcctctcccctcttgtgaggagaagtcctgcgacaatccctacatcccaaacggcgactattcgccactcaggatcaaacaccgaacgggggatgagatcacttaccaatgcaggaacggattttaccccgcaacaagaggaaatactgccaaatgtaccagcacaggatggattccggcccccaggtgtacgttaaaaccttgcgattacccagatatcaaacatggcggtttgtaccatgagaatatgcgcaggccatacttccccgttgcagttggcaaatattactcttactattgtgacgaacacttcgaaacccctagcgggtcctactgggaccatatacactgtactcaggacggctggtcacctgcagttccatgcctaaggaaatgctatttcccttatctagagaatgggtataaccagaatcatggccggaaattcgtgcagggaaagtccatcgacgttgcctgtcaccccggatacgccctgccgaaagctcagactaccgtgacatgtatggaaaatggttggtccccaacccctagatgcattcgtgtgaaaacctgctcgaagtcctccatagacatagagaatgggttcatttccgaatctcagtacacatacgcccttaaggaaaaagctaagtaccaatgcaagctggggtacgtcactgctgacggtgaaacctccggctccatcacctgcggaaaggacggttggtctgcccaacccacgtgtataaagagttgcgatatacctgtgtttatgaatgcacgcacaaagaatgactttacttggtttaaactgaatgataccctggattacgaatgtcatgacggttacgaaagcaacactggctcgacaacagggagcatagtgtgcggatacaacggatggagcgacctgcctatatgttacgagcgcgagtgtgagctgcctaagattgacgtgcacttggtgcccgatcgaaaaaaggaccaatacaaggtgggggaggtgctgaagttctcgtgcaagcctggatttacgatagtgggtcctaacagcgtgcagtgttatcacttcgggctcagtcccgatctgcctatatgcaaggagcaagttcagtcctgtggacccccaccagagctgctgaatggcaatgtcaaggagaagaccaaggaggaatacggccacagtgaggtggttgaatactattgcaatcctcgattcctgatgaaagggccaaacaagattcaatgcgtggatggcgaatggacaaccctgcctgtgtgtattgttgaagagtctacgtgtggcgatatacctgagctggagcacggttgggcgcaattaagctcccctccatattattacggggactctgtcgaatttaactgttcagagagtttcactatgattgggcacaggtccattacatgcatccacggtgtttggactcaacttccacagtgtgtggctattgataaactgaaaaagtgtaagtctagtaatctcatcatcttagaggaacatcttaaaaacaagaaagaatttgatcacaattccaacattcgctatcgctgccgaggcaaagaaggctggattcacacagtatgcatcaatgggagatgggatccagaggtgaactgtagcatggcccagattcagctttgcccacccccaccgcaaatcccaaacagtcacaatatgacgacgaccctcaactacagggacggcgaaaaagtgtctgttctgtgccaggagaactacttgatccaggagggggaggagatcacctgtaaagatgggcggtggcagtccattccactgtgtgtggagaaaattccgtgttcgcagcccccccagatcgagcatggtactattaattcatcgcgttcatctcaggaatcatacgcccatgggactaagctgtcatacacatgtgaaggcggattccggatctcagaggaaaacgagactacatgttacatgggcaagtggtcctcaccaccgcagtgcgagggactgccctgcaagtctccgccggaaattagccacggcgtggtggcccatatgtccgattcataccagtatggggaggaagtaacatacaagtgctttgaaggattcgggattgatggacccgccattgccaagtgcctgggcgagaagtggtcacacccaccctcttgtattaagactgactgcttaagtcttcctagcttcgaaaacgctattcccatgggcgagaaaaaagatgtatacaaagctggagaacaggtgacttatacgtgtgctacatattataagatggatggggcttcaaatgtgacctgcatcaactcgcggtggactggtcgacctacatgccgggacacttcatgcgtcaaccctcctacagtccagaacgcctacatcgttagcagacaaatgtcaaagtaccctagcggcgaaagagtgaggtatcagtgtaggtctccttacgagatgtttggagatgaggaagttatgtgtttgaatgggaattggacagagccaccgcaatgtaaagatagtactggcaagtgcggaccaccccctcccatcgacaatggagatatcacaagcttccccctttctgtctacgcaccggcttcttcagtggaatatcagtgccaaaatctataccaactggaaggcaacaaaagaattacctgcagaaatggccagtggagcgagccccctaaatgcctgcacccatgcgtgatcagcagggagataatggagaattacaatatcgccctgagatggacagctaagcagaagctctactccagaacaggcgaatccgtcgagttcgtgtgtaaacgcgggtatcgcctttcgagtagatcacacacattacgcaccacttgctgggacgggaagcttgaatatccaacctgcgccaagcgatag

SEQ ID NO: 3862 - DNA, 3696 bp, Artificial Sequence
  derived and/or modified sequence
atgcgcctgcttgctaagattatatgcctgatgctctgggctatatgcgtcgccgaggattgtaacgaactgcccccacgacgcaacaccgagatccttacgggctcatggagtgatcagacgtatcccgagggaacccaggctatctataaatgtagaccaggctatcgctctctcggaaacgtgattatggtgtgtcggaaaggagaatgggtggcgctgaatcctcttcggaagtgtcagaaaagaccttgcggacatccgggagatacaccatttggaacttttacacttacagggggaaacgtgttcgagtatggagtcaaggccgtgtatacatgcaatgaaggctaccaactattgggagaaatcaactacagggagtgtgatactgatggatggaccaacgacatcccaatttgtgaagtggttaaatgtctgccggtgacagctcctgaaaacggaaagatcgtgagttcggccatggagcctgatagagaataccatttcggacaagccgtgagattcgtgtgtaattccgggtacaagattgagggcgatgaggagatgcattgtagtgatgatgggttttggtcaaaagaaaaaccaaaatgcgtggagatttcatgcaagtcccctgatgtgatcaacggaagccccatctcacagaagattatctacaaagagaacgagaggtttcagtataagtgcaatatggggtacgagtacagtgagaggggggacgcagtgtgcaccgagagtggatggcggcctctgcctagttgtgaggagaaatcatgcgataatccatatatccctaatggagattactctcccctcagaataaagcaccgcacaggagacgagattacctaccagtgtcgtaacggcttctaccctgccacgagggggaatacagccaaatgtacatccacgggatggatacccgctccaagatgcaccctgaaaccctgcgattatccagatataaagcacggtgggctttaccatgaaaatatgcgtcgtccatactttcccgtcgctgtgggcaaatattacagctactattgcgatgagcattttgagacaccaagcggttcctactgggatcacattcactgcacccaggacggctggagccccgctgtcccttgccttcggaagtgctatttcccataccttgagaacgggtacaaccaaaaccacggacgcaaatttgtccagggtaaatccattgatgttgcctgtcatcccggatacgccttaccaaaagctcaaacgacagttacctgcatggaaaacgggtggtcaccgacgcctaggtgcatccgggtcaaaacctgctctaaatcctccatcgatattgagaacggcttcatcagcgagagtcagtatacctacgccctgaaagagaaagccaagtaccagtgcaaactgggttacgtgacagctgacggggaaaccagcgggtcaatcacatgcgggaaggatggctggtcagctcagcctacctgcattaaatcttgtgacatcccagtatttatgaacgccaggacaaagaatgattttacctggtttaagctgaacgacacccttgattacgagtgtcatgacggatatgaatcaaacacaggatctacaactggctcaatcgtatgcggttacaacggttggtctgatctccctatctgctatgagcgcgagtgtgaactgcccaaaatcgacgttcatctggtgcccgatcgcaagaaggaccagtataaagtcggtgaggtactgaagttcagttgcaagccgggtttcacaatcgtggggcctaatagcgtgcagtgctatcacttcgggctgagtcccgacttgcctatctgcaaggaacaagttcagtcctgcggccctccacctgaattgttgaacggtaatgtcaaggaaaaaacaaaggaggagtatggtcactcagaggtagtagaatactactgtaacccacgttttctcatgaaggggcctaacaagatccagtgtgtcgatggcgagtggactacactgcctgtttgtatcgttgaggagagtacctgtggggacatccccgagttggaacatggttgggctcagctaagctcacctccatactactacggggactcggtggaatttaactgctcagaaagcttcacaatgattgggcatcggtccatcacctgtattcacggagtgtggacgcagctacctcaatgcgtggctatagacaaactgaagaagtgtaaatccagcaatctcattatcctcgaagaacacttgaagaacaaaaaagagtttgatcataactcaaacattcgctaccgctgtcgaggtaaagaaggctggatccatacagtctgtatcaacggtcggtgggatcccgaggttaattgctctatggcacagatccaactgtgtccaccacccccacaaatcccaaattctcacaacatgactacgactcttaattatcgggatggcgagaaggtgagcgtgctgtgtcaagagaactacttaattcaggagggagaggaaattacctgcaaagatggcagatggcagtctatccccctgtgcgtggaaaaaatcccatgtagccagcctccccagatcgaacatggtactataaacagttcgagatctagccaggagtcttacgcacacgggacgaaactgtcctatacttgtgagggcggattccggatctccgaagaaaacgaaaccacctgttatatgggcaaatggagcagccccccacaatgcgaggggttgccctgcaaatcacctccagagataagccacggagttgtggctcacatgtcggattcttaccagtacggcgaggaggttacatataaatgcttcgaggggttcggcattgacggcccagccatcgcaaagtgcctgggtgagaaatggagtcaccccccatcttgtataaaaaccgactgtttaagtctgcctagcttcgaaaatgccatcccgatgggtgagaaaaaagacgtgtataaggccggtgagcaagtcacatacacctgcgcaacgtactacaagatggacggagcctcaaatgtaacatgcatcaatagccgttggactggcagaccaacgtgccgggatacaagctgcgtaaaccctccaactgtccagaacgcttacattgttagccgccagatgtccaaatacccgtcaggtgaacgagtacgctatcagtgtagatcaccctacgagatgtttggcgatgaagaagtgatgtgcctaaatgggaattggacggagccccctcaatgcaaagattcaacaggaaaatgcgggccaccgcctcccattgataatggggatattacttcatttcctctgtcagtctacgctcctgctagctccgtagagtaccagtgtcagaatctgtaccagctggaagggaacaaacgaattacatgccgcaatggacaatggtccgagccaccaaagtgtttacatccctgcgtgatctcccgcgagatcatggagaattataacattgctctgaggtggaccgctaaacagaaactgtatagcagaacaggtgaatccgtcgagtttgtgtgtaaacgaggctaccgcttatccagcaggtcccataccttgcgcaccacctgctgggatggtaagttggaatatcctacctgtgccaagaggtag

SEQ ID NO: 3863 - DNA, 3696 bp, Artificial Sequence
  derived and/or modified sequence
atgagattgttagccaaaatcatttgcttgatgctctgggccatttgcgtagctgaagattgtaatgaactgccaccaaggcgcaacacagagatcttgactggcagttggtcagaccagacctatcctgaaggcacccaggctatctataagtgcaggcccgggtatcgctccttgggcaacgtgattatggtatgtcgcaaaggggagtgggttgccttgaatcccctgagaaagtgtcagaagcgaccctgtggtcatccgggtgacaccccctttgggacatttacactgaccggagggaacgtgtttgagtacggcgtcaaagcagtgtacacctgtaacgagggctatcaattacttggagagattaattacagggagtgcgacactgatggctggaccaacgacatacctatttgtgaggtggtgaagtgccttccagtcacagcgccagaaaatggtaaaattgtttccagcgcgatggagcctgatcgggaataccacttcggccaggctgtgaggttcgtctgcaacagcggttacaaaattgagggggacgaggagatgcactgttccgacgatggtttttggtctaaagaaaagcccaagtgcgttgaaataagctgcaagagcccggatgtgataaatggaagcccaattagccaaaaaattatctataaggagaatgagcgctttcagtacaaatgcaacatgggctacgagtacagcgagaggggagacgccgtgtgcactgagagcggatggaggcctctaccaagttgcgaggaaaagagttgtgataacccatatatccctaatggcgattatagccccctgagaatcaagcaccgtacaggcgacgaaatcacttatcagtgtagaaacggattttatccagcaaccagaggcaatactgccaagtgtacttcaaccgggtggattcctgctccccgctgtacattgaagccatgcgactatccagatatcaagcacgggggactctaccacgagaatatgcggcgtccctattttcccgtggcagtcggaaaatattattcctactactgtgatgagcattttgaaacacctagtggtagctactgggatcacatccactgtacacaagacgggtggtcacctgccgtaccttgcctccggaaatgctacttcccttacctggagaatgggtataaccagaaccacgggcgaaaattcgttcaaggtaaatccattgatgttgcttgtcaccccggctatgccttgcccaaggcacagaccacagtgacttgcatggagaatggatggtcccctacgccacgatgtatacgcgtgaagacgtgcagcaaatcatctattgatatcgaaaatggatttatttctgagtcccagtatacatatgccctgaaagagaaagccaaatatcagtgcaaactcggctatgtcaccgccgatggcgaaacttccggttcgattacttgcggaaaagatggatggagcgcccaacccacctgcattaagagttgcgatattcccgtgtttatgaatgcgcggacaaaaaatgatttcacatggttcaagcttaacgacaccttagactacgagtgccacgatggctatgaaagcaacacaggctcaacaacaggaagcattgtgtgcggttacaacggatggtcagacttacccatttgctacgagcgagagtgcgaactgcccaagattgacgtacaccttgtgccggaccggaagaaagaccaatacaaagtgggcgaggttctgaaattctcctgtaagccagggttcacaattgtagggccaaattctgttcagtgctaccacttcgggctctctcccgacctgcctatctgcaaggaacaggtgcagagctgtggcccaccgcctgaactgttgaacgggaacgtcaaagagaagacgaaggaagagtacgggcactctgaagttgtggagtactactgcaacccaagatttcttatgaaaggacctaacaaaatccagtgcgtggacggcgaatggaccaccctcccagtatgcatcgttgaagaatccacgtgtggggatatccccgagctggagcacggctgggcccaactgtcttcacctccctattattatggcgacagcgttgaattcaattgctccgaatcgttcacaatgatcggacatagatccatcacttgcatccacggtgtatggacccagctgccccagtgcgttgccatcgacaaacttaaaaaatgcaaaagttcaaatttgattatcctcgaggagcaccttaagaataaaaaagaattcgaccacaacagcaatatccggtatagatgtcgaggcaaggaaggctggattcatacggtgtgcattaacgggaggtgggacccagaagtgaattgtagcatggcccaaatccagctctgccctccaccgccacaaatcccaaatagccataatatgaccacaacgctcaattaccgtgacggtgaaaaggtaagcgtgctatgccaagaaaactaccttattcaggaaggtgaggagattacatgcaaggacgggcgctggcagagcatacccctttgtgtggaaaagatcccatgctcgcagccacctcagatagaacatggcacgattaactcttcccggagctctcaggagtcatacgcccatggcaccaaactctcttatacatgtgaaggaggatttcgcatcagcgaggagaatgagactacgtgttatatgggcaaatggagttctcccccccagtgtgagggcttaccatgtaagagcccgcccgaaattagccacggggtggtggcacatatgtctgattcctatcagtacggggaggaggtaacatacaaatgtttcgagggattcggcattgacggccccgccattgctaagtgtctcggcgaaaagtggtcacatccaccaagctgcatcaagacagactgtctgagtttgccttctttcgaaaacgccattccaatgggggaaaaaaaggatgtttataaggccggcgagcaagtgacctatacttgcgcaacttattataaaatggacggcgcttcaaacgtcacctgtataaacagccgatggaccggcaggcccacttgtcgcgatacctcatgtgtaaatcccccaacagtgcagaacgcgtatatcgtttctagacagatgagcaagtacccttccggcgagagggtgcgctatcagtgcagaagcccctatgaaatgttcggcgacgaggaggtgatgtgtctaaatggtaactggaccgagccgcctcaatgtaaagactctactggtaagtgtggcccacccccaccgattgataatggagatatcacatcgtttccactgagtgtgtacgcacctgcaagttccgtggaatatcagtgccagaatctgtatcaactagagggcaacaaacgtattacatgcaggaacggtcaatggagcgagcctcccaagtgcctccacccatgcgtgatttctagggaaataatggagaattacaacatcgccctcaggtggacagccaaacagaaactgtactccagaacaggcgagagtgtggagtttgtctgtaagagggggtatcgactatcatcacgcagtcatacattgcgaacaacctgttgggacgggaagctagaataccctacttgcgccaagagatag

SEQ ID NO: 3864 - DNA, 3696 bp, Artificial Sequence
  derived and/or modified sequence
atgagactgctcgctaagatcatctgtcttatgttgtgggcaatatgtgtagctgaagattgtaatgaacttccaccaaggcgaaataccgaaattcttactggtagctggagtgaccagacttaccctgagggcacacaggccatatacaagtgcaggcctggctacaggtcccttggcaatgtgataatggtgtgcaggaagggcgaatgggtggccttgaatccactcagaaaatgtcagaaacggccttgtggacaccccggcgatacacccttcgggactttcactttgaccggtgggaatgtgtttgaatatggtgtgaaggccgtgtacacatgcaacgagggatatcagcttttaggagagattaattatcgtgaatgtgacacagatggatggacaaacgacattcctatttgcgaagtcgtgaagtgcctccccgtaacagcacctgaaaatgggaaaattgtctccagtgctatggaaccagatcgcgagtaccattttggacaggcagtgagatttgtatgcaacagcggatacaagatcgaaggggatgaagaaatgcactgctccgatgatggtttttggtccaaggagaaaccgaagtgtgtagagatttcatgcaagtccccagacgtgattaacggttcacccatatcacagaagattatttataaggaaaacgaacgatttcagtacaagtgcaacatgggctacgaatactcagagagaggagatgcagtttgtacagagtcaggatggcgtccactgccctcttgtgaagagaagtcctgcgataatccatacattcctaacggagattacagcccgcttagaattaaacacagaacaggagacgagattacctaccagtgtaggaatgggttttatcccgccacgagaggcaatacggccaagtgtacttctactggatggatccccgcacctagatgcactttaaagccctgtgactaccccgacataaaacacggcggcctttaccacgaaaacatgcgaagaccatatttccctgtagctgtgggtaaatactactcttactattgcgatgagcattttgaaacaccttctgggtcttattgggaccacatccactgtactcaggacggctggtcacccgccgtcccctgtttacgcaaatgctactttccctatctggaaaacgggtataaccagaaccacggaaggaagttcgtgcagggaaaatcgatcgacgtggcctgtcaccccggttatgcattaccaaaagcacagaccaccgttacctgcatggaaaatggttggagccctacacctcgctgtattcgcgtcaagacctgttctaaaagcagtatcgacatagagaacggctttatcagcgaatcccagtatacctatgctctcaaggaaaaggctaaataccagtgtaagttgggatatgtaacagctgacggcgaaacgtctggaagtatcacctgcggtaaggatggatggtcagcccagcccacatgcattaagtcctgcgacattcctgtctttatgaatgcacgtactaaaaatgatttcacctggtttaagctgaacgataccctagattatgagtgtcacgatggctatgaaagcaacacgggctctacgacaggctcaattgtctgtggttataacggatggtctgaccttccaatctgctatgaacgagagtgcgagctcccaaaaatcgatgttcacctggtccctgatagaaaaaaagaccagtataaagttggtgaggtgttgaaattttcctgtaaacccggattcaccatagttgggcctaattccgtacaatgttaccactttggtctctcgccagacctgcctatatgcaaggagcaggtgcaaagctgcggaccaccaccagagctgttgaatggaaatgtcaaagaaaaaacaaaggaagaatacggccacagcgaggtcgtcgagtactactgtaacccacggtttctgatgaagggcccgaacaagatccagtgtgtagacggggaatggaccactttgccagtatgcattgtagaggaatccacctgcggagatattcctgaactcgaacatggttgggcccagctgtcctcaccaccttactattacggcgacagcgttgaatttaattgctctgaatcatttacaatgattggacatcggtcaatcacttgtattcacggcgtctggacccaacttccccaatgcgtggctatcgacaagttgaaaaaatgtaaaagtagtaatcttatcattctggaggaacatctcaagaacaagaaagaattcgatcataatagcaatattcgctaccgatgcagaggcaaggaagggtggattcatacggtgtgcatcaatggtagatgggatcctgaggtaaattgttccatggcccaaatccagctatgcccaccacctcctcaaatccctaacagccataacatgaccacaaccctgaactacagagacggagagaaggtgtccgtcctttgccaggaaaattatctcatccaggagggtgaggagatcacttgtaaagatggaaggtggcagagtatacccctgtgcgtcgagaaaattccttgtagccaacctccacaaatagaacatggcacaattaactcttccagaagctcccaagaatcatatgcacacggcactaaactgtcttatacttgcgaaggcggcttccggattagtgaggaaaacgaaaccacgtgttatatgggtaaatggagttctcctcctcaatgcgaaggactcccgtgcaagtccccgccagagattagccacggagttgtggcccatatgtcagattcctaccagtatggtgaagaagtgacttacaaatgctttgaaggctttggtattgatggccccgcaatcgctaaatgcctgggtgagaagtggtcacaccctccctcttgtatcaaaacggactgtctctccctgccatcctttgagaatgccatccctatgggcgaaaagaaggatgtgtataaagctggtgaacaggtaacgtatacctgtgccacctattataaaatggacggagcttcaaatgtgacctgtataaattctcggtggacaggacgccccacttgcagagacacatcatgtgtgaatccacctacagtgcagaacgcatacatagtttcgcggcagatgtcaaagtatccaagtggcgaacgagtcaggtatcagtgcagatccccatacgaaatgtttggcgacgaggaagtcatgtgcttgaacggcaattggactgaaccaccacaatgtaaagattcgactggcaagtgcggcccccctcctccaatcgataatggagacataacatcttttccccttagtgtgtatgcaccggccagttcagtggagtaccaatgccagaacctataccagttagagggcaataaaagaattacctgccgaaacggccaatggtctgagcctcctaaatgcctgcatccctgtgtgatttcaagagagataatggaaaactacaacatagctcttcgatggacagccaaacaaaagttgtattcccgcacgggcgagtctgtggaatttgtctgcaaaagaggatataggctcagctctcgctcccacacactccgtacaacatgttgggacggaaaactcgaataccccacatgcgcaaagagatag

SEQ ID NO: 3865 - RNA, 3839 nt, Artificial Sequence
  derived and/or modified sequence
gggaaauaagagagaaaagaagaguaagaagaaauauaagagccaccaugagguuguuggcuaagaucauuugccuuaugcugugggcgaucugugucgccgaggacuguaaugagcuuccgccucggaggaauacggaaauccucacggguagcuggucggaucagaccuaucccgagggaacccaggcgaucuacaagugccgaccgggguaucgaucacucgggaacgugaucaugguaugccggaagggagaauggguggcgcugaacccccuucgcaaaugucagaaaagaccgugcggccaccccggugacaccccuuuugggacuuuuacacugacuggaggcaaugucuuugaguacggggucaaggcgguauacacuuguaaugagggauaucaacugcucggagaaaucaacuacagggagugugauacggacggauggacgaacgacauccccauuugugaggucgugaagugccuucccgugaccgcgccugaaaacggaaaaaucguaucgagcgcaauggaaccagaccgggaauaucacuucgggcaggccguacgguucguaugcaacagcggcuauaagaucgagggugacgaagaaaugcauuguucggaugauggguuuugguccaaagaaaaacccaaauguguagagaucucgugcaaaucaccugacgucaucaacggcucccccauuagccagaagaucaucuacaaggaaaaugagcgcuuccaguacaaauguaacaugggcuacgaauacagcgaacggggugacgcagugugcacagaaucgggauggaggccgcucccuucgugugaagaaaaaucaugugauaacccguacauucccaauggugauuacucgccgcuuaggaucaaacacagaaccggugacgagauuacguaucaaugccgaaacggguuuuaccccgccacucgggggaacacggcuaagugcaccuccacgggauggauuccagcaccgcggugcacauugaaaccuugugacuaccccgacauuaaacacggcgguuuguaccaugagaacaugcgacggccauauuuccccguggcggucggaaaauacuacucauauuacugugaugaacacuuugaaaccccgagcggaucguacugggaucacauucacuguacgcaagacgggugguccccggcagugccgugccucagaaagugcuauuucccauacuuggaaaauggguacaaccaaaaccacgggagaaaauucguccagggaaaaucaauugacguggcgugucaucccggauaugcccugcccaaggcucagacgacggucacguguauggagaacggauggagcccuacuccucgguguauuagggugaaaacaugcucgaaguccagcauugauaucgaaaauggcuuuaucucggaaucgcaguacaccuacgcucugaaggagaaagcgaaauaucagugcaaacucgguuaugugacggcggacggagaaacuucgggaucgauuacgugcgguaaagauggcuggucggcacaacccacaugcaucaagucgugugacaucccgguguucaugaaugcgcgcacgaagaacgauuucacgugguuuaaguugaacgacacgcucgauuaugaaugucaugacggguacgagucaaacaccgggucaaccacuggaagcaucguauguggguacaauggguggagcgaccuccccauuugcuaugaaagagagugcgaacuucccaaaaucgaugugcaucucgugccggaccgaaagaaggaccaguauaaagugggagaaguccucaaguuuagcugcaaaccgggguucacuaucgucgggcccaauucaguccagugcuaucacuuuggacucucacccgauuugccaauuugcaaggaacaagugcagagcuguggaccacccccagagcugcuuaauggcaacguaaaagagaaaacaaaggaagaguacggacauucggaggugguggaguauuacugcaacccccgguuucugaugaagggacccaacaagauccaaugcgucgauggagaauggaccacucugccugucuguauugucgaagaaucaacaugcggagacauucccgaguuggaacacgggugggcucagcuuucgagcccuccuuacuauuauggggauuccguagaguucaauugcagcgagucauucacaaugaucggccaccgaucaauuacuuguauccacggggucuggacacagcuuccacagugugucgcaaucgauaagcucaagaagugcaaaucaagcaaccugaucauuuuggaggagcaucucaagaacaagaaagaauuugaucauaauucaaacauuagguaucgcugcagaggaaaagaagguuggauucacacuguaugcaucaacgggcgaugggaccccgaggugaacuguucgauggcacaaauccagcuuugcccgccuccgccucagauuccaaacucccacaauaugaccacaacauugaauuaucgggacggagagaaaguauccgugcugugccaagagaauuaucucauccaagagggugaggaaaucacguguaaggauggccgguggcagucgaucccguuguguguagaaaagaucccgugcucgcaacccccucaaaucgagcacggaacaaucaauucaucgcggucaagccaagaaagcuacgcgcauggaacaaaguuguccuacacgugugaaggaggguucagaaucagcgaagaaaacgaaaccaccuguuauauggggaaguggucgucaccaccccagugugaggggcugccauguaaguccccucccgagaucucccauggggucgucgcgcacaugucggacagcuaccaguacggagaggaggucacuuacaaauguuucgagggauuuggaaucgacgguccagcgaucgccaaaugcuugggagaaaaguggucccaucccccgagcuguauuaagacggacugucucagccuccccucguucgagaaugccauuccgaugggggagaagaaagauguguacaaggcgggagaacaggucacauacacaugugcgacauacuauaagauggauggggcgagcaacgucacuugcaucaacucacgguggacaggcagaccgacgugccgcgauaccucaugugucaauccuccuacugugcagaacgcauacaucguaucacggcagaugucgaaguaccccuccggugagagagugagauaccagugcagaagccccuaugaaauguuuggcgacgaggaagugaugugccuuaacgguaacuggaccgaaccuccccaguguaaagauagcacggggaagugcggaccgccuccucccauugacaauggagauauuacgucguuuccacugucgguguacgcaccagcuucguccgucgaguaccagugccaaaaucucuaucaguuggagggaaacaaacggauuacgugucgcaacggacaguggagcgagcccccuaagugucuccaccccugcguaauuagcagggagauuauggaaaacuauaacauugcgcuucgguggacggcuaagcagaaacucuacagcagaacuggagagagcgucgaguuuguaugcaagcgagguuauagguugucaucgaggucccacacauugaggacgacgugcugggacggcaaacuggaguaucccacgugcgcuaaaagguaaugagcugccuucugcggggcuugccuucuggccaugcccuucuucucucccuugcaccuguaccucuuggucuuugaauaaagccugaguaggaag

SEQ ID NO: 3866 - RNA, 3696 nt, Artificial Sequence
  derived and/or modified sequence
augagauuguuagccaaaaucauuugcuugaugcucugggccauuugcguagcugaagauuguaaugaacugccaccaaggcgcaacacagagaucuugacuggcaguuggucagaccagaccuauccugaaggcacccaggcuaucuauaagugcaggcccggguaucgcuccuugggcaacgugauuaugguaugucgcaaaggggaguggguugccuugaauccccugagaaagugucagaagcgacccuguggucauccgggugacacccccuuugggacauuuacacugaccggagggaacguguuugaguacggcgucaaagcaguguacaccuguaacgagggcuaucaauuacuuggagagauuaauuacagggagugcgacacugauggcuggaccaacgacauaccuauuugugagguggugaagugccuuccagucacagcgccagaaaaugguaaaauuguuuccagcgcgauggagccugaucgggaauaccacuucggccaggcugugagguucgucugcaacagcgguuacaaaauugagggggacgaggagaugcacuguuccgacgaugguuuuuggucuaaagaaaagcccaagugcguugaaauaagcugcaagagcccggaugugauaaauggaagcccaauuagccaaaaaauuaucuauaaggagaaugagcgcuuucaguacaaaugcaacaugggcuacgaguacagcgagaggggagacgccgugugcacugagagcggauggaggccucuaccaaguugcgaggaaaagaguugugauaacccauauaucccuaauggcgauuauagcccccugagaaucaagcaccguacaggcgacgaaaucacuuaucaguguagaaacggauuuuauccagcaaccagaggcaauacugccaaguguacuucaaccggguggauuccugcuccccgcuguacauugaagccaugcgacuauccagauaucaagcacgggggacucuaccacgagaauaugcggcgucccuauuuucccguggcagucggaaaauauuauuccuacuacugugaugagcauuuugaaacaccuagugguagcuacugggaucacauccacuguacacaagacggguggucaccugccguaccuugccuccggaaaugcuacuucccuuaccuggagaauggguauaaccagaaccacgggcgaaaauucguucaagguaaauccauugauguugcuugucaccccggcuaugccuugcccaaggcacagaccacagugacuugcauggagaauggaugguccccuacgccacgauguauacgcgugaagacgugcagcaaaucaucuauugauaucgaaaauggauuuauuucugagucccaguauacauaugcccugaaagagaaagccaaauaucagugcaaacucggcuaugucaccgccgauggcgaaacuuccgguucgauuacuugcggaaaagauggauggagcgcccaacccaccugcauuaagaguugcgauauucccguguuuaugaaugcgcggacaaaaaaugauuucacaugguucaagcuuaacgacaccuuagacuacgagugccacgauggcuaugaaagcaacacaggcucaacaacaggaagcauugugugcgguuacaacggauggucagacuuacccauuugcuacgagcgagagugcgaacugcccaagauugacguacaccuugugccggaccggaagaaagaccaauacaaagugggcgagguucugaaauucuccuguaagccaggguucacaauuguagggccaaauucuguucagugcuaccacuucgggcucucucccgaccugccuaucugcaaggaacaggugcagagcuguggcccaccgccugaacuguugaacgggaacgucaaagagaagacgaaggaagaguacgggcacucugaaguuguggaguacuacugcaacccaagauuucuuaugaaaggaccuaacaaaauccagugcguggacggcgaauggaccacccucccaguaugcaucguugaagaauccacguguggggauauccccgagcuggagcacggcugggcccaacugucuucaccucccuauuauuauggcgacagcguugaauucaauugcuccgaaucguucacaaugaucggacauagauccaucacuugcauccacgguguauggacccagcugccccagugcguugccaucgacaaacuuaaaaaaugcaaaaguucaaauuugauuauccucgaggagcaccuuaagaauaaaaaagaauucgaccacaacagcaauauccgguauagaugucgaggcaaggaaggcuggauucauacggugugcauuaacgggaggugggacccagaagugaauuguagcauggcccaaauccagcucugcccuccaccgccacaaaucccaaauagccauaauaugaccacaacgcucaauuaccgugacggugaaaagguaagcgugcuaugccaagaaaacuaccuuauucaggaaggugaggagauuacaugcaaggacgggcgcuggcagagcauaccccuuuguguggaaaagaucccaugcucgcagccaccucagauagaacauggcacgauuaacucuucccggagcucucaggagucauacgcccauggcaccaaacucucuuauacaugugaaggaggauuucgcaucagcgaggagaaugagacuacguguuauaugggcaaauggaguucucccccccagugugagggcuuaccauguaagagcccgcccgaaauuagccacggggugguggcacauaugucugauuccuaucaguacggggaggagguaacauacaaauguuucgagggauucggcauugacggccccgccauugcuaagugucucggcgaaaaguggucacauccaccaagcugcaucaagacagacugucugaguuugccuucuuucgaaaacgccauuccaaugggggaaaaaaaggauguuuauaaggccggcgagcaagugaccuauacuugcgcaacuuauuauaaaauggacggcgcuucaaacgucaccuguauaaacagccgauggaccggcaggcccacuugucgcgauaccucauguguaaaucccccaacagugcagaacgcguauaucguuucuagacagaugagcaaguacccuuccggcgagagggugcgcuaucagugcagaagccccuaugaaauguucggcgacgaggaggugaugugucuaaaugguaacuggaccgagccgccucaauguaaagacucuacugguaaguguggcccacccccaccgauugauaauggagauaucacaucguuuccacugaguguguacgcaccugcaaguuccguggaauaucagugccagaaucuguaucaacuagagggcaacaaacguauuacaugcaggaacggucaauggagcgagccucccaagugccuccacccaugcgugauuucuagggaaauaauggagaauuacaacaucgcccucagguggacagccaaacagaaacuguacuccagaacaggcgagaguguggaguuugucuguaagaggggguaucgacuaucaucacgcagucauacauugcgaacaaccuguugggacgggaagcuagaauacccuacuugcgccaagagauag

SEQ ID NO: 3867 - RNA, 3696 nt, Artificial Sequence
  derived and/or modified sequence
augagacugcucgcuaagaucaucugucuuauguugugggcaauauguguagcugaagauuguaaugaacuuccaccaaggcgaaauaccgaaauucuuacugguagcuggagugaccagacuuacccugagggcacacaggccauauacaagugcaggccuggcuacaggucccuuggcaaugugauaauggugugcaggaagggcgaauggguggccuugaauccacucagaaaaugucagaaacggccuuguggacaccccggcgauacacccuucgggacuuucacuuugaccggugggaauguguuugaauauggugugaaggccguguacacaugcaacgagggauaucagcuuuuaggagagauuaauuaucgugaaugugacacagauggauggacaaacgacauuccuauuugcgaagucgugaagugccuccccguaacagcaccugaaaaugggaaaauugucuccagugcuauggaaccagaucgcgaguaccauuuuggacaggcagugagauuuguaugcaacagcggauacaagaucgaaggggaugaagaaaugcacugcuccgaugaugguuuuugguccaaggagaaaccgaaguguguagagauuucaugcaaguccccagacgugauuaacgguucacccauaucacagaagauuauuuauaaggaaaacgaacgauuucaguacaagugcaacaugggcuacgaauacucagagagaggagaugcaguuuguacagagucaggauggcguccacugcccucuugugaagagaaguccugcgauaauccauacauuccuaacggagauuacagcccgcuuagaauuaaacacagaacaggagacgagauuaccuaccaguguaggaauggguuuuaucccgccacgagaggcaauacggccaaguguacuucuacuggauggauccccgcaccuagaugcacuuuaaagcccugugacuaccccgacauaaaacacggcggccuuuaccacgaaaacaugcgaagaccauauuucccuguagcuguggguaaauacuacucuuacuauugcgaugagcauuuugaaacaccuucugggucuuauugggaccacauccacuguacucaggacggcuggucacccgccguccccuguuuacgcaaaugcuacuuucccuaucuggaaaacggguauaaccagaaccacggaaggaaguucgugcagggaaaaucgaucgacguggccugucaccccgguuaugcauuaccaaaagcacagaccaccguuaccugcauggaaaaugguuggagcccuacaccucgcuguauucgcgucaagaccuguucuaaaagcaguaucgacauagagaacggcuuuaucagcgaaucccaguauaccuaugcucucaaggaaaaggcuaaauaccaguguaaguugggauauguaacagcugacggcgaaacgucuggaaguaucaccugcgguaaggauggauggucagcccagcccacaugcauuaaguccugcgacauuccugucuuuaugaaugcacguacuaaaaaugauuucaccugguuuaagcugaacgauacccuagauuaugagugucacgauggcuaugaaagcaacacgggcucuacgacaggcucaauugucugugguuauaacggauggucugaccuuccaaucugcuaugaacgagagugcgagcucccaaaaaucgauguucaccuggucccugauagaaaaaaagaccaguauaaaguuggugagguguugaaauuuuccuguaaacccggauucaccauaguugggccuaauuccguacaauguuaccacuuuggucucucgccagaccugccuauaugcaaggagcaggugcaaagcugcggaccaccaccagagcuguugaauggaaaugucaaagaaaaaacaaaggaagaauacggccacagcgaggucgucgaguacuacuguaacccacgguuucugaugaagggcccgaacaagauccaguguguagacggggaauggaccacuuugccaguaugcauuguagaggaauccaccugcggagauauuccugaacucgaacaugguugggcccagcuguccucaccaccuuacuauuacggcgacagcguugaauuuaauugcucugaaucauuuacaaugauuggacaucggucaaucacuuguauucacggcgucuggacccaacuuccccaaugcguggcuaucgacaaguugaaaaaauguaaaaguaguaaucuuaucauucuggaggaacaucucaagaacaagaaagaauucgaucauaauagcaauauucgcuaccgaugcagaggcaaggaaggguggauucauacggugugcaucaaugguagaugggauccugagguaaauuguuccauggcccaaauccagcuaugcccaccaccuccucaaaucccuaacagccauaacaugaccacaacccugaacuacagagacggagagaagguguccguccuuugccaggaaaauuaucucauccaggagggugaggagaucacuuguaaagauggaagguggcagaguauaccccugugcgucgagaaaauuccuuguagccaaccuccacaaauagaacauggcacaauuaacucuuccagaagcucccaagaaucauaugcacacggcacuaaacugucuuauacuugcgaaggcggcuuccggauuagugaggaaaacgaaaccacguguuauauggguaaauggaguucuccuccucaaugcgaaggacucccgugcaaguccccgccagagauuagccacggaguuguggcccauaugucagauuccuaccaguauggugaagaagugacuuacaaaugcuuugaaggcuuugguauugauggccccgcaaucgcuaaaugccugggugagaaguggucacacccucccucuuguaucaaaacggacugucucucccugccauccuuugagaaugccaucccuaugggcgaaaagaaggauguguauaaagcuggugaacagguaacguauaccugugccaccuauuauaaaauggacggagcuucaaaugugaccuguauaaauucucgguggacaggacgccccacuugcagagacacaucaugugugaauccaccuacagugcagaacgcauacauaguuucgcggcagaugucaaaguauccaaguggcgaacgagucagguaucagugcagauccccauacgaaauguuuggcgacgaggaagucaugugcuugaacggcaauuggacugaaccaccacaauguaaagauucgacuggcaagugcggccccccuccuccaaucgauaauggagacauaacaucuuuuccccuuaguguguaugcaccggccaguucaguggaguaccaaugccagaaccuauaccaguuagagggcaauaaaagaauuaccugccgaaacggccaauggucugagccuccuaaaugccugcaucccugugugauuucaagagagauaauggaaaacuacaacauagcucuucgauggacagccaaacaaaaguuguauucccgcacgggcgagucuguggaauuugucugcaaaagaggauauaggcucagcucucgcucccacacacuccguacaacauguugggacggaaaacucgaauaccccacaugcgcaaagagauag

SEQ ID NO: 3868 - protein, 445 aa, Artificial Sequence
  derived and/or modified sequence
MAELKYISGFGNECSSEDPRCPGSLPEGQNNPQVCPYNLYAEQLSGSAFTCPRSTNKRSWLYRILPSVSHKPFESIDEGQVTHNWDEVDPDPNQLRWKPFEIPKASQKKVDFVSGLHTLCGAGDIKSNNGLAIHIFLCNTSMENRCFYNSDGDFLIVPQKGNLLIYTEFGKMLVQPNEICVIQRGMRFSIDVFEETRGYILEVYGVHFELPDLGPIGANGLANPRDFLIPIAWYEDRQVPGGYTVINKYQGKLFAAKQDVSPFNVVAWHGNYTPYKYNLKNFMVINSVAFDHADPSIFTVLTAKSVRPGVAIADFVIFPPRWGVADKTFRPPYYHRNCMSEFMGLIRGHYEAKQGGFLPGGGSLHSTMTPHGPDADCFEKASKVKLAPERIADGTMAFMFESSLSLAVTKWGLKASRCLDENYHKCWEPLKSHFTPNSRNPAEPN

SEQ ID NO: 3869 - DNA, 1338 bp, Artificial Sequence
  derived and/or modified sequence
atggctgaactgaaatatatatctggcttcggcaatgagtgtagctctgaggacccccgatgtcccggtagtttacctgagggtcagaacaaccctcaggtgtgcccatacaacctgtacgccgaacagctttctggcagtgccttcacatgtccacgctcaaccaataaaagatcctggctgtaccgcatcctgcccagcgtatcacataaaccttttgaaagcatcgatgagggccaggtaactcacaattgggatgaggtggacccagatcctaatcagctcaggtggaaaccttttgaaattcctaaggcgtcccagaagaaagtcgacttcgtgtctggactacacactctgtgcggtgctggcgacatcaagtctaacaacggtctggcgatacacatttttctttgcaatacttctatggagaatcgctgcttctacaacagtgatggggattttctgatcgtgccccagaaggggaatctgctcatatacaccgaatttggcaagatgctggttcaacctaacgagatatgtgtgatacagaggggcatgcggttctccatagacgtctttgaggagacccgtgggtatatcctggaagtatacggtgtccatttcgaacttcctgatcttgggccaattggggccaatggcttggccaaccctcgtgactttctcatcccaatcgcctggtatgaggacaggcaggtcccagggggctacactgtgataaataaatatcaggggaagctgttcgcagccaaacaagatgtgtctcccttcaacgtggtggcctggcatggtaactatacgccttacaagtacaacctgaagaactttatggtgatcaactccgtggcatttgatcatgcagaccctagcatcttcaccgtgctgaccgccaagtccgtacgcccgggggtcgccatagcagacttcgtgatcttcccacccagatggggcgtcgctgacaaaacctttcgccctccttattatcaccgcaactgcatgagcgagttcatgggcttaatccggggacactacgaggctaagcagggtggatttctcccgggaggtggctcacttcactccaccatgactccccacgggcctgacgcagattgcttcgagaaggccagtaaggtcaagcttgcacctgaacggattgcggatggcactatggcttttatgttcgaaagcagcctgagtctggcggtcaccaaatgggggctcaaggcatcgagatgcctcgacgagaactaccacaagtgctgggagcctttgaaaagccatttcacacctaatagcaggaaccccgcagaacccaattag

SEQ ID NO: 3870 - DNA, 2005 bp, Artificial Sequence
  derived and/or modified sequence
ctccaggagactcagcactgccctgttccttcctagcctgagtcaggactgagcagagaatcctccaccacacacagcaggcactatctgccacagttcctttccccgatagcttcaaattctctgccttttgaaataagcctacttttaactggaataaataattggtcaatctctacctcaggtgaagaggaaccaagcctctggaaacacttaggaacaaactgtaaaaaccaaaggcaattgtgtaaccggttaaataagcttgctggactttgtccctgtgtatgagttagacaattctttcagctagtttgagtgacgcactgaccagtgaagcgcagtgaagcagtgggaaccggaatatccaaagagtggtttgaaggagaaagaagcattgtggctttatatcctctgggcctgggtttcctgaagtcaccacacatagaggagagagaaaatggctgagttaaagtacatttctggatttgggaatgagtgttcttcagaggatcctcgctgcccaggttccctgccagaaggacagaataatcctcaggtctgcccctacaatctctatgctgagcagctctcaggatcggctttcacttgtccacggagcaccaataagagaagctggctgtataggattctaccttcagtttctcacaagccctttgaatccattgacgaaggccaagtcactcacaactgggatgaagttgatcctgatcctaaccagcttagatggaaaccatttgagattccaaaagcatctcagaagaaagtagactttgtgagtggcctgcataccttgtgtggagctggagacataaagtctaacaatgggcttgctatccacattttcctctgcaatacctccatggagaacagatgcttttacaattcagatggggacttcttgattgttccgcagaaagggaaccttctcatttacaccgagtttggcaagatgcttgtacagcccaatgagatctgcgtcattcagagaggaatgcggttcagcatagatgtctttgaggagaccaggggctacatcttggaggtctatggtgtccactttgagttacctgaccttggaccaattggggccaatggcttggccaatcctcgtgatttcttgatacccattgcctggtatgaggatcgccaagtaccaggtggttacacggtcattaataaataccagggcaagctgtttgctgccaaacaggatgtctccccgttcaatgttgtggcctggcacgggaattatacaccctacaagtacaacctgaagaatttcatggttatcaactcagtggcctttgaccatgcagacccatccattttcacagtattgactgctaagtctgtccgccctggagtggccattgctgattttgtcatcttcccacctcgatggggggttgctgataagaccttcaggcctccttattaccataggaactgcatgagtgagttcatgggactcatccgaggtcactatgaggcaaagcaaggtgggttcctgccagggggagggagtctacacagcacaatgaccccccatggacctgatgctgactgctttgagaaggccagcaaggtcaagctggcacctgagaggattgccgatggcaccatggcatttatgtttgaatcatctttaagtctggcggtcacaaagtggggactcaaggcctccaggtgtttggatgagaactaccacaagtgctgggagccactcaagagccacttcactcccaactccaggaacccagcagaacctaattgagactggaacattgctaccataattaagagtagatttgtgaagatttcttcagaatctcatgctttctggtagtattggaggagggggttggttaaaatgaaaattcacttttcatagtcaagtaactcagaacttttatggaaacgcatttgcaaagttctatggctgtcaccttaattactcaataaacttgctggtgttctgtgg

SEQ ID NO: 3871 - DNA, 1338 bp, Artificial Sequence
  derived and/or modified sequence
atggccgagctgaagtacatcagcggctttggaaatgaatgttcttctgaggacccccgctgccccggcagcctgcctgagggccagaacaacccccaggtgtgcccctacaacctgtatgcagagcagctgagcggcagcgccttcacctgccccaggagcaccaacaagaggtcctggctgtaccgcatcctgcccagcgtgagccacaagccctttgagagcattgatgagggccaggtgacccacaactgggatgaggtggaccctgaccccaaccagctgcgctggaagccctttgagatccccaaggccagccagaagaaggtggactttgtgtctggcctgcacaccctgtgtggggccggggacatcaagagcaacaacggcctggccatccacatcttcctgtgcaacacctccatggagaaccgctgcttctacaacagtgatggagacttcctgattgtgccccagaagggcaacctgctgatctacacagaatttgggaagatgctggtgcagcccaatgagatctgtgtgatccagaggggcatgaggttcagcattgatgtgtttgaggagacccggggctacatcctggaggtgtatggagtgcactttgagctgcctgacctgggccccatcggggccaacggcctggccaacccccgggacttcctgatccccatcgcctggtatgaagatcggcaggtgcctgggggctacaccgtcatcaacaagtaccagggcaagctgtttgctgccaagcaggatgtgagccccttcaacgtggtggcctggcacggcaactacaccccctacaagtacaacctgaagaacttcatggtgatcaacagcgtggcctttgaccatgctgaccccagcatcttcaccgtgctgacagccaagtctgtgcggcctggggtggccatcgctgactttgtgatcttccccccacgctggggcgtggccgacaagaccttccggcccccctactaccacaggaactgcatgtctgagttcatgggcctcatccggggccactatgaggccaagcagggcggcttcctgcccggcggcggcagcctgcacagcaccatgacccctcatggcccagatgctgactgctttgagaaggccagcaaggtgaagctggcccctgagagaattgctgatggcaccatggccttcatgtttgagagcagcctgagcctggccgtgaccaagtggggcctgaaggccagccgctgcctggatgagaactaccacaagtgctgggagcccctgaagagccacttcacccccaacagcagaaatcctgctgagcccaactag

SEQ ID NO: 3872 - DNA, 1338 bp, Artificial Sequence
  derived and/or modified sequence
atggccgagctgaagtacatcagcggcttcggcaacgagtgcagctccgaagacccgaggtgtccgggttcactccccgagggccagaacaatcctcaggtgtgtccttacaacctatacgccgaacagctttccggctctgcttttacttgcccaaggtctactaataagaggtcttggctataccgcatactgccttctgtgagtcacaagcccttcgaatctatcgacgagggccaggttacgcataattgggatgaggtggatccagacccgaatcagcttcggtggaaaccatttgaaattcccaaggcgagccaaaaaaaggtggattttgtgtccggactacacaccttgtgtggtgctggggatattaaatcaaataacggactggcgatacacatttttctgtgcaacacaagcatggaaaaccgctgcttttataattcagacggcgacttcctaattgtgcctcaaaagggcaatctcctcatttacaccgagttcggaaagatgttggtgcagcccaacgagatctgcgtgatacagaggggcatgagattcagtatcgacgtgttcgaagaaactcgtggctacatcctcgaggtatatggtgtgcactttgagttacccgacctgggtcctataggggctaatgggttggccaatcctagagacttcctgatcccgatcgcctggtacgaagacagacaggtgccgggaggttacacagtgataaacaaatatcagggaaaactttttgctgcaaaacaggatgtcagcccttttaatgtggtcgcttggcatggaaattacacgccctacaaatacaatctgaaaaacttcatggtgattaactccgtggcatttgaccacgcagatcctagcatttttactgtactaaccgcaaaaagcgtaagacccggggtagcaattgctgacttcgtgattttccctcctcgttggggtgtggctgataaaacttttagacctccctactaccatagaaattgtatgtccgagttcatgggcctcattcgcggccactacgaggccaagcagggggggttcctgcccggggggggaagcctacactccacgatgacccctcatggaccagatgccgattgttttgagaaagcctcaaaggtcaaacttgcccctgagcgtattgccgacggcacaatggcctttatgttcgaatcatcattaagcctggccgtgaccaaatggggcctgaaagcctcaagatgtttggacgagaactaccataagtgctgggaaccactaaaaagccacttcacacctaatagtagaaatcccgctgaacccaactag

SEQ ID NO: 3873 - DNA, 1338 bp, Artificial Sequence
  derived and/or modified sequence
atggccgagctgaaatacatatcaggtttcggtaatgaatgttcttcagaggacccacggtgcccaggaagcctgccagagggccagaataatccccaagtttgtccatacaacctctacgccgagcagctgtcaggaagcgcgtttacttgtcccagatccaccaataaaaggtcctggctgtatcggattttgccttctgtgtcccataagcccttcgaaagtattgacgaagggcaggtgacacataattgggacgaagtcgacccagaccctaatcaattacgctggaagccttttgaaatccctaaagcttcacagaagaaggtggattttgtgagcgggctgcacacactatgtggggctggggatatcaagagtaataacggactggctatacacatctttctatgtaacacatccatggagaataggtgtttctacaattctgatggcgacttcttaatcgtgcctcagaaaggcaacttgcttatttatacggaatttggtaagatgctagtgcaaccaaacgaaatttgcgtcattcagcgtggcatgaggttttctattgacgtttttgaggagacgcggggatatattctggaggtgtacggagttcacttcgaacttcctgatttgggcccaatcggtgccaatggcctcgctaatccacgagacttcttaattcctatcgcctggtatgaagacagacaggttcctgggggttataccgttattaacaaataccagggcaaactgtttgctgccaagcaagacgtttcaccatttaacgttgtcgcttggcacggcaattataccccttacaagtataacctgaagaacttcatggtgataaattccgtggccttcgaccacgccgacccatcaatttttaccgttctgaccgccaaatcagtgaggccaggcgttgcgatagcagattttgttatctttccacctaggtggggggtggccgacaaaaccttccggcctccctattatcaccgaaattgcatgtcagaatttatgggccttatccgcggacattatgaagcaaagcaggggggattcctacccggaggcggaagcctccattccacaatgacgccccacgggcctgacgcggactgctttgaaaaagcttccaaggtgaagctcgcacccgagcgaattgctgatggtacgatggccttcatgttcgaaagctccctgtccctggccgttacaaaatggggactgaaagctagccggtgcctggatgagaattaccataaatgttgggagcctttaaaaagtcactttacccctaacagtcggaatccagctgaacctaactag

SEQ ID NO: 3874 - DNA, 1338 bp, Artificial Sequence
  derived and/or modified sequence
atggccgagctgaagtacatcagcggcttcggcaacgagtgcagcagcgaggaccccagatgccccggcagcctgcccgagggccagaacaacccccaggtgtgcccctacaacctgtacgccgagcagctgagcggcagcgccttcacctgccccagaagcaccaacaagagaagctggctgtacagaatcctgcccagcgtgagccacaagcccttcgagagcatcgacgagggccaggtgacccacaactgggacgaggtggaccccgaccccaaccagctgagatggaagcccttcgagatccccaaggccagccagaagaaggtggacttcgtgagcggcctgcacaccctgtgcggcgccggcgacatcaagagcaacaacggcctggccatccacatcttcctgtgcaacaccagcatggagaacagatgcttctacaacagcgacggcgacttcctgatcgtgccccagaagggcaacctgctgatctacaccgagttcggcaagatgctggtgcagcccaacgagatctgcgtgatccagagaggcatgagattcagcatcgacgtgttcgaggagaccagaggctacatcctggaggtgtacggcgtgcacttcgagctgcccgacctgggccccatcggcgccaacggcctggccaaccccagagacttcctgatccccatcgcctggtacgaggacagacaggtgcccggcggctacaccgtgatcaacaagtaccagggcaagctgttcgccgccaagcaggacgtgagccccttcaacgtggtggcctggcacggcaactacaccccctacaagtacaacctgaagaacttcatggtgatcaacagcgtggccttcgaccacgccgaccccagcatcttcaccgtgctgaccgccaagagcgtgagacccggcgtggccatcgccgacttcgtgatcttcccccccagatggggcgtggccgacaagaccttcagacccccctactaccacagaaactgcatgagcgagttcatgggcctgatcagaggccactacgaggccaagcagggcggcttcctgcccggcggcggcagcctgcacagcaccatgaccccccacggccccgacgccgactgcttcgagaaggccagcaaggtgaagctggcccccgagagaatcgccgacggcaccatggccttcatgttcgagagcagcctgagcctggccgtgaccaagtggggcctgaaggccagcagatgcctggacgagaactaccacaagtgctgggagcccctgaagagccacttcacccccaacagcagaaaccccgccgagcccaactag

SEQ ID NO: 3875 - protein, 917 aa, Artificial Sequence
  derived and/or modified sequence
MIAAQLLAYYFTELKDDQVKKIDKYLYAMRLSDETLIDIMTRFRKEMKNGLSRDFNPTATVKMLPTFVRSIPDGSEKGDFIALDLGGSSFRILRVQVNHEKNQNVHMESEVYDTPENIVHGSGSQLFDHVAECLGDFMEKRKIKDKKLPVGFTFSFPCQQSKIDEAILITWTKRFKASGVEGADVVKLLNKAIKKRGDYDANIVAVVNDTVGTMMTCGYDDQHCEVGLIIGTGTNACYMEELRHIDLVEGDEGRMCINTEWGAFGDDGSLEDIRTEFDREIDRGSLNPGKQLFEKMVSGMYLGELVRLILVKMAKEGLLFEGRITPELLTRGKFNTSDVSAIEKNKEGLHNAKEILTRLGVEPSDDDCVSVQHVCTIVSFRSANLVAATLGAILNRLRDNKGTPRLRTTVGVDGSLYKTHPQYSRRFHKTLRRLVPDSDVRFLLSESGSGKGAAMVTAVAYRLAEQHRQIEETLAHFHLTKDMLLEVKKRMRAEMELGLRKQTHNNAVVKMLPSFVRRTPDGTENGDFLALDLGGTNFRVLLVKIRSGKKRTVEMHNKIYAIPIEIMQGTGEELFDHIVSCISDFLDYMGIKGPRMPLGFTFSFPCQQTSLDAGILITWTKGFKATDCVGHDVVTLLRDAIKRREEFDLDVVAVVNDTVGTMMTCAYEEPTCEVGLIVGTGSNACYMEEMKNVEMVEGDQGQMCINMEWGAFGDNGCLDDIRTHYDRLVDEYSLNAGKQRYEKMISGMYLGEIVRNILIDFTKKGFLFRGQISETLKTRGIFETKFLSQIESDRLALLQVRAILQQLGLNSTCDDSILVKTVCGVVSRRAAQLCGAGMAAVVDKIRENRGLDRLNVTVGVDGTLYKLHPHFSRIMHQTVKELSPKCNVSFLLSEDGSGKGAALITAVGVRLRTEASS

SEQ ID NO: 3876 - protein, 915 aa, Artificial Sequence
  derived and/or modified sequence
MIAAQLLAYYFTELKDDQVKKIDKYLYAMRLSDETLIDIMTRFRKEMKNGLSRDFNPTATVKMLPTFVRSIPDGSEKGDFIALDLGGSSFRILRVQVNHEKNQNVHMESEVYDTPENIVHGSGSQLFDHVAECLGDFMEKRKIKDKKLPVGFTFSFPCQQSKIDEAILITWTKRFKASGVEGADVVKLLNKAIKKRGDYDANIVAVVNDTVGTMMTCGYDDQHCEVGLIIGTGTNACYMEELRHIDLVEGDEGRMCINTEWGAFGDDGSLEDIRTEFDREIDRGSLNPGKQLFEKMVSGMYLGELVRLILVKMAKEGLLFEGRITPELLTRGKFNTSDVSAIEKNKEGLHNAKEILTRLGVEPSDDDCVSVQHVCTIVSFRSANLVAATLGAILNRLRDNKGTPRLRTTVGVDGSLYKTHPQYSRRFHKTLRRLVPDSDVRFLLSESGSGKGAAMVTAVAYRLAEQHRQIEETLAHFHLTKDMLLEVKKRMRAEMELGLRKQTHNNAVVKMLPSFVRRTPDGTENGDFLALDLGGTNFRVLLVKIRSGKKRTVEMHNKIYAIPIEIMQGTGEELFDHIVSCISDFLDYMGIKGPRMPLGFTFSFPCQQTSLDAGILITWTKGFKATDCVGHDVVTLLRDAIKRREEFDLDVVAVVNDTVGTMMTCAYEEPTCEVGLIVGTGSNACYMEEMKNVEMVEGDQGQMCINMEWGAFGDNGCLDDIRTHYDRLVDEYSLNAGKQRYEKMISGMYLGEIVRNILIDFTKKGFLFRGQISETLKTRGIFETKFLSQIESDRLALLQVRAILQQLGLNSTCDDSILVKTVCGVVSRRAAQLCGAGMAAVVDKIRENRGLDRLNVTVGVDGTLYKLHPHFSRIMHQTVKELSPKCNVSFLLSEDGSGKGAALITAVGVRLRTEA

SEQ ID NO: 3877 - DNA, 2754 bp, Artificial Sequence
  derived and/or modified sequence
atgatcgccgcccagcttcttgcttactattttaccgagttgaaagatgaccaagttaagaaaattgacaaatacctctatgctatgcgcctcagtgatgaaactcttatagacatcatgactaggttccgtaaggagatgaaaaatggtctctcccgcgatttcaaccccaccgcaactgtgaagatgctgccaaccttcgtgaggtcaatccccgatggatctgagaagggggactttatcgccctggacctcggaggcagcagtttcagaatactaagagtgcaggtgaatcacgagaagaatcagaatgttcacatggagtctgaagtgtacgatacccctgaaaacatcgtgcatgggtccgggagtcagttgtttgatcacgtcgctgagtgcctgggcgacttcatggaaaaaaggaaaattaaagacaaaaaactgcctgtgggtttcactttcagtttcccgtgtcaacagagcaagatagatgaagccattcttatcacctggacaaaacgattcaaagcttccggtgtagagggcgccgacgtggtaaaattactgaataaagcgatcaagaaacgcggagattacgacgctaacatcgtggcggtcgtcaacgacactgtcggaactatgatgacctgtggttatgatgaccagcactgcgaagtgggtctgatcatagggactggcaccaatgcttgctacatggaggaacttagacacattgacctagtcgagggagatgaagggagaatgtgtataaacacagaatggggggctttcggcgatgatggttcccttgaggatatccgcacagaattcgatcgcgaaatcgatagaggctccctgaacccagggaagcagttgtttgagaaaatggttagtgggatgtacctcggcgagctggtgaggcttattctcgtgaaaatggccaaggaaggactgcttttcgagggtcgaataacacccgaactgttgaccagagggaagtttaatacatcagacgtgtcagcgatcgagaagaataaggaaggtctgcataacgctaaggaaattttgacaagactgggggttgaaccgagcgacgatgattgcgtatccgttcagcatgtgtgtacaattgtctcgttccggtcagcaaaccttgtcgccgcgaccctgggagccattctgaatagattgcgtgacaataagggcaccccaagactgcgaacaacagtcggggtggacggttccctatacaaaacccatcctcagtactctcggcggtttcacaagactctgagacgtctcgtgcctgactcagatgtgcgctttttgttaagtgagtccggctctgggaagggggccgccatggttactgcggtcgcctaccggcttgctgagcagcatagacagatcgaggaaactttggcccattttcacctgacgaaagacatgctcctggaggtgaagaaaaggatgcgtgcagaaatggaactcgggttacgaaagcagacccataacaacgcagtcgtgaagatgcttcccagtttcgtgcgccgtacacctgatgggactgagaacggggactttctggccttggacctggggggcactaatttcagagttcttttagtgaagatccgcagcgggaagaaacggacagttgagatgcataataagatttacgctatcccaatcgagattatgcagggaaccggcgaggagctattcgaccacattgtatcatgtatttcagatttcctggactacatgggaatcaaggggcctagaatgccactgggattcactttcagtttcccttgtcagcagacctcacttgatgcgggaattttaattacctggacgaaagggttcaaagcgacagactgcgtgggccacgacgtggtgaccctcctccgagacgccatcaaacgtcgcgaagaatttgacttggatgtggtcgccgtggtcaatgacacagtgggtacgatgatgacctgtgcttacgaggaacctacctgcgaggtgggactgatagttggtactggatctaacgcctgctacatggaggaaatgaaaaacgtggagatggtagagggcgaccagggccagatgtgcatcaacatggaatggggcgcttttggcgacaacggctgcctggacgatatcagaacccactacgaccgactcgtcgatgaatattcactgaacgctggaaaacaacggtacgagaagatgatttcagggatgtatctaggtgaaatcgtacggaacatattaatcgatttcactaagaagggttttttgtttcggggtcagattagcgaaacattaaaaacaagagggatatttgaaacaaagtttctatcccagatcgaaagcgatagacttgcgctgctgcaggtccgggccatcctgcagcaacttggcctgaactccacctgcgatgacagtatactggtcaaaaccgtgtgcggagtggtcagcaggagagcggcacagctatgcggagcagggatggcggccgtcgtggataagatacgcgaaaatcgaggcctcgacagattgaacgtcacagtcggggtcgatggaaccctgtataagctgcacccccatttttctagaatcatgcaccagacagtgaaagaactctcaccaaaatgcaacgtaagcttcctcctgtccgaagatggctccggcaaaggggcagcactgattaccgccgtgggggtccggcttcgcacagaggcctcctcctag

SEQ ID NO: 3878 - DNA, 2748 bp, Artificial Sequence
  derived and/or modified sequence
atgatagcggctcagcttctggcatactactttaccgagctgaaagatgatcaagtcaagaaaatcgataaatatctgtatgctatgcgcctctccgatgagactctgatcgacatcatgactagattcaggaaagagatgaagaatgggttaagccgggactttaatcccaccgccaccgtcaaaatgctccctacgtttgtccgtagcatccccgacgggagtgaaaagggggactttattgccctcgacctcggaggatccagttttagaatcctcagagtgcaggtgaatcacgagaaaaatcagaacgtacacatggagagtgaagtttacgatacccctgagaatatcgtccacggttccggaagccagctcttcgaccacgtggccgagtgccttggagattttatggagaaacgcaagatcaaagataaaaagttgccagtgggctttaccttcagcttcccgtgtcagcagagtaagatcgacgaagctatactcatcacatggacaaaaaggtttaaggctagtggggtggagggcgccgatgtagtcaagcttctgaacaaggccatcaagaaacggggggattacgacgcgaacattgtggctgtcgttaacgacaccgtggggactatgatgacctgcgggtatgatgatcagcactgcgaagtcgggctcataatcggcactggaaccaacgcatgctacatggaggagctgcgccatatcgacttagtggagggagatgagggcaggatgtgtataaataccgagtggggggcatttggggacgatggcagtctggaagatattcgcaccgaatttgatcgggaaatagaccgtgggagcctgaaccctggaaagcaactctttgaaaagatggtctcgggcatgtatttgggggaactcgttaggctcatcctcgtcaagatggccaaagaggggttactgtttgaaggacgtatcacacctgaactcctcacgcgcgggaagttcaacacatccgacgtgagtgccatcgagaaaaacaaagaagggctgcacaatgctaaggagattctgacccggctcggagtggaaccatccgacgacgattgtgtgtccgtgcagcacgtgtgcacaatcgtatctttccggtcagctaatttggtggccgccacactgggagctatacttaatcgacttcgagataataaggggacccccaggctccgaactactgtcggcgtagatggttctctgtacaagacgcacccacagtactctcgaagattccacaaaacattaagaagactggtgcccgattcagatgttcgattcctactttctgagagtgggtccgggaaaggggccgctatggtgactgccgttgcatacaggctggctgagcaacacaggcaaattgaggaaactctggcccattttcatctgaccaaagatatgctgctggaagttaagaaaaggatgcgggccgagatggagctcggccttagaaagcaaacgcataacaacgcagtagtgaagatgctccccagcttcgtgcggcgaacaccagacggcaccgagaatggggacttcctcgccctggatctcggcggcactaatttcagggttctgctggttaagatccggtccgggaagaaaagaaccgttgagatgcacaacaaaatttacgccatcccaatcgagataatgcagggtactggagaagaactcttcgatcacatagtctcctgtatcagtgactttttggactacatgggcatcaaggggccgcggatgcccttgggatttacattttcttttccttgccagcaaacaagcctggatgctggcatattgattacttggaccaaaggatttaaagccactgattgcgttggacacgacgtcgtaaccctcttgcgagacgccattaagaggcgcgaagaatttgacttggacgttgtggccgtcgtgaacgatacagtgggcactatgatgacctgcgcctacgaagaaccgacctgtgaagttgggttaatcgttggcacaggaagcaacgcctgttatatggaggagatgaagaatgttgaaatggtcgagggcgaccagggccagatgtgcatcaatatggaatggggcgccttcggcgataatggctgtcttgacgacatccggactcattatgatcgcctcgtggacgagtattccctgaatgcaggtaaacaacgttacgagaaaatgatctccgggatgtacctcggggagatcgtcaggaacattctaatcgatttcacaaagaaaggattcctatttcgtgggcagatcagcgaaacactgaagaccaggggcatctttgagacaaaatttctatcgcagatcgaaagtgaccgcctggccctgctccaggtgcgtgcaatactgcagcagttgggcctgaactcaacgtgcgacgattctatcctggtgaagacagtatgcggggttgtctctcgtagggcagctcagctgtgtggagctggcatggccgcagttgtcgacaagatccgcgagaatagggggctggaccggctcaacgtcaccgtgggcgttgatggaactctgtacaaattgcacccacatttcagccgcattatgcaccagaccgtcaaagagctgtcacccaaatgcaatgtttcttttctgttgtctgaagacggctccggaaaaggtgctgcactgatcactgccgtgggcgtaagactgcggacagaggcttag

SEQ ID NO: 3879 - DNA, 3605 bp, Artificial Sequence
  derived and/or modified sequence
gaggaggaggagccgccgagcagccgccggaggaccacggctcgccagggctgcggaggaccgaccgtccccacgcctgccgccccgcgaccccgaccgccagcatgatcgccgcgcagctcctggcctattacttcacggagctgaaggatgaccaggtcaaaaagattgacaagtatctctatgccatgcggctctccgatgaaactctcatagatatcatgactcgcttcaggaaggagatgaagaatggcctctcccgggattttaatccaacagccacagtcaagatgttgccaacattcgtaaggtccattcctgatggctctgaaaagggagatttcattgccctggatcttggtgggtcttcctttcgaattctgcgggtgcaagtgaatcatgagaaaaaccagaatgttcacatggagtccgaggtttatgacaccccagagaacatcgtgcacggcagtggaagccagctttttgatcatgttgctgagtgcctgggagatttcatggagaaaaggaagatcaaggacaagaagttacctgtgggattcacgttttcttttccttgccaacaatccaaaatagatgaggccatcctgatcacctggacaaagcgatttaaagcgagcggagtggaaggagcagatgtggtcaaactgcttaacaaagccatcaaaaagcgaggggactatgatgccaacatcgtagctgtggtgaatgacacagtgggcaccatgatgacctgtggctatgacgaccagcactgtgaagtcggcctgatcatcggcactggcaccaatgcttgctacatggaggaactgaggcacattgatctggtggaaggagacgaggggaggatgtgtatcaatacagaatggggagcctttggagacgatggatcattagaagacatccggacagagtttgacagggagatagaccggggatccctcaaccctggaaaacagctgtttgagaagatggtcagtggcatgtacttgggagagctggttcgactgatcctagtcaagatggccaaggagggcctcttatttgaagggcggatcaccccggagctgctcacccgagggaagtttaacaccagtgatgtgtcagccatcgaaaagaataaggaaggcctccacaatgccaaagaaatcctgacccgcctgggagtggagccgtccgatgatgactgtgtctcagtccagcacgtttgcaccattgtctcatttcgctcagccaacttggtggctgccacactgggcgccatcttgaaccgcctgcgtgataacaagggcacacccaggctgcggaccacggttggtgtcgacggatctctttacaagacgcacccacagtattcccggcgtttccacaagactctaaggcgcttggtgccagactccgatgtgcgcttcctcctctcggagagtggcagcggcaagggggctgccatggtgacggcggtggcctaccgcttggccgagcagcaccggcagatagaggagaccctggctcatttccacctcaccaaggacatgctgctggaggtgaagaagaggatgcgggccgagatggagctggggctgaggaagcagacgcacaacaatgccgtggttaagatgctgccctccttcgtccggagaactcccgacgggaccgagaatggtgacttcttggccctggatcttggaggaaccaatttccgtgtgctgctggtgaaaatccgtagtgggaaaaagagaacggtggaaatgcacaacaagatctacgccattcctattgaaatcatgcagggcactggggaagagctgtttgatcacattgtctcctgcatctctgacttcttggactacatggggatcaaaggccccaggatgcctctgggcttcacgttctcatttccctgccagcagacgagtctggacgcgggaatcttgatcacgtggacaaagggttttaaggcaacagactgcgtgggccacgatgtagtcaccttactaagggatgcgataaaaaggagagaggaatttgacctggacgtggtggctgtggtcaacgacacagtgggcaccatgatgacctgtgcttatgaggagcccacctgtgaggttggactcattgttgggaccggcagcaatgcctgctacatggaggagatgaagaacgtggagatggtggagggggaccaggggcagatgtgcatcaacatggagtggggggcctttggggacaacgggtgtctggatgatatcaggacacactacgacagactggtggacgaatattccctaaatgctgggaaacaaaggtatgagaagatgatcagtggtatgtacctgggtgaaatcgtccgcaacatcttaatcgacttcaccaagaagggattcctcttccgagggcagatctctgagacgctgaagacccggggcatctttgagaccaagtttctctctcagatcgagagtgaccgattagcactgctccaggtccgggctatcctccagcagctaggtctgaatagcacctgcgatgacagtatcctcgtcaagacagtgtgcggggtggtgtccaggagggccgcacagctgtgtggcgcaggcatggctgcggttgtggataagatccgcgagaacagaggactggaccgtctgaatgtgactgtgggagtggacgggacactctacaagcttcatccacacttctccagaatcatgcaccagacggtgaaggaactgtcaccaaaatgtaacgtgtccttcctcctgtctgaggatggcagcggcaagggggccgccctcatcacggccgtgggcgtgcggttacgcacagaggcaagcagctaagagtccgggatccccagcctactgcctctccagcacttctctcttcaagcggcgaccccctaccctcccagcgagttgcgctgggagacgctggcgccagggcctgccggcgcggggaggaaagcaaaatccaactaatggtatatattgtagggtacagaatagagcgtgtgctgttgataatatctctcacccggatccctcctcacttgccctgccactttgcatggtttgattttgacctggtcccccacgtgtgaagtgtagtggcatccatttctaatgtatgcattcatccaacagagttatttattggctggagatggaaaatcacaccacctgacaggccttctgggcctccaaagcccatccttggggttccccctccctgtgtgaaatgtattatcaccagcagacactgccgggcctccctcccgggggcactgcctgaaggcgagtgtgggcatagcattagctgcttcctcccctcctggcacccactgtggcctggcatcgcatcgtggtgtgtcaatgccacaaaatcgtgtgtccgtggaaccagtcctagccgcgtgtgacagtcttgcattctgtttgtctcgtggggggaggtggacagtcctgcggaaatgtgtcttgtctccatttggataaaaggaaccaaccaacaaacaatgccatcactggaatttcccaccgctttgtgagccgtgtcgtatgacctagtaaactttgtaccaattcaaa

SEQ ID NO: 3880 - DNA, 2980 bp, Artificial Sequence
  derived and/or modified sequence
gaggagccgccgagcagccgccggaggaccacggctcgccagggctgcggaggaccgaccgtccccacgcctgccgccccgcgaccccgaccgccagcatgatcgccgcgcagctcctggcctattacttcacggagctgaaggatgaccaggtcaaaaagattgacaagtatctctatgccatgcggctctccgatgaaactctcatagatatcatgactcgcttcaggaaggagatgaagaatggcctctcccgggattttaatccaacagccacagtcaagatgttgccaacattcgtaaggtccattcctgatggctctgaaaagggagatttcattgccctggatcttggtgggtcttcctttcgaattctgcgggtgcaagtgaatcatgagaaaaaccagaatgttcacatggagtccgaggtttatgacaccccagagaacatcgtgcacggcagtggaagccagctttttgatcatgttgctgagtgcctgggagatttcatggagaaaaggaagatcaaggacaagaagttacctgtgggattcacgttttcttttccttgccaacaatccaaaatagatgaggccatcctgatcacctggacaaagcgatttaaagcgagcggagtggaaggagcagatgtggtcaaactgcttaacaaagccatcaaaaagcgaggggactatgatgccaacatcgtagctgtggtgaatgacacagtgggcaccatgatgacctgtggctatgacgaccagcactgtgaagtcggcctgatcatcggcactggcaccaatgcttgctacatggaggaactgaggcacattgatctggtggaaggagacgaggggaggatgtgtatcaatacagaatggggagcctttggagacgatggatcattagaagacatccggacagagtttgacagggagatagaccggggatccctcaaccctggaaaacagctgtttgagaagatggtcagtggcatgtacttgggagagctggttcgactgatcctagtcaagatggccaaggagggcctcttatttgaagggcggatcaccccggagctgctcacccgagggaagtttaacaccagtgatgtgtcagccatcgaaaagaataaggaaggcctccacaatgccaaagaaatcctgacccgcctgggagtggagccgtccgatgatgactgtgtctcagtccagcacgtttgcaccattgtctcatttcgctcagccaacttggtggctgccacactgggcgccatcttgaaccgcctgcgtgataacaagggcacacccaggctgcggaccacggttggtgtcgacggatctctttacaagacgcacccacagtattcccggcgtttccacaagactctaaggcgcttggtgccagactccgatgtgcgcttcctcctctcggagagtggcagcggcaagggggctgccatggtgacggcggtggcctaccgcttggccgagcagcaccggcagatagaggagaccctggctcatttccacctcaccaaggacatgctgctggaggtgaagaagaggatgcgggccgagatggagctggggctgaggaagcagacgcacaacaatgccgtggttaagatgctgccctccttcgtccggagaactcccgacgggaccgagaatggtgacttcttggccctggatcttggaggaaccaatttccgtgtgctgctggtgaaaatccgtagtgggaaaaagagaacggtggaaatgcacaacaagatctacgccattcctattgaaatcatgcagggcactggggaagagctgtttgatcacattgtctcctgcatctctgacttcttggactacatggggatcaaaggccccaggatgcctctgggcttcacgttctcatttccctgccagcagacgagtctggacgcgggaatcttgatcacgtggacaaagggttttaaggcaacagactgcgtgggccacgatgtagtcaccttactaagggatgcgataaaaaggagagaggaatttgacctggacgtggtggctgtggtcaacgacacagtgggcaccatgatgacctgtgcttatgaggagcccacctgtgaggttggactcattgttgggaccggcagcaatgcctgctacatggaggagatgaagaacgtggagatggtggagggggaccaggggcagatgtgcatcaacatggagtggggggcctttggggacaacgggtgtctggatgatatcaggacacactacgacagactggtggacgaatattccctaaatgctgggaaacaaaggtatgagaagatgatcagtggtatgtacctgggtgaaatcgtccgcaacatcttaatcgacttcaccaagaagggattcctcttccgagggcagatctctgagacgctgaagacccggggcatctttgagaccaagtttctctctcagatcgagagtgaccgattagcactgctccaggtccgggctatcctccagcagctaggtctgaatagcacctgcgatgacagtatcctcgtcaagacagtgtgcggggtggtgtccaggagggccgcacagctgtgtggcgcaggcatggctgcggttgtggataagatccgcgagaacagaggactggaccgtctgaatgtgactgtgggagtggacgggacactctacaagcttcatccacacttctccagaatcatgcaccagacggtgaaggaactgtcaccaaaatgtaacgtgtccttcctcctgtctgaggatggcagcggcaagggggccgccctcatcacggccgtgggcgtgcggttacgcacagaggcatagcattagctgcttcctcccctcctggcacccactgtggcctggcatcgcatcgtggtgtgtcaatgccacaaaatcgtgtgtccgtggaaccagtcctagccgcgtgtgacagtcttgcattctgtttgtctcgt

SEQ ID NO: 3881 - DNA, 2754 bp, Artificial Sequence
  derived and/or modified sequence
atgattgctgcccagctgctggcctactacttcacagagctgaaggatgaccaggtgaagaagattgacaagtacctgtatgccatgaggctgagtgatgagaccctgattgacatcatgacccgcttcaggaaggagatgaagaatggcctgagccgggacttcaaccccacagccaccgtgaagatgctgcccacctttgtgcgcagcatcccagatggcagcgagaagggggacttcatcgccctggacctgggcggcagcagcttccgcatcctgcgggtgcaggtgaaccacgagaagaaccagaatgtgcacatggagagcgaggtgtatgacaccccagagaacatcgtgcacggcagcggcagccagctgtttgaccacgtggccgagtgcctgggggacttcatggagaagaggaagatcaaggacaagaagctgcctgtgggcttcaccttctccttcccctgccagcagagcaagattgatgaggccatcctgatcacctggaccaagcgcttcaaggccagcggcgtggagggcgcagatgtggtgaagctgctgaacaaggccatcaagaagagaggagactatgatgccaacatcgtggccgtggtgaatgacacagtgggcaccatgatgacctgtggctatgatgaccagcactgtgaggtgggcctcatcatcggcaccggcaccaatgcctgctacatggaggagctgcggcacatcgacctggtggagggagatgagggccgcatgtgcatcaacacagagtggggcgcctttggagatgatggcagcctggaggacatcagaacagaatttgaccgggagattgaccggggcagcctgaaccctgggaagcagctgtttgagaagatggtgtctggcatgtacctgggggagctggtgcggctcatcctggtgaagatggccaaggagggcctgctgtttgagggccgcatcaccccagagctgctgacccggggcaagttcaacaccagtgatgtgtctgccatcgagaagaacaaggagggcctgcacaatgccaaggagatcctgacccggctgggcgtggagcccagtgatgatgactgtgtgtctgtgcagcacgtgtgcaccatcgtgtccttccgcagcgccaacctggtggccgccaccctgggcgccatcctgaaccggctgcgggacaacaagggcaccccccggctgcggaccaccgtgggcgtggatggcagcctgtacaagacccacccccagtacagccgccgcttccacaagaccctgcggcggctggtgcctgacagtgatgtgcgcttcctgctgtctgagagcggcagcgggaaaggagctgccatggtgacagctgtggcctaccgcctggccgagcagcaccggcagatcgaggagaccctggcccacttccacctgaccaaggacatgctgctggaggtgaagaagaggatgagagctgagatggagctgggcctgaggaagcagacccacaacaatgctgtggtgaagatgctgcccagctttgtgcggaggaccccagatggaacagaaaatggagacttcctggccctggacctgggcggcaccaacttccgggtgctgctggtgaagatccgcagcggcaagaagaggacagtggagatgcacaacaagatctatgccatccccatcgagatcatgcagggcaccggggaggagctgtttgaccacatcgtgtcctgcatcagtgacttcctggactacatgggcatcaagggccccaggatgcccctgggcttcaccttctccttcccctgccagcagaccagcctggatgctggcatcctgatcacctggaccaagggcttcaaggccacagactgtgtgggccatgatgtggtgaccctgctgagagatgccatcaagagaagagaggagtttgacctggatgtggtggccgtggtgaatgacacagtgggcaccatgatgacctgtgcctatgaggagcccacctgtgaggtgggcctgattgtgggcaccggcagcaatgcctgctacatggaggagatgaagaatgtggagatggtggagggggaccagggccagatgtgcatcaacatggagtggggcgccttcggggacaatggctgcctggatgacatccgcacccactatgaccggctggtggatgagtacagcctgaatgctgggaagcagagatatgagaagatgatcagcggcatgtacctgggggagatcgtgaggaacatcctgattgacttcaccaagaagggcttcctgttccggggccagatcagcgagaccctgaagacccggggcatctttgagaccaagttcctgagccagatcgagagtgaccggctggccctgctgcaggtgcgggccatcctgcagcagctgggcctgaacagcacctgtgatgacagcatcctggtgaagacagtgtgtggggtggtgtcccggcgggccgcccagctgtgtggggccggcatggctgctgtggtggacaagatcagagaaaatagaggcctggaccggctgaatgtgacagtgggcgtggatggcaccctgtacaagctgcacccccacttcagccgcatcatgcaccagacagtgaaggagctgagccccaagtgcaatgtgtccttcctgctgtctgaagatggcagcgggaaaggagctgccctgatcacagctgtgggcgtgcggctgaggacagaggccagcagctag

SEQ ID NO: 3882 - DNA, 2748 bp, Artificial Sequence
  derived and/or modified sequence
atgattgctgcccagctgctggcctactacttcacagagctgaaggatgaccaggtgaagaagattgacaagtacctgtatgccatgaggctgagtgatgagaccctgattgacatcatgacccgcttcaggaaggagatgaagaatggcctgagccgggacttcaaccccacagccaccgtgaagatgctgcccacctttgtgcgcagcatcccagatggcagcgagaagggggacttcatcgccctggacctgggcggcagcagcttccgcatcctgcgggtgcaggtgaaccacgagaagaaccagaatgtgcacatggagagcgaggtgtatgacaccccagagaacatcgtgcacggcagcggcagccagctgtttgaccacgtggccgagtgcctgggggacttcatggagaagaggaagatcaaggacaagaagctgcctgtgggcttcaccttctccttcccctgccagcagagcaagattgatgaggccatcctgatcacctggaccaagcgcttcaaggccagcggcgtggagggcgcagatgtggtgaagctgctgaacaaggccatcaagaagagaggagactatgatgccaacatcgtggccgtggtgaatgacacagtgggcaccatgatgacctgtggctatgatgaccagcactgtgaggtgggcctcatcatcggcaccggcaccaatgcctgctacatggaggagctgcggcacatcgacctggtggagggagatgagggccgcatgtgcatcaacacagagtggggcgcctttggagatgatggcagcctggaggacatcagaacagaatttgaccgggagattgaccggggcagcctgaaccctgggaagcagctgtttgagaagatggtgtctggcatgtacctgggggagctggtgcggctcatcctggtgaagatggccaaggagggcctgctgtttgagggccgcatcaccccagagctgctgacccggggcaagttcaacaccagtgatgtgtctgccatcgagaagaacaaggagggcctgcacaatgccaaggagatcctgacccggctgggcgtggagcccagtgatgatgactgtgtgtctgtgcagcacgtgtgcaccatcgtgtccttccgcagcgccaacctggtggccgccaccctgggcgccatcctgaaccggctgcgggacaacaagggcaccccccggctgcggaccaccgtgggcgtggatggcagcctgtacaagacccacccccagtacagccgccgcttccacaagaccctgcggcggctggtgcctgacagtgatgtgcgcttcctgctgtctgagagcggcagcgggaaaggagctgccatggtgacagctgtggcctaccgcctggccgagcagcaccggcagatcgaggagaccctggcccacttccacctgaccaaggacatgctgctggaggtgaagaagaggatgagagctgagatggagctgggcctgaggaagcagacccacaacaatgctgtggtgaagatgctgcccagctttgtgcggaggaccccagatggaacagaaaatggagacttcctggccctggacctgggcggcaccaacttccgggtgctgctggtgaagatccgcagcggcaagaagaggacagtggagatgcacaacaagatctatgccatccccatcgagatcatgcagggcaccggggaggagctgtttgaccacatcgtgtcctgcatcagtgacttcctggactacatgggcatcaagggccccaggatgcccctgggcttcaccttctccttcccctgccagcagaccagcctggatgctggcatcctgatcacctggaccaagggcttcaaggccacagactgtgtgggccatgatgtggtgaccctgctgagagatgccatcaagagaagagaggagtttgacctggatgtggtggccgtggtgaatgacacagtgggcaccatgatgacctgtgcctatgaggagcccacctgtgaggtgggcctgattgtgggcaccggcagcaatgcctgctacatggaggagatgaagaatgtggagatggtggagggggaccagggccagatgtgcatcaacatggagtggggcgccttcggggacaatggctgcctggatgacatccgcacccactatgaccggctggtggatgagtacagcctgaatgctgggaagcagagatatgagaagatgatcagcggcatgtacctgggggagatcgtgaggaacatcctgattgacttcaccaagaagggcttcctgttccggggccagatcagcgagaccctgaagacccggggcatctttgagaccaagttcctgagccagatcgagagtgaccggctggccctgctgcaggtgcgggccatcctgcagcagctgggcctgaacagcacctgtgatgacagcatcctggtgaagacagtgtgtggggtggtgtcccggcgggccgcccagctgtgtggggccggcatggctgctgtggtggacaagatcagagaaaatagaggcctggaccggctgaatgtgacagtgggcgtggatggcaccctgtacaagctgcacccccacttcagccgcatcatgcaccagacagtgaaggagctgagccccaagtgcaatgtgtccttcctgctgtctgaagatggcagcgggaaaggagctgccctgatcacagctgtgggcgtgcggctgaggacagaggcctag

SEQ ID NO: 3883 - DNA, 2754 bp, Artificial Sequence
  derived and/or modified sequence
atgatcgccgcccagctgctggcctactacttcaccgagctgaaggacgatcaggttaagaagattgacaagtatctgtatgctatgcggctctctgacgaaactctcatagacattatgactagatttaggaaggagatgaaaaacggcctgtcacgtgattttaatcccacagcaaccgtcaagatgctgcctacattcgtgcggtccattcctgacggttccgagaagggagactttatagcactggaccttgggggctccagcttcaggattcttagagtgcaggtcaatcacgagaaaaatcagaacgtgcatatggagtccgaggtgtacgatacgccggagaacattgtgcatggaagcgggagccagttgtttgaccatgtagcagaatgcctcggggactttatggaaaagaggaagattaaggacaagaagctgcccgttgggttcaccttttcctttccgtgccagcaatccaagatcgatgaggctatattaatcacgtggactaagaggttcaaagcgagtggagtcgaaggcgctgatgtggttaaactgctgaacaaagcaattaagaagagaggcgactacgatgccaatatagtggctgttgtaaacgacacagttggaacaatgatgacctgcggctatgacgaccaacactgcgaagtgggcctcataatcgggacaggcaccaatgcgtgttacatggaagagttgcgacacatcgatctggttgagggagatgagggccggatgtgtataaacacagaatggggggcttttggggatgacggcagccttgaagacataagaaccgaatttgatagagagattgaccgggggagtctgaatcctgggaaacaactctttgagaagatggttagtggtatgtatttaggcgaactcgtgaggttgatcttggtcaaaatggccaaagaaggcttactcttcgagggacgtatcacccctgaactcctaacgcggggcaagtttaatacttcagacgttagcgctatcgagaaaaataaggagggactgcataacgctaaggaaatcttgactcgactgggagtggagcccagcgacgatgattgtgtgagcgtgcagcatgtctgcacaatcgtcagcttccgctcggcgaacttggtcgctgctacactcggtgccattttaaacaggttgagagacaataaaggcacccctcggttaagaaccaccgtgggtgtagacggcagtctatacaagacacacccccagtattcccggaggttccataaaacactcagacgcttggtcccagatagcgatgtgagattcctcttgagcgagagcgggagtggtaaaggggctgcaatggtgaccgcagtggcttaccgcctggctgagcagcacagacagatagaagaaaccctcgcccacttccaccttacgaaagacatgctgcttgaggtaaaaaagcggatgagagctgaaatggaacttggcctgcgcaaacagacacataataacgccgtagtaaaaatgttgccctcttttgtgaggaggactcccgacggtacggaaaacggtgatttcttggccctcgacttaggaggcacgaacttccgagtcctgctggtgaaaatccggtctgggaagaaaagaactgtagaaatgcacaacaagatttacgctataccgatagaaatcatgcagggcacaggagaagaattattcgatcacatcgtgagttgcatctccgacttcctggactacatgggcataaagggaccccgcatgcccctgggattcacattcagctttccgtgccagcagactagcctcgacgctgggatcttaattacgtggacaaagggattcaaagccacagactgtgtgggacatgacgtcgtaacattactacgcgacgcaattaaacgccgggaggagtttgaccttgatgtcgtggcagtggtcaacgatactgtcggcactatgatgacttgtgcgtacgaagaacctacgtgcgaagtggggctgatagttggtacaggctccaatgcatgttacatggaagaaatgaaaaacgtggaaatggtagagggagaccaaggacaaatgtgtatcaacatggagtggggggcctttggagataacggctgcctcgatgatatccgtacacattacgataggctcgttgacgagtacagcctgaatgccggtaaacagcgatatgaaaaaatgatcagcgggatgtatctgggagaaattgttagaaacatcctgatcgactttactaagaagggattcctgtttcggggccagattagcgaaactctgaagacccggggaatttttgaaaccaagtttttatctcagatagagagcgataggctcgcgctgctgcaggtgcgtgcaattttacagcagctgggcctgaactcaacctgcgacgattcgattctcgtgaagactgtttgtggcgtggtgtccaggagggctgctcagttatgtggcgcaggtatggctgctgtggtggacaaaatccgggaaaacagagggctggataggttaaacgtgaccgtgggcgttgacggaactctgtacaaactgcacccacatttttctcgtatcatgcaccaaactgtgaaagaacttagtccaaagtgtaacgtcagttttctgttgagcgaggacggttccggcaagggtgcggctcttatcactgctgtgggtgtgcgcttacggactgaggctagctcctag

SEQ ID NO: 3884 - DNA, 2748 bp, Artificial Sequence
  derived and/or modified sequence
atgatcgccgcccagctgctggcctactacttcaccgagctgaaggacgaccaagtgaaaaagatcgacaagtacttgtacgcaatgcgattgtcagacgaaacccttatagatataatgacgcgtttcaggaaagagatgaaaaacggactgtctcgcgactttaacccaacagctactgtaaaaatgcttcctacattcgtccggtcaatccccgatggctcagaaaagggggatttcatcgccctggatctgggcggatcgtcatttcgtattctgcgcgtgcaggtgaatcatgaaaagaatcagaatgtgcacatggaaagcgaggtttatgatactcccgagaacattgtgcacggtagtggaagccagttattcgatcacgtggccgagtgcttaggcgactttatggaaaagcggaagatcaaagacaagaagctgcctgttggattcaccttcagtttcccttgtcagcagtcaaaaatcgacgaggctatcctgatcacttggactaaaaggttcaaggcctctggggtcgagggcgccgatgtggtcaaactgctcaacaaggctataaaaaaacggggcgactatgatgccaacatagtcgctgtcgtgaatgacaccgttgggaccatgatgacttgcggttatgacgaccagcactgcgaggtgggtttaattattggcaccggcacgaatgcatgttacatggaagaactacgccacatcgaccttgttgaaggggatgagggcaggatgtgtattaatacagagtggggtgcctttggggacgatggaagtcttgaggatattcggacagagttcgatagagaaattgatagggggtcacttaaccccggaaagcagctgtttgagaagatggtatctggaatgtacctaggggagcttgtgagactgattctcgtgaagatggctaaggaaggtctgttattcgagggtcgcataacccctgaactactgacgcgcggtaagttcaatacatctgatgtgtcagcaatcgagaagaataaggaggggctgcataatgctaaagagatcttgaccaggcttggagtagagcccagcgacgacgattgcgtgagcgtccaacacgtgtgcaccattgtttccttccgatcggccaatctggtggcggcaacgctgggcgcaatccttaatcgcttgcgtgataataagggaaccccaagactcaggactaccgtaggcgtggatgggagcctgtataaaacacaccctcagtacagtcgccgttttcacaaaacactgaggagactagtcccggactccgatgtaaggtttctcctgtccgagagtggatctggtaaaggtgctgcaatggttaccgccgttgcttatagattggccgagcaacaccgccagatcgaggaaaccctcgcgcacttccacctgaccaaggacatgctcctggaggtcaagaaaagaatgagggcagaaatggagcttggcctccggaaacagacacataacaatgccgttgtcaaaatgcttccttccttcgtgcggcgtaccccagacggcacagaaaacggagacttcttagcactggatctgggtggcacaaactttcgtgtgttgctggtgaagattagatctggcaaaaagcgtactgtggaaatgcacaacaagatctacgccataccaattgaaatcatgcaagggacaggcgaagaactgttcgatcatattgttagttgcatcagcgatttcctggactatatggggatcaaagggcccagaatgcctcttggcttcacctttagcttcccgtgccagcaaacatcacttgacgcaggcatactcattacctggacaaagggcttcaaggctaccgattgcgtcggacatgatgtcgtgacactgttacgtgatgccataaagaggagggaggaattcgatttggatgtcgtcgcagtcgtcaatgacaccgtaggcaccatgatgacctgcgcctacgaggagcccacgtgcgaagtcggccttatcgtgggaaccggctctaacgcctgttacatggaggagatgaaaaatgtggaaatggtagagggtgaccaaggacagatgtgcatcaatatggaatggggcgctttcggtgacaatgggtgtctggatgacattcgcactcattatgaccgcctagtggacgagtacagtctcaacgctgggaaacagcgatatgaaaagatgatttccggaatgtatctcggtgagatcgtacgcaacatactcatcgactttactaagaaggggtttctctttagaggacagatttccgagactttgaaaactaggggcatttttgagaccaaatttctgtcacagattgagtcggaccggcttgcccttctgcaggtgagggccatcttacagcagctgggtcttaacagtacctgtgacgatagtattctagtgaaaaccgtgtgcggggtggtgtctagacgagcagcacagctgtgtggagcaggaatggcagccgttgtcgataagatcagggagaaccgcggcctggaccgattaaacgtgacagtgggagtcgacggcacactgtacaagctccatccgcacttctcccgcataatgcaccagaccgttaaggaattatctcccaaatgtaatgttagttttcttctcagcgaagacggctccggcaagggagccgcattgatcacagctgtcggggttagattaagaactgaggcttag

SEQ ID NO: 3885 - DNA, 2754 bp, Artificial Sequence
  derived and/or modified sequence
atgattgccgctcaactgcttgcttactacttcacagagctgaaggatgatcaggtcaaaaagatcgataaatacctctacgccatgcgactgagtgacgagacgttaattgatattatgactcgcttcaggaaggagatgaaaaatggactcagcagagacttcaatccgacagctaccgtgaagatgctacccactttcgtgcggtccatcccagacggctcagagaagggtgacttcatcgctctggacttaggcggtagcagtttccgaatactccgcgtacaggtaaaccacgagaagaatcagaatgtgcacatggagtccgaagtgtacgatactcccgaaaacatagtgcatggttctgggagtcagctctttgatcatgtggcagaatgcctgggtgacttcatggaaaaacgtaagatcaaggacaaaaaacttccagtcggctttaccttctccttcccctgccagcagtccaagatcgatgaggctatcctaatcacatggactaagcgcttcaaagcctccggagtcgagggagcggatgtagtgaagctcctcaataaagctatcaaaaaaaggggagattatgatgctaacattgtggccgtggttaatgacaccgttggcaccatgatgacctgcggctatgacgatcagcattgtgaggtgggtctcatcattgggacaggtactaatgcatgctacatggaagagttacggcatattgaccttgttgagggagacgaaggtcgtatgtgcataaacactgagtggggagcctttggagatgatggatccctggaggatatacgcacagaatttgatagagagattgacagggggtctttaaatcccggaaagcagctgttcgaaaagatggtttccggcatgtatctaggcgaactggtgcgcttaattctggttaagatggcaaaagagggcttgttattcgaaggacgcattacccccgagttattgacgcgcggtaagtttaatacctccgacgtgtcggccatcgagaaaaataaggagggcctgcacaatgccaaagagattctcacacggctgggcgttgaacccagcgacgacgactgtgtcagcgtgcagcacgtttgtactatcgtgtcgttcaggtccgcaaatctggtcgctgctaccctgggagcaatcctcaacagactcagggataacaaaggaacacccaggcttcgcaccaccgttggagtcgacggcagtttgtacaagacacacccacagtatagtaggagatttcacaagacgctacgtcgactggtgcctgattccgacgtgcgcttcttgttaagcgaatctgggtccggcaagggggctgccatggtcacagccgttgcctacagactagcggaacagcatcggcagattgaagaaactctcgctcattttcatctcacgaaagatatgctgcttgaagtgaagaagagaatgcgcgcagagatggaactcggtctgcgtaagcagacacacaacaacgccgtcgtgaaaatgctccccagctttgttcgtcggacacctgacggcacagaaaatggagactttctcgctttagacctcgggggtaccaactttagagtgttattggtgaagattcgaagcggcaaaaaacggaccgtggagatgcacaataagatctatgcgatcccgatcgagattatgcaaggaactggggaggagctgttcgaccacatcgtatcttgcatatcagacttcctggactatatgggcatcaaggggccacgcatgccgctcggctttacattctcctttccttgccagcagacctcgctcgatgccggaatactcatcacctggacaaaaggattcaaagctaccgattgtgtcggccacgacgtggtgacactgctgcgagatgcgattaagaggcgagaagaattcgacctggatgtcgtggcagtggtcaacgacacagtaggcactatgatgacatgcgcctacgaagaaccaacttgtgaagtcggattaatagttgggactgggagcaacgcgtgctatatggaggagatgaagaacgttgagatggtggagggcgatcagggccagatgtgtatcaatatggagtggggcgcatttggggacaacggctgcctggatgatattaggacacactacgatagacttgtggacgaatatagcctgaacgcgggaaagcagcgctatgaaaaaatgatttcagggatgtatttaggagaaatcgttaggaacattctgattgacttcacaaagaaggggttcctgttcagagggcagatctccgaaactctgaagacaagggggatcttcgaaaccaagtttttatcccagatcgagtctgaccgactggctctgctacaagtgcgagccattctgcagcagctaggtctgaacagcacctgtgatgactctatcctcgtgaaaacggtctgcggcgtcgtgtctaggagggcggctcaactgtgcggagcgggaatggctgcagtcgtcgataagattcgcgagaacaggggcctcgaccggctcaacgtgaccgtgggcgttgatggcacattgtacaagctccatcctcatttttcgcgcatcatgcatcaaaccgtcaaagaacttagtccgaaatgcaatgtgtccttcttgctctctgaggacggctcaggtaaaggggctgctcttataacagccgtcggagtccgccttaggactgaagcttcatcctag

SEQ ID NO: 3886 - DNA, 2748 bp, Artificial Sequence
  derived and/or modified sequence
atgatcgcggctcagctcttggcatactatttcaccgaactgaaggatgatcaggtcaagaaaattgataagtacctgtacgccatgcgcctctcagacgagacgctgatcgatattatgacccgctttcggaaagagatgaaaaacggactttcccgcgacttcaatccaacagccacagttaagatgctgcctacttttgtacgcagcatccccgatggctccgagaaaggagacttcattgctttggatctgggtggaagtagttttcgcatactgcgtgtccaagtgaaccacgaaaagaaccaaaacgtccacatggaaagcgaagtgtacgacacaccagagaacatagtgcacggtagtgggagtcagctcttcgatcacgttgccgagtgtttgggcgacttcatggagaagcggaaaatcaaagacaagaagctgcccgtcgggttcaccttttcattcccatgccagcagtccaaaatcgacgaagctattttgattacgtggaccaagagatttaaagcatccggagtggagggcgctgatgtggtgaaactcctgaataaagcaataaagaagagaggagattatgacgctaacatcgtcgcagtagtgaatgatactgttggtaccatgatgacctgcggctacgatgatcagcattgtgaggtcggactgatcattggaacaggcacaaatgcttgttatatggaggagctccggcacattgatctggtggagggggatgagggtaggatgtgcatcaatacagaatggggcgcatttggtgatgacggatcacttgaggatattagaactgagtttgacagggagatcgaccgaggatctctgaaccctggcaaacagctgtttgagaagatggtcagcggaatgtatttaggcgaactcgtgcgcctgatcctggttaagatggccaaggaaggcctcctgtttgaaggacgtatcaccccggagctcctgacccgtggcaagttcaacacaagtgacgtgtctgccatcgagaagaataaagagggacttcacaatgctaaagagatactgacccggctcggggtagaaccttcggatgacgactgtgtctcagtgcaacacgtgtgtaccatcgtgtctttccggtctgcaaaccttgtggcagccaccctgggagctatactgaatcggctgcgcgacaataagggcacgccaaggcttcgaactacagtcggcgtggacggtagcctatataagactcatccacagtattcacggagattccataaaactctgagacggcttgttccagatagcgatgtccgcttcctcctcagcgagagcggatccgggaagggagcagccatggtgactgccgtcgcgtatagactggcggagcagcatagacagatcgaggaaactctagcccacttccacctgaccaaggacatgctgcttgaggtgaaaaagagaatgcgtgccgagatggagctcggattgcgaaagcagacgcacaacaacgctgtagtcaagatgcttccctcattcgtccgcagaactcccgatggcaccgagaatggggatttcctcgccctcgaccttggaggcacaaactttagagtgttgctcgtcaagatacgttccggaaagaagaggacagtcgagatgcacaataagatctacgctattcctattgagataatgcaaggaactggggaagaactattcgaccacatcgtgtcgtgtatctccgactttttggactatatgggcataaaggggcctaggatgccccttggctttacattttctttcccatgccagcaaacctccctggacgccggtattctaataacatggacaaaggggttcaaagccaccgactgcgtgggacacgatgttgtgacacttctgcgtgacgcaataaagagacgggaagaatttgatctggatgtagttgctgtcgtcaacgatactgtcggcaccatgatgacatgcgcttacgaagaacccacttgcgaagtaggcttaatcgttggcacgggaagcaacgcctgctacatggaggagatgaagaacgtggagatggtcgagggcgaccagggccagatgtgcatcaacatggagtggggagcctttggcgataacggttgtcttgatgatatccgcacacattatgaccgactggttgatgagtattcccttaatgccggtaagcaaagatacgaaaaaatgatatctggcatgtatctgggcgagatcgtgcgaaacatcttaatcgactttaccaagaagggattcttgtttagaggacagatctcagaaaccctgaagacaaggggcattttcgaaacaaaatttttaagccagatcgagagcgacaggctggccctgctgcaggtccgggctatcctgcagcagctcgggctcaattctacatgtgatgacagcatattagtaaaaactgtgtgcggcgtagtgtcccggagggctgctcaactatgtggcgcagggatggccgcagttgttgataagataagggaaaacaggggcctggaccggcttaacgtaacagttggtgtggacggcacgctctataagctgcatcctcatttttcacgcattatgcatcagaccgtgaaggaactctcgccaaagtgtaatgtttcttttttgctgtcagaagatggttccggaaaaggagctgccctcatcactgcggtgggcgttagacttagaacagaggcatag

SEQ ID NO: 3887 - DNA, 2754 bp, Artificial Sequence
  derived and/or modified sequence
atgatcgccgcccagctgctggcctactacttcaccgagctgaaggacgaccaggtgaagaagatcgacaagtacctgtacgccatgagactgagcgacgagaccctgatcgacatcatgaccagattcagaaaggagatgaagaacggcctgagcagagacttcaaccccaccgccaccgtgaagatgctgcccaccttcgtgagaagcatccccgacggcagcgagaagggcgacttcatcgccctggacctgggcggcagcagcttcagaatcctgagagtgcaggtgaaccacgagaagaaccagaacgtgcacatggagagcgaggtgtacgacacccccgagaacatcgtgcacggcagcggcagccagctgttcgaccacgtggccgagtgcctgggcgacttcatggagaagagaaagatcaaggacaagaagctgcccgtgggcttcaccttcagcttcccctgccagcagagcaagatcgacgaggccatcctgatcacctggaccaagagattcaaggccagcggcgtggagggcgccgacgtggtgaagctgctgaacaaggccatcaagaagagaggcgactacgacgccaacatcgtggccgtggtgaacgacaccgtgggcaccatgatgacctgcggctacgacgaccagcactgcgaggtgggcctgatcatcggcaccggcaccaacgcctgctacatggaggagctgagacacatcgacctggtggagggcgacgagggcagaatgtgcatcaacaccgagtggggcgccttcggcgacgacggcagcctggaggacatcagaaccgagttcgacagagagatcgacagaggcagcctgaaccccggcaagcagctgttcgagaagatggtgagcggcatgtacctgggcgagctggtgagactgatcctggtgaagatggccaaggagggcctgctgttcgagggcagaatcacccccgagctgctgaccagaggcaagttcaacaccagcgacgtgagcgccatcgagaagaacaaggagggcctgcacaacgccaaggagatcctgaccagactgggcgtggagcccagcgacgacgactgcgtgagcgtgcagcacgtgtgcaccatcgtgagcttcagaagcgccaacctggtggccgccaccctgggcgccatcctgaacagactgagagacaacaagggcacccccagactgagaaccaccgtgggcgtggacggcagcctgtacaagacccacccccagtacagcagaagattccacaagaccctgagaagactggtgcccgacagcgacgtgagattcctgctgagcgagagcggcagcggcaagggcgccgccatggtgaccgccgtggcctacagactggccgagcagcacagacagatcgaggagaccctggcccacttccacctgaccaaggacatgctgctggaggtgaagaagagaatgagagccgagatggagctgggcctgagaaagcagacccacaacaacgccgtggtgaagatgctgcccagcttcgtgagaagaacccccgacggcaccgagaacggcgacttcctggccctggacctgggcggcaccaacttcagagtgctgctggtgaagatcagaagcggcaagaagagaaccgtggagatgcacaacaagatctacgccatccccatcgagatcatgcagggcaccggcgaggagctgttcgaccacatcgtgagctgcatcagcgacttcctggactacatgggcatcaagggccccagaatgcccctgggcttcaccttcagcttcccctgccagcagaccagcctggacgccggcatcctgatcacctggaccaagggcttcaaggccaccgactgcgtgggccacgacgtggtgaccctgctgagagacgccatcaagagaagagaggagttcgacctggacgtggtggccgtggtgaacgacaccgtgggcaccatgatgacctgcgcctacgaggagcccacctgcgaggtgggcctgatcgtgggcaccggcagcaacgcctgctacatggaggagatgaagaacgtggagatggtggagggcgaccagggccagatgtgcatcaacatggagtggggcgccttcggcgacaacggctgcctggacgacatcagaacccactacgacagactggtggacgagtacagcctgaacgccggcaagcagagatacgagaagatgatcagcggcatgtacctgggcgagatcgtgagaaacatcctgatcgacttcaccaagaagggcttcctgttcagaggccagatcagcgagaccctgaagaccagaggcatcttcgagaccaagttcctgagccagatcgagagcgacagactggccctgctgcaggtgagagccatcctgcagcagctgggcctgaacagcacctgcgacgacagcatcctggtgaagaccgtgtgcggcgtggtgagcagaagagccgcccagctgtgcggcgccggcatggccgccgtggtggacaagatcagagagaacagaggcctggacagactgaacgtgaccgtgggcgtggacggcaccctgtacaagctgcacccccacttcagcagaatcatgcaccagaccgtgaaggagctgagccccaagtgcaacgtgagcttcctgctgagcgaggacggcagcggcaagggcgccgccctgatcaccgccgtgggcgtgagactgagaaccgaggccagcagctag

SEQ ID NO: 3888 - DNA, 2748 bp, Artificial Sequence
  derived and/or modified sequence
atgatcgccgcccagctgctggcctactacttcaccgagctgaaggacgaccaggtgaagaagatcgacaagtacctgtacgccatgagactgagcgacgagaccctgatcgacatcatgaccagattcagaaaggagatgaagaacggcctgagcagagacttcaaccccaccgccaccgtgaagatgctgcccaccttcgtgagaagcatccccgacggcagcgagaagggcgacttcatcgccctggacctgggcggcagcagcttcagaatcctgagagtgcaggtgaaccacgagaagaaccagaacgtgcacatggagagcgaggtgtacgacacccccgagaacatcgtgcacggcagcggcagccagctgttcgaccacgtggccgagtgcctgggcgacttcatggagaagagaaagatcaaggacaagaagctgcccgtgggcttcaccttcagcttcccctgccagcagagcaagatcgacgaggccatcctgatcacctggaccaagagattcaaggccagcggcgtggagggcgccgacgtggtgaagctgctgaacaaggccatcaagaagagaggcgactacgacgccaacatcgtggccgtggtgaacgacaccgtgggcaccatgatgacctgcggctacgacgaccagcactgcgaggtgggcctgatcatcggcaccggcaccaacgcctgctacatggaggagctgagacacatcgacctggtggagggcgacgagggcagaatgtgcatcaacaccgagtggggcgccttcggcgacgacggcagcctggaggacatcagaaccgagttcgacagagagatcgacagaggcagcctgaaccccggcaagcagctgttcgagaagatggtgagcggcatgtacctgggcgagctggtgagactgatcctggtgaagatggccaaggagggcctgctgttcgagggcagaatcacccccgagctgctgaccagaggcaagttcaacaccagcgacgtgagcgccatcgagaagaacaaggagggcctgcacaacgccaaggagatcctgaccagactgggcgtggagcccagcgacgacgactgcgtgagcgtgcagcacgtgtgcaccatcgtgagcttcagaagcgccaacctggtggccgccaccctgggcgccatcctgaacagactgagagacaacaagggcacccccagactgagaaccaccgtgggcgtggacggcagcctgtacaagacccacccccagtacagcagaagattccacaagaccctgagaagactggtgcccgacagcgacgtgagattcctgctgagcgagagcggcagcggcaagggcgccgccatggtgaccgccgtggcctacagactggccgagcagcacagacagatcgaggagaccctggcccacttccacctgaccaaggacatgctgctggaggtgaagaagagaatgagagccgagatggagctgggcctgagaaagcagacccacaacaacgccgtggtgaagatgctgcccagcttcgtgagaagaacccccgacggcaccgagaacggcgacttcctggccctggacctgggcggcaccaacttcagagtgctgctggtgaagatcagaagcggcaagaagagaaccgtggagatgcacaacaagatctacgccatccccatcgagatcatgcagggcaccggcgaggagctgttcgaccacatcgtgagctgcatcagcgacttcctggactacatgggcatcaagggccccagaatgcccctgggcttcaccttcagcttcccctgccagcagaccagcctggacgccggcatcctgatcacctggaccaagggcttcaaggccaccgactgcgtgggccacgacgtggtgaccctgctgagagacgccatcaagagaagagaggagttcgacctggacgtggtggccgtggtgaacgacaccgtgggcaccatgatgacctgcgcctacgaggagcccacctgcgaggtgggcctgatcgtgggcaccggcagcaacgcctgctacatggaggagatgaagaacgtggagatggtggagggcgaccagggccagatgtgcatcaacatggagtggggcgccttcggcgacaacggctgcctggacgacatcagaacccactacgacagactggtggacgagtacagcctgaacgccggcaagcagagatacgagaagatgatcagcggcatgtacctgggcgagatcgtgagaaacatcctgatcgacttcaccaagaagggcttcctgttcagaggccagatcagcgagaccctgaagaccagaggcatcttcgagaccaagttcctgagccagatcgagagcgacagactggccctgctgcaggtgagagccatcctgcagcagctgggcctgaacagcacctgcgacgacagcatcctggtgaagaccgtgtgcggcgtggtgagcagaagagccgcccagctgtgcggcgccggcatggccgccgtggtggacaagatcagagagaacagaggcctggacagactgaacgtgaccgtgggcgtggacggcaccctgtacaagctgcacccccacttcagcagaatcatgcaccagaccgtgaaggagctgagccccaagtgcaacgtgagcttcctgctgagcgaggacggcagcggcaagggcgccgccctgatcaccgccgtgggcgtgagactgagaaccgaggcctag

SEQ ID NO: 3889 - protein, 917 aa, Artificial Sequence
  derived and/or modified sequence
MIASHLLAYFFTELNHDQVQKVDQYLYHMRLSDETLLEISKRFRKEMEKGLGATTHPTAAVKMLPTFVRSTPDGTEHGEFLALDLGGTNFRVLWVKVTDNGLQKVEMENQIYAIPEDIMRGSGTQLFDHIAECLANFMDKLQIKDKKLPLGFTFSFPCHQTKLDESFLVSWTKGFKSSGVEGRDVVALIRKAIQRRGDFDIDIVAVVNDTVGTMMTCGYDDHNCEIGLIVGTGSNACYMEEMRHIDMVEGDEGRMCINMEWGAFGDDGSLNDIRTEFDQEIDMGSLNPGKQLFEKMISGMYMGELVRLILVKMAKEELLFGGKLSPELLNTGRFETKDISDIEGEKDGIRKAREVLMRLGLDPTQEDCVATHRICQIVSTRSASLCAATLAAVLQRIKENKGEERLRSTIGVDGSVYKKHPHFAKRLHKTVRRLVPGCDVRFLRSEDGSGKGAAMVTAVAYRLADQHRARQKTLEHLQLSHDQLLEVKRRMKVEMERGLSKETHASAPVKMLPTYVCATPDGTEKGDFLALDLGGTNFRVLLVRVRNGKWGGVEMHNKIYAIPQEVMHGTGDELFDHIVQCIADFLEYMGMKGVSLPLGFTFSFPCQQNSLDESILLKWTKGFKASGCEGEDVVTLLKEAIHRREEFDLDVVAVVNDTVGTMMTCGFEDPHCEVGLIVGTGSNACYMEEMRNVELVEGEEGRMCVNMEWGAFGDNGCLDDFRTEFDVAVDELSLNPGKQRFEKMISGMYLGEIVRNILIDFTKRGLLFRGRISERLKTRGIFETKFLSQIESDCLALLQVRAILQHLGLESTCDDSIIVKEVCTVVARRAAQLCGAGMAAVVDRIRENRGLDALKVTVGVDGTLYKLHPHFAKVMHETVKDLAPKCDVSFLQSEDGSGKGAALITAVACRIREAGQR

SEQ ID NO: 3890 - protein, 889 aa, Artificial Sequence
  derived and/or modified sequence
MRLSDETLLEISKRFRKEMEKGLGATTHPTAAVKMLPTFVRSTPDGTEHGEFLALDLGGTNFRVLWVKVTDNGLQKVEMENQIYAIPEDIMRGSGTQLFDHIAECLANFMDKLQIKDKKLPLGFTFSFPCHQTKLDESFLVSWTKGFKSSGVEGRDVVALIRKAIQRRGDFDIDIVAVVNDTVGTMMTCGYDDHNCEIGLIVGTGSNACYMEEMRHIDMVEGDEGRMCINMEWGAFGDDGSLNDIRTEFDQEIDMGSLNPGKQLFEKMISGMYMGELVRLILVKMAKEELLFGGKLSPELLNTGRFETKDISDIEGEKDGIRKAREVLMRLGLDPTQEDCVATHRICQIVSTRSASLCAATLAAVLQRIKENKGEERLRSTIGVDGSVYKKHPHFAKRLHKTVRRLVPGCDVRFLRSEDGSGKGAAMVTAVAYRLADQHRARQKTLEHLQLSHDQLLEVKRRMKVEMERGLSKETHASAPVKMLPTYVCATPDGTEKGDFLALDLGGTNFRVLLVRVRNGKWGGVEMHNKIYAIPQEVMHGTGDELFDHIVQCIADFLEYMGMKGVSLPLGFTFSFPCQQNSLDESILLKWTKGFKASGCEGEDVVTLLKEAIHRREEFDLDVVAVVNDTVGTMMTCGFEDPHCEVGLIVGTGSNACYMEEMRNVELVEGEEGRMCVNMEWGAFGDNGCLDDFRTEFDVAVDELSLNPGKQRFEKMISGMYLGEIVRNILIDFTKRGLLFRGRISERLKTRGIFETKFLSQIESDCLALLQVRAILQHLGLESTCDDSIIVKEVCTVVARRAAQLCGAGMAAVVDRIRENRGLDALKVTVGVDGTLYKLHPHFAKVMHETVKDLAPKCDVSFLQSEDGSGKGAALITAVACRIREAGQR

SEQ ID NO: 3891 - DNA, 2754 bp, Artificial Sequence
  derived and/or modified sequence
atgatcgccagccaccttcttgcttattttttcactgaactgaatcatgaccaggtccagaaggtggaccagtatttgtaccatatgaggctcagcgatgagaccctattagaaatatcgaagagattccgtaaggagatggaaaaaggtctaggtgccacgacacatccaactgctgctgtgaaaatgcttccaacatttgtccggtcaactccagatggaaccgagcacggcgagtttttggctctcgatttgggcgggactaatttcagggttctgtgggtgaaggtgacggacaatgggctgcagaaagtggagatggagaatcagatctacgctattccagaagacatcatgagaggaagtgggactcagcttttcgaccatatcgccgagtgcctagccaacttcatggataagcttcagattaaagataaaaaactgccactgggctttacatttagcttcccatgccatcaaacaaaactggacgagtcattcctggtctcttggacaaaagggtttaagagtagtggggttgaaggtcgggatgtggtggctctgatcagaaaagccattcagcgtcggggggacttcgatatcgatatcgtggctgtcgtgaatgacacggtggggaccatgatgacatgtggctatgacgaccacaattgtgaaattggactcatcgtgggcaccggcagcaatgcatgctacatggaagaaatgcgccacatcgatatggtcgaaggcgacgaggggcggatgtgtattaatatggagtggggcgcgtttggcgacgacggtagtctgaacgacatacgcactgaattcgatcaggagattgacatgggaagcttaaatccaggcaaacagctcttcgaaaaaatgatttcaggaatgtacatgggcgagctcgttagactcatactggtcaagatggcgaaagaggaactgctgtttgggggaaagctgagcccggagctcctgaacacgggacgcttcgagacaaaggacatttcagacattgagggggagaaagacgggatcagaaaggctcgcgaggtgctcatgcgtttgggactggatcccacccaggaagattgcgtggcaacccatcgcatctgtcagatcgtgagtactagatcggcttccctgtgcgctgctaccctcgccgccgttttgcagaggataaaggaaaataaaggagaagaaaggctgcgctccactattggggttgacggcagcgtctacaagaaacacccccacttcgcaaaacggctccacaagactgtgagaaggctcgtgcctggctgtgatgtgcgatttcttcgtagtgaggacggctcaggcaagggcgcggcgatggtcacagccgtagcttaccggcttgccgaccaacatcgcgcgagacagaagacgttagaacacctgcagctctctcacgatcagctgcttgaggtcaagcgccgcatgaaagttgagatggaacgaggactctctaaggagactcacgcgtcagcaccagtaaagatgcttcccacatacgtttgtgccacacccgacgggaccgaaaaaggagattttttggctctggatttgggagggactaacttccgcgtcctcctagtccgagtccgtaacgggaaatgggggggagtggagatgcataataaaatatatgcaatcccccaagaggtgatgcatggcaccggggatgagttgtttgatcacatagttcaatgtattgcagacttccttgagtacatgggcatgaagggagtgtcactacctctcggctttacattcagtttcccctgtcagcagaattccctcgacgagtctatcttgctcaaatggaccaagggatttaaggctagcggttgtgagggcgaagacgtcgttactctactcaaagaggctatacatcgccgcgaagagttcgacttagatgtggtggccgtggtcaacgacactgttggcaccatgatgacttgtggttttgaggatccacactgcgaagtcggactcatagtaggcaccgggtcaaacgcctgttatatggaagaaatgcgaaatgtagaactggttgagggtgaagagggacggatgtgtgttaatatggaatggggggccttcggggataacggatgcctcgatgacttccgcacggagttcgacgtggctgttgatgaactgtctctcaacccaggtaaacagagatttgaaaaaatgatctccgggatgtacttgggtgagattgtccgtaatatcctcattgactttacgaaaagagggctgcttttccggggaagaatctcggaaagactgaaaaccagaggcatctttgagacaaagttcctgagccaaattgagagtgactgcctcgcattgctacaggtgagagctattctgcagcatcttgggctggagtctacatgtgacgattccattattgtgaaagaagtgtgcacggttgtagcccggagggctgcacagctgtgcggagccggcatggcagcggtggtggacagaattagggagaaccggggattggatgccttgaaggtaactgtcggagttgatggcaccctgtacaaactgcacccccactttgccaaggtgatgcatgaaactgttaaggacctggctccgaaatgcgatgtctcctttttgcaaagcgaagacggcagcggtaagggggctgccctgataactgcggtggcatgcaggatccgcgaggcaggacagaggtag

SEQ ID NO: 3892 - DNA, 2670 bp, Artificial Sequence
  derived and/or modified sequence
atgcgcctatccgacgagaccctgttggagatctctaagcgcttccgcaaagagatggaaaaaggcctgggtgctacaacccatccaactgccgccgttaagatgctgcctacattcgtcagaagcactcctgacggcacagagcatggggaattccttgctcttgatctcggagggacaaattttagagtgctttgggtcaaggtaaccgacaatggcctgcagaaggtggaaatggagaaccagatctacgctattcctgaagatatcatgcgtggtagcggcactcagctcttcgatcatattgcagagtgcctcgctaactttatggataaattacagattaaagacaaaaagctgcctctgggtttcacattttccttcccatgccaccagacaaagttggacgaaagctttctggtcagttggacaaagggattcaaatcatcaggcgttgaggggagggacgttgtcgcattgatccgaaaggctatccagcgacgtggcgatttcgatattgatatagtcgccgtagtgaacgacactgtgggtacaatgatgacctgcggctacgatgaccacaactgcgagataggactgattgtgggaactggcagcaatgcctgttacatggaggaaatgcggcatatcgacatggtagaaggagacgaaggacgaatgtgtattaatatggagtggggagccttcggggatgacggatccttgaatgacattcgcacagagtttgaccaggagatcgatatgggcagtctcaatcccggaaaacagctgtttgagaagatgatttctggcatgtacatgggggagttggtacgactcatccttgtaaaaatggcaaaagaagaacttctttttggtggtaaactcagccctgagcttctaaataccgggcggttcgagaccaaggatatctctgacattgaaggcgaaaaagacggaattaggaaggctcgagaagtgctcatgaggctgggcctggatcccactcaggaggattgtgtagccacacaccggatttgccaaattgtgtcaacgaggtccgccagtctctgtgctgcgacattggctgcggttctgcagagaattaaggaaaataagggggaggagaggctgagaagtacgatcggagttgatgggtccgtctacaaaaagcatcctcattttgctaaacgactccataagactgtacgcaggctggtgccaggttgcgacgtgcgatttttgagatctgaggatgggagcggcaaaggagccgcgatggtaacagcagtcgcctaccggctggcagaccagcatcgcgctcgccagaaaacactcgagcacctgcagctgtcccatgaccagctgctggaagttaagcggcgaatgaaggtggagatggaaagaggcctgtcgaaagagacccatgcctcagcgccagtgaaaatgctgccaacctacgtgtgtgcaactcctgacggcaccgagaagggagactttttagcactcgacctcgggggcaccaatttccgcgtgctgttggtgcgcgtgaggaatgggaagtggggcggcgtcgagatgcataacaaaatatacgcgattccgcaggaagtgatgcacggaacgggagacgaactgtttgaccacatcgtgcagtgtatagctgatttcttggaatatatgggcatgaagggggtgtcgcttcctctaggcttcaccttcagctttccttgtcaacagaattctctggatgagagtattctcttgaaatggactaagggcttcaaggcctctggatgcgagggcgaagacgtcgttactctgctgaaagaagccattcacaggcgcgaggagttcgacctagatgttgtggcagtagtgaatgacactgttggcactatgatgacatgtggtttcgaagacccacactgcgaggtaggtctgatcgtcggcaccgggtcaaacgcctgctatatggaggagatgcgcaacgttgaactggtggagggcgaggagggccgaatgtgcgtgaatatggagtggggtgccttcggagataacggttgtctcgatgacttccgcactgagtttgatgtcgctgtggatgaattgtctctaaacccaggcaaacaacggtttgaaaagatgatttccggaatgtatctgggagagatcgttcgcaatattcttatcgattttaccaagagagggctactgttccgcgggaggatttctgagagactcaaaacccgagggatttttgagacaaaattcctgtctcagatcgagagtgattgcctggcactgttgcaggtccgagccattctacagcacttgggcctggagtccacttgtgatgactctatcatagtgaaagaggtttgtactgttgtggcgcgccgcgccgcacagctgtgcggcgcaggaatggcggccgtcgtcgaccgcatccgtgagaatcggggcctggatgcactgaaggttacggtcggcgtggacggcaccctgtacaaactccacccccattttgctaaagtgatgcacgagactgtaaaggacctagcgcctaagtgcgacgtatcttttctccagtccgaagacggatccggtaagggggctgctctcatcactgcagtagcctgccgtattagggaggcaggccagagatag

SEQ ID NO: 3893 - DNA, 2754 bp, Artificial Sequence
  derived and/or modified sequence
atgattgcaagccacttgcttgcctacttctttaccgagctgaaccatgaccaagtccaaaaagtggaccagtacttatatcatatgagactcagcgatgagacgctgcttgaaataagcaaacggtttcgaaaggagatggagaagggcctaggggcaacaacccaccctaccgctgctgtgaaaatgcttcccacttttgtgcgctctacccccgacgggacagagcatggtgagttccttgcgctcgatcttggcggaaccaacttcagggtgttatgggttaaagtgaccgataacgggctgcagaaagtagagatggagaaccaaatatacgccatccccgaagatataatgcgcggatccggcacccagctcttcgaccacatcgccgagtgcctggcaaacttcatggataagttgcagattaaagataagaagctgccactggggtttacattctccttcccctgccatcagaccaagttggatgagagtttcctggtgtcatggacaaaagggttcaaaagcagtggcgtggaggggagggatgtggtcgccctgatcaggaaggccatccaacgcaggggtgatttcgatatagatatagtggcagttgtgaatgatactgtgggtaccatgatgacgtgcggctacgatgatcacaactgtgagatcggactgattgtaggtacaggtagcaatgcttgctacatggaggagatgcgccatatcgacatggtcgaaggagatgaagggcgcatgtgtatcaatatggagtggggcgcttttggcgacgacggttctttgaacgacattaggactgaattcgaccaagaaatcgatatgggtagcctgaatccagggaagcaactgtttgaaaaaatgatttccggcatgtatatgggtgaactcgttcggctgatcctcgtcaagatggccaaagaggaactgctgtttggcggaaagttaagtcctgagttactgaacaccggccggttcgaaacaaaagacatctctgatatagagggggagaaggacggcattcgaaaggcccgagaagtgctcatgagactcggtttggatcctactcaggaggactgtgtcgcgacgcatagaatttgtcaaattgtgtccactcgctctgcttcgctgtgtgccgccactctcgctgccgtcctgcaacggataaaggagaataagggagaggaaaggctacggtccactataggtgtggatggctccgtctataagaagcatccccactttgcaaagcgattgcataagaccgtgcgccgcctggtgccgggttgtgatgtacgttttttgaggtcagaggacggctcaggtaaaggtgcggctatggtgaccgctgtcgcctataggctagccgaccaacacagagcgcgccaaaaaacgctggagcacctgcagctgagtcacgaccagctgctggaagtcaagcggcgcatgaaagtggagatggagaggggcttgagcaaagaaactcacgcctccgcccccgtcaagatgctgcctacctatgtctgtgctacaccagacggaaccgagaagggggatttcctcgcccttgacctgggtggaacgaacttccgtgtgctcctggtgcgagtccgaaacggtaagtggggaggggtggaaatgcataacaaaatatacgcaatcccccaggaagtgatgcacggtaccggcgatgagctgttcgaccatattgtccagtgcatcgcagatttcctagagtatatgggcatgaagggagtcagtctgcctctgggatttacgtttagtttcccctgccagcagaactcactcgatgaatctatcttattgaaatggaccaaaggattcaaggctagtgggtgtgaaggagaggatgttgtgaccctccttaaagaggcaatccaccgaagagaggaattcgacttggatgtggtggccgttgtgaacgataccgtgggaaccatgatgacctgtggattcgaggacccccactgcgaggtgggacttattgttggtactggatctaacgcctgctacatggaggaaatgcgaaatgttgagttagttgaaggcgaagaaggtaggatgtgcgtgaatatggagtggggagcgttcggtgacaatgggtgtctggatgacttccgtacggagtttgatgtggccgtggacgagctctcactgaaccctggaaaacagcgatttgaaaagatgattagcggtatgtacttgggcgagattgttaggaacattttgattgatttcacgaaaaggggacttcttttccgcggccggatcagcgagcgattgaaaactcggggcatcttcgaaacaaagtttctctcgcagattgagtccgattgcctcgcccttctgcaagtgagggcgatcctccaacaccttggactcgagagtacctgcgacgactcaattatcgtcaaagaggtatgcaccgtggtagcaagaagggccgcccagttgtgcggggctggcatggccgccgtcgttgacaggatccgggagaatcgcgggttggacgctctgaaggtgacagtgggggtggatggaaccctgtataagctgcaccctcattttgccaaggtgatgcacgaaaccgtgaaagatctggcccctaagtgcgatgtgtccttcttgcagtctgaagatggttccgggaagggagcagcgttaattactgctgtcgcctgcagaatacgcgaggccggacagcggtag

SEQ ID NO: 3894 - DNA, 5772 bp, Artificial Sequence
  derived and/or modified sequence
cggccgcgcccgcgagccgtgagcgatgattggctgcgccacggcggcgggcggtccgtgggcgcacacaccctccccgcgcagccaatgggcgtgcgcacgtcactgatccggaggcccgcgggccggcagcccctcaataagccacattgttgcatgaaactccggcgcaggagtcccgggctgccgctggcaacatcgtgtcacccagctaagaaaatccgcgggcccgagccacgcgcctgtgaatcggagaggtcccactgcccgagtggagccgggctgagattcttctcaagttgagcctcagtgatcctgtggccgaagttagcgccttgacgtgggacaaccggacacgtcgccaggagagaactgaggcgccttctagcagttgtgacgccaaaatcacgtctccggagacccgcgccctccgccagccgggcgcaccctcgccggtagccttctttgtgcgccgtccggactcccagctcccggcccggcagccgagccccagcacaaagcagtcggaccgcgccgcccgcctcccctctcgcgtctccgcctcggtttcccaactctgcgccgtcgggccgcggcaggatgattgcctcgcatctgcttgcctacttcttcacggagctcaaccatgaccaagtgcagaaggttgaccagtatctctaccacatgcgcctctctgatgagaccctcttggagatctctaagcggttccgcaaggagatggagaaagggcttggagccaccactcaccctactgcagcagtgaagatgctgcccacctttgtgaggtccactccagatgggacagaacacggagagttcctggctctggatcttggagggaccaacttccgtgtgctttgggtgaaagtaacggacaatgggctccagaaggtggagatggagaatcagatctatgccatccctgaggacatcatgcgaggcagtggcacccagctgtttgaccacattgccgaatgcctggctaacttcatggataagctacaaatcaaagacaagaagctcccactgggttttaccttctcgttcccctgccaccagactaaactagacgagagtttcctggtctcatggaccaagggattcaagtccagtggagtggaaggcagagacgttgtggctctgatccggaaggccatccagaggagaggggactttgatatcgacattgtggctgtggtgaatgacacagttgggaccatgatgacctgtggttatgatgaccacaactgtgagattggtctcattgtgggcacgggcagcaacgcctgctacatggaagagatgcgccacatcgacatggtggaaggcgatgaggggcggatgtgtatcaatatggagtggggggccttcggggacgatggctcgctcaacgacattcgcactgagtttgaccaggagattgacatgggctcactgaacccgggaaagcaactgtttgagaagatgatcagtgggatgtacatgggggagctggtgaggcttatcctggtgaagatggccaaggaggagctgctctttggggggaagctcagcccagagcttctcaacaccggtcgctttgagaccaaagacatctcagacattgaaggggagaaggatggcatccggaaggcccgtgaggtcctgatgcggttgggcctggacccgactcaggaggactgcgtggccactcaccggatctgccagatcgtgtccacacgctccgccagcctgtgcgcagccaccctggccgccgtgctgcagcgcatcaaggagaacaaaggcgaggagcggctgcgctctactattggggtcgacggttccgtctacaagaaacacccccattttgccaagcgtctacataagaccgtgcggcggctggtgcccggctgcgatgtccgcttcctccgctccgaggatggcagtggcaaaggtgcagccatggtgacagcagtggcttaccggctggccgatcaacaccgtgcccgccagaagacattagagcatctgcagctgagccatgaccagctgctggaggtcaagaggaggatgaaggtagaaatggagcgaggtctgagcaaggagactcatgccagtgcccccgtcaagatgctgcccacctacgtgtgtgctaccccggacggcacagagaaaggggacttcttggccttggaccttggaggaacaaatttccgggtcctgctggtccgtgttcggaatgggaagtggggtggagtggagatgcacaacaagatctacgccatcccgcaggaggtcatgcacggcaccggggacgagctctttgaccacattgtccagtgcatcgcggacttcctcgagtacatgggcatgaagggcgtgtccctgcctctgggttttaccttctccttcccctgccagcagaacagcctggacgagagcatcctcctcaagtggacaaaaggcttcaaggcatctggctgcgagggcgaggacgtggtgaccctgctgaaggaagcgatccaccggcgagaggagtttgacctggatgtggttgctgtggtgaacgacacagtcggaactatgatgacctgtggctttgaagaccctcactgtgaagttggcctcattgttggcacgggcagcaatgcctgctacatggaggagatgcgcaacgtggaactggtggaaggagaagaggggcggatgtgtgtgaacatggaatggggggccttcggggacaatggatgcctagatgacttccgcacagaatttgatgtggctgtggatgagctttcactcaaccccggcaagcagaggttcgagaaaatgatcagtggaatgtacctgggtgagattgtccgtaacattctcatcgatttcaccaagcgtggactactcttccgaggccgcatctcagagcggctcaagacaaggggcatctttgaaaccaagttcttgtctcagattgagagtgactgcctggccctgctgcaagtccgagccatcctgcaacacttagggcttgagagcacctgtgacgacagcatcattgttaaggaggtgtgcactgtggtggcccggcgggcagcccagctctgtggcgcaggcatggccgctgtggtggacaggatacgagaaaaccgtgggctggacgctctcaaagtgacagtgggtgtggatgggaccctctacaagctacatcctcactttgccaaagtcatgcatgagacagtgaaggacctggctccgaaatgtgatgtgtctttcctgcagtcagaggatggcagcgggaagggggcggcgctcatcactgctgtggcctgccgcatccgtgaggctggacagcgatagaacccctgaaatcggaagggacttcctctttctctccttcttccctgttttaaattataagatgtcatccccttgtgtcagagacagaccccttggcttttgcttggcagagaggaccccactggactgggttttgtctctgcatctcattgtagagcttggtggctgagcttggccctattaagataaatagagttccaaataaggatttgttcacatgcatcataaccattcccattggttctcctaaaacatgaaaattatctcccttagtaatcccccttgccaaattccatgtccctgtataattctacaggatggggacactaatgaagatacggttgcttcaccttggagcctgaacatgacatttctaagtggggtgcatcccccagcactgatgttgttactgattctcctgtcagagatctgggaggtctccactgaggatgtgagcctgattatcctataggcagacgtggggagggtggaggggtgacagtggaggaaaatccatggatatccacgcagcagcccctctttaacctcatctacaagcatttgccctgtggattccagcatttgccattcctggaatcaaggaatcctgagtctgggcaatgaaaccaaagccaggagttgacgcatcctgcagttgggccagctgtcgcatctcagcggggcgcacatgttatccacaagcaatggacctttggggaagggggagtttttagtttgttttacaaatttttcctgcaaaagtggaatcactgtattttcattttaatttatatttgaaattttatttagttcttgagtagatctgcttcttcatcttgacatgtaatgaatggtcagttgtacgtaatgtatttatatgttaatttgttatgtatatagatgtgcaagtcttgtcagaattggcctcagtgtagttaaagggcagaaggggaagatactgactagtcatagaaatacctcattcgcctgtgggaagagaagggaagcctcttcagggtgagtgaatggcaaagcggttgcttctggctcctccttcccctgtggtcttggaagtgtgtggaaggcagggacagagatggaggccgagccaatagactgaagagaccacagcaattggctcctccatctagagattttcttggcagtattccatgggatgttaagcaaaggaaaccaaaggaatcgtttcaaatggactcatggcttagaaatctttattcttagggcagtcagtagtattctaaagctttctgacaagataaaggaagtcaccaaaatttctttttttaaattgtatctaatcctcaacaacaaaccaaaacagaacaattaaacagccaaataaaacctcagggacaacatttttggtgtatttgagccctcccagcaagtttcaccttgggtttgtattttaaatgttttacaagaattgtccatgtgcttccctaggctgagctggcattggtctgctgacctgtttttgtgtttttcttttttttatacacaacatttatttcaaactattgggagggatgagagtggcttaaaaacttccatccctacttttcaagagtgcagttgattctgaatctgaaagcccgcctctgtcctaaaatacaaacaagcacagacattaaacctggatactatatgataaagagggatgtaactattgaattggatacaaggatcagaatggaaagaaactcacgatgaaattgaacctggtttttgtatatttatcaaacttgtgctgagaatagtgtctgattatacgacttttaagcaaagttgggtgtaattaggtgaaaacagcccaggtcctcccgggagcacagaggggctaggggctggtccttctcgtttgctctagtcttgctttgctgtctggtgtagctcctctgctgctcccatctgcactaattgacccaaaacgtgggtatttcctgctacacaaaagccaaaaggtttcatgtagattttagttcactaaagggtgcccacaaaatagagattaattttaacttaaattttaagcttgaagattaggtactatctgtgaagttacacttttttttttttttttaaaggtagagatgtgtgtgtgtgtaggtattaaagatgtgttgttggtttccaaaaaggaacactggaaaataaattttgaatgtttatgttctcagaatcaggttgacagtcccttgctgacatggctttgctttgtgtaaatacagtggatctcaatcttcggggtgtgatgaatagcgaatcatctcaaatccttgagcactcagtctagtgaagatgttgtcattatgtacaatacataactagtttaattaactatgtgatgttaactattattaataaattttaacattttccaaaataatcaaa

SEQ ID NO: 3895 - DNA, 5278 bp, Artificial Sequence
  derived and/or modified sequence
acccgggaaggagtaggaaaggggcagaggaactccgcccgccgcgccccctccccggaactgtggcgcccggaactgaggctcggcgaggggcgtcccccattaacccccgcccctccaaatcagcctcgggaccgcccagcctcgtgtcctcaggatctgcctctgagttgaccagtatctctaccacatgcgcctctctgatgagaccctcttggagatctctaagcggttccgcaaggagatggagaaagggcttggagccaccactcaccctactgcagcagtgaagatgctgcccacctttgtgaggtccactccagatgggacagaacacggagagttcctggctctggatcttggagggaccaacttccgtgtgctttgggtgaaagtaacggacaatgggctccagaaggtggagatggagaatcagatctatgccatccctgaggacatcatgcgaggcagtggcacccagctgtttgaccacattgccgaatgcctggctaacttcatggataagctacaaatcaaagacaagaagctcccactgggttttaccttctcgttcccctgccaccagactaaactagacgagagtttcctggtctcatggaccaagggattcaagtccagtggagtggaaggcagagacgttgtggctctgatccggaaggccatccagaggagaggggactttgatatcgacattgtggctgtggtgaatgacacagttgggaccatgatgacctgtggttatgatgaccacaactgtgagattggtctcattgtgggcacgggcagcaacgcctgctacatggaagagatgcgccacatcgacatggtggaaggcgatgaggggcggatgtgtatcaatatggagtggggggccttcggggacgatggctcgctcaacgacattcgcactgagtttgaccaggagattgacatgggctcactgaacccgggaaagcaactgtttgagaagatgatcagtgggatgtacatgggggagctggtgaggcttatcctggtgaagatggccaaggaggagctgctctttggggggaagctcagcccagagcttctcaacaccggtcgctttgagaccaaagacatctcagacattgaaggggagaaggatggcatccggaaggcccgtgaggtcctgatgcggttgggcctggacccgactcaggaggactgcgtggccactcaccggatctgccagatcgtgtccacacgctccgccagcctgtgcgcagccaccctggccgccgtgctgcagcgcatcaaggagaacaaaggcgaggagcggctgcgctctactattggggtcgacggttccgtctacaagaaacacccccattttgccaagcgtctacataagaccgtgcggcggctggtgcccggctgcgatgtccgcttcctccgctccgaggatggcagtggcaaaggtgcagccatggtgacagcagtggcttaccggctggccgatcaacaccgtgcccgccagaagacattagagcatctgcagctgagccatgaccagctgctggaggtcaagaggaggatgaaggtagaaatggagcgaggtctgagcaaggagactcatgccagtgcccccgtcaagatgctgcccacctacgtgtgtgctaccccggacggcacagagaaaggggacttcttggccttggaccttggaggaacaaatttccgggtcctgctggtccgtgttcggaatgggaagtggggtggagtggagatgcacaacaagatctacgccatcccgcaggaggtcatgcacggcaccggggacgagctctttgaccacattgtccagtgcatcgcggacttcctcgagtacatgggcatgaagggcgtgtccctgcctctgggttttaccttctccttcccctgccagcagaacagcctggacgagagcatcctcctcaagtggacaaaaggcttcaaggcatctggctgcgagggcgaggacgtggtgaccctgctgaaggaagcgatccaccggcgagaggagtttgacctggatgtggttgctgtggtgaacgacacagtcggaactatgatgacctgtggctttgaagaccctcactgtgaagttggcctcattgttggcacgggcagcaatgcctgctacatggaggagatgcgcaacgtggaactggtggaaggagaagaggggcggatgtgtgtgaacatggaatggggggccttcggggacaatggatgcctagatgacttccgcacagaatttgatgtggctgtggatgagctttcactcaaccccggcaagcagaggttcgagaaaatgatcagtggaatgtacctgggtgagattgtccgtaacattctcatcgatttcaccaagcgtggactactcttccgaggccgcatctcagagcggctcaagacaaggggcatctttgaaaccaagttcttgtctcagattgagagtgactgcctggccctgctgcaagtccgagccatcctgcaacacttagggcttgagagcacctgtgacgacagcatcattgttaaggaggtgtgcactgtggtggcccggcgggcagcccagctctgtggcgcaggcatggccgctgtggtggacaggatacgagaaaaccgtgggctggacgctctcaaagtgacagtgggtgtggatgggaccctctacaagctacatcctcactttgccaaagtcatgcatgagacagtgaaggacctggctccgaaatgtgatgtgtctttcctgcagtcagaggatggcagcgggaagggggcggcgctcatcactgctgtggcctgccgcatccgtgaggctggacagcgatagaacccctgaaatcggaagggacttcctctttctctccttcttccctgttttaaattataagatgtcatccccttgtgtcagagacagaccccttggcttttgcttggcagagaggaccccactggactgggttttgtctctgcatctcattgtagagcttggtggctgagcttggccctattaagataaatagagttccaaataaggatttgttcacatgcatcataaccattcccattggttctcctaaaacatgaaaattatctcccttagtaatcccccttgccaaattccatgtccctgtataattctacaggatggggacactaatgaagatacggttgcttcaccttggagcctgaacatgacatttctaagtggggtgcatcccccagcactgatgttgttactgattctcctgtcagagatctgggaggtctccactgaggatgtgagcctgattatcctataggcagacgtggggagggtggaggggtgacagtggaggaaaatccatggatatccacgcagcagcccctctttaacctcatctacaagcatttgccctgtggattccagcatttgccattcctggaatcaaggaatcctgagtctgggcaatgaaaccaaagccaggagttgacgcatcctgcagttgggccagctgtcgcatctcagcggggcgcacatgttatccacaagcaatggacctttggggaagggggagtttttagtttgttttacaaatttttcctgcaaaagtggaatcactgtattttcattttaatttatatttgaaattttatttagttcttgagtagatctgcttcttcatcttgacatgtaatgaatggtcagttgtacgtaatgtatttatatgttaatttgttatgtatatagatgtgcaagtcttgtcagaattggcctcagtgtagttaaagggcagaaggggaagatactgactagtcatagaaatacctcattcgcctgtgggaagagaagggaagcctcttcagggtgagtgaatggcaaagcggttgcttctggctcctccttcccctgtggtcttggaagtgtgtggaaggcagggacagagatggaggccgagccaatagactgaagagaccacagcaattggctcctccatctagagattttcttggcagtattccatgggatgttaagcaaaggaaaccaaaggaatcgtttcaaatggactcatggcttagaaatctttattcttagggcagtcagtagtattctaaagctttctgacaagataaaggaagtcaccaaaatttctttttttaaattgtatctaatcctcaacaacaaaccaaaacagaacaattaaacagccaaataaaacctcagggacaacatttttggtgtatttgagccctcccagcaagtttcaccttgggtttgtattttaaatgttttacaagaattgtccatgtgcttccctaggctgagctggcattggtctgctgacctgtttttgtgtttttcttttttttatacacaacatttatttcaaactattgggagggatgagagtggcttaaaaacttccatccctacttttcaagagtgcagttgattctgaatctgaaagcccgcctctgtcctaaaatacaaacaagcacagacattaaacctggatactatatgataaagagggatgtaactattgaattggatacaaggatcagaatggaaagaaactcacgatgaaattgaacctggtttttgtatatttatcaaacttgtgctgagaatagtgtctgattatacgacttttaagcaaagttgggtgtaattaggtgaaaacagcccaggtcctcccgggagcacagaggggctaggggctggtccttctcgtttgctctagtcttgctttgctgtctggtgtagctcctctgctgctcccatctgcactaattgacccaaaacgtgggtatttcctgctacacaaaagccaaaaggtttcatgtagattttagttcactaaagggtgcccacaaaatagagattaattttaacttaaattttaagcttgaagattaggtactatctgtgaagttacacttttttttttttttttaaaggtagagatgtgtgtgtgtgtaggtattaaagatgtgttgttggtttccaaaaaggaacactggaaaataaattttgaatgtttatgttctcagaatcaggttgacagtcccttgctgacatggctttgctttgtgtaaatacagtggatctcaatcttcggggtgtgatgaatagcgaatcatctcaaatccttgagcactcagtctagtgaagatgttgtcattatgtacaatacataactagtttaattaactatgtgatgttaactattattaataaattttaacattttccaaaataatcaaa

SEQ ID NO: 3896 - DNA, 3493 bp, Artificial Sequence
  derived and/or modified sequence
aggagtcccgggctgccgctggcaacatcgtgtcacccagctaagaaaatccgcgggcccgagccacgcgcctgtgaatcggagaggtcccactgcccgagtggagccgggctgagattcttctcaagttgagcctcagtgatcctgtggccgaagttagcgccttgacgtgggacaaccggacacgtcgccaggagagaactgaggcgccttctagcagttgtgacgccaaaatcacgtctccggagacccgcgccctccgccagccgggcgcaccctcgccggtagccttctttgtgcgccgtccggactcccagctcccggcccggcagccgagccccagcacaaagcagtcggaccgcgccgcccgcctcccctctcgcgtctccgcctcggtttcccaactctgcgccgtcgggccgcggcaggatgattgcctcgcatctgcttgcctacttcttcacggagctcaaccatgaccaagtgcagaaggttgaccagtatctctaccacatgcgcctctctgatgagaccctcttggagatctctaagcggttccgcaaggagatggagaaagggcttggagccaccactcaccctactgcagcagtgaagatgctgcccacctttgtgaggtccactccagatgggacagaacacggagagttcctggctctggatcttggagggaccaacttccgtgtgctttgggtgaaagtaacggacaatgggctccagaaggtggagatggagaatcagatctatgccatccctgaggacatcatgcgaggcagtggcacccagctgtttgaccacattgccgaatgcctggctaacttcatggataagctacaaatcaaagacaagaagctcccactgggttttaccttctcgttcccctgccaccagactaaactagacgagagtttcctggtctcatggaccaagggattcaagtccagtggagtggaaggcagagacgttgtggctctgatccggaaggccatccagaggagaggggactttgatatcgacattgtggctgtggtgaatgacacagttgggaccatgatgacctgtggttatgatgaccacaactgtgagattggtctcattgtgggcacgggcagcaacgcctgctacatggaagagatgcgccacatcgacatggtggaaggcgatgaggggcggatgtgtatcaatatggagtggggggccttcggggacgatggctcgctcaacgacattcgcactgagtttgaccaggagattgacatgggctcactgaacccgggaaagcaactgtttgagaagatgatcagtgggatgtacatgggggagctggtgaggcttatcctggtgaagatggccaaggaggagctgctctttggggggaagctcagcccagagcttctcaacaccggtcgctttgagaccaaagacatctcagacattgaaggggagaaggatggcatccggaaggcccgtgaggtcctgatgcggttgggcctggacccgactcaggaggactgcgtggccactcaccggatctgccagatcgtgtccacacgctccgccagcctgtgcgcagccaccctggccgccgtgctgcagcgcatcaaggagaacaaaggcgaggagcggctgcgctctactattggggtcgacggttccgtctacaagaaacacccccattttgccaagcgtctacataagaccgtgcggcggctggtgcccggctgcgatgtccgcttcctccgctccgaggatggcagtggcaaaggtgcagccatggtgacagcagtggcttaccggctggccgatcaacaccgtgcccgccagaagacattagagcatctgcagctgagccatgaccagctgctggaggtcaagaggaggatgaaggtagaaatggagcgaggtctgagcaaggagactcatgccagtgcccccgtcaagatgctgcccacctacgtgtgtgctaccccggacggcacagagaaaggggacttcttggccttggaccttggaggaacaaatttccgggtcctgctggtccgtgttcggaatgggaagtggggtggagtggagatgcacaacaagatctacgccatcccgcaggaggtcatgcacggcaccggggacgagctctttgaccacattgtccagtgcatcgcggacttcctcgagtacatgggcatgaagggcgtgtccctgcctctgggttttaccttctccttcccctgccagcagaacagcctggacgagagcatcctcctcaagtggacaaaaggcttcaaggcatctggctgcgagggcgaggacgtggtgaccctgctgaaggaagcgatccaccggcgagaggagtttgacctggatgtggttgctgtggtgaacgacacagtcggaactatgatgacctgtggctttgaagaccctcactgtgaagttggcctcattgttggcacgggcagcaatgcctgctacatggaggagatgcgcaacgtggaactggtggaaggagaagaggggcggatgtgtgtgaacatggaatggggggccttcggggacaatggatgcctagatgacttccgcacagaatttgatgtggctgtggatgagctttcactcaaccccggcaagcagaggttcgagaaaatgatcagtggaatgtacctgggtgagattgtccgtaacattctcatcgatttcaccaagcgtggactactcttccgaggccgcatctcagagcggctcaagacaaggggcatctttgaaaccaagttcttgtctcagattgagagtgactgcctggccctgctgcaagtccgagccatcctgcaacacttagggcttgagagcacctgtgacgacagcatcattgttaaggaggtgtgcactgtggtggcccggcgggcagcccagctctgtggcgcaggcatggccgctgtggtggacaggatacgagaaaaccgtgggctggacgctctcaaagtgacagtgggtgtggatgggaccctctacaagctacatcctcactttgccaaagtcatgcatgagacagtgaaggacctggctccgaaatgtgatgtgtctttcctgcagtcagaggatggcagcgggaagggggcggcgctcatcactgctgtggcctgccgcatccgtgaggctggacagcgatagaacccctgaaatcggaagggacttcctctttctctccttcttccctgttttaaattataagatgtcatccccttgtgtcagagacagaccccttggcttttgcttggcagagaggaccccactggactgggttttgtctctgcatctcattgtagagcttggtggctgagcttggccctattaagataaatagagttccaaaaaggaacactggaaaataaattttgaatgtttatgttctcagaatcaggttgacagtcccttgctgacatggctttgctttgtgtaaatacagtggatctcaatcttc

SEQ ID NO: 3897 - DNA, 2754 bp, Artificial Sequence
  derived and/or modified sequence
atgattgccagccacctgctggcctacttcttcacagagctgaaccacgaccaggtgcagaaggtggaccagtacctgtaccacatgaggctgagtgatgagaccctgctggagatcagcaagcgcttcaggaaggagatggagaagggcctgggcgccaccacccaccccacagctgctgtgaagatgctgcccacctttgtgcgcagcaccccagatggaacagaacatggagagttcctggccctggacctgggcggcaccaacttccgggtgctgtgggtgaaggtgacagacaatggcctgcagaaggtggagatggagaaccagatctatgccatccctgaggacatcatgaggggcagcggcacccagctgtttgaccacatcgccgagtgcctggccaacttcatggacaagctgcagatcaaggacaagaagctgcccctgggcttcaccttctccttcccctgccaccagaccaagctggatgagagcttcctggtgtcctggaccaagggcttcaagagcagcggcgtggagggcagagatgtggtggccctgatcaggaaggccatccagaggagaggagactttgatattgatattgtggccgtggtgaatgacacagtgggcaccatgatgacctgtggctatgatgaccacaactgtgagatcggcctgattgtgggcaccggcagcaatgcctgctacatggaggagatgaggcacatcgacatggtggagggagatgagggccgcatgtgcatcaacatggagtggggcgcctttggagatgatggcagcctgaatgacatcagaacagaatttgaccaggagattgacatgggcagcctgaaccctgggaagcagctgtttgagaagatgatcagcggcatgtacatgggagagctggtgcggctcatcctggtgaagatggccaaggaggagctgctgtttggaggcaagctgagccctgagctgctgaacacaggccgctttgagaccaaggacatcagtgacatcgagggggagaaggatggcatcaggaaggcccgggaggtgctgatgaggctgggcctggaccccacccaggaggactgtgtggccacccaccgcatctgccagatcgtgtccaccaggtctgccagcctgtgtgccgccaccctggccgctgtgctgcagaggatcaaggaaaataaaggagaggagcggctgcggagcaccatcggcgtggatggctctgtgtacaagaagcacccccactttgccaagaggctgcacaagacagtgcggcggctggtgcccggctgtgatgtgcgcttcctgcggagtgaagatggcagcgggaaaggagctgccatggtgacagctgtggcctaccgcctggccgaccagcaccgggcccggcagaagaccctggagcacctgcagctgagccatgaccagctgctggaggtgaagaggaggatgaaggtggagatggagcggggcctgagcaaggagacccacgccagcgcccctgtgaagatgctgcccacctacgtgtgtgccaccccagatggaacagagaagggggacttcctggccctggacctgggcggcaccaacttccgggtgctgctggtgcgggtgagaaatggcaagtggggcggcgtggagatgcacaacaagatctatgccatcccccaggaggtgatgcacggcactggagatgagctgtttgaccacatcgtgcagtgcatcgctgacttcctggagtacatgggcatgaagggcgtgtccctgcccctgggcttcaccttctccttcccctgccagcagaacagcctggatgagagcatcctgctgaagtggaccaagggcttcaaggccagcggctgtgaaggagaagatgtggtgaccctgctgaaggaggccatccacagaagagaggagtttgacctggatgtggtggccgtggtgaatgacacagtgggcaccatgatgacctgtggctttgaggacccccactgtgaggtgggcctgattgtgggcaccggcagcaatgcctgctacatggaggagatgagaaatgtggagctggtggagggggaggagggccgcatgtgtgtgaacatggagtggggcgccttcggggacaatggctgcctggatgacttcagaacagaatttgatgtggccgtggatgagctgagcctgaaccctgggaagcagagatttgagaagatgatcagcggcatgtacctgggggagatcgtgaggaacatcctgattgacttcaccaagaggggcctgctcttccggggccgcatcagcgagcggctgaagacccggggcatctttgagaccaagttcctgagccagatcgagagtgactgcctggccctgctgcaggtgcgggccatcctgcagcacctgggcctggagagcacctgtgatgacagcatcatcgtgaaggaggtgtgcaccgtggtggcccggcgggccgcccagctgtgtggggccggcatggctgctgtggtggaccgcatcagagaaaatagaggcctggatgccctgaaggtgacagtgggcgtggatggcaccctgtacaagctgcacccccactttgccaaggtgatgcatgagaccgtgaaggacctggcccccaagtgtgatgtgtccttcctgcagagtgaagatggcagcgggaaaggagctgccctgatcacagctgtggcctgccgcatccgggaggccggccagaggtag

SEQ ID NO: 3898 - DNA, 2670 bp, Artificial Sequence
  derived and/or modified sequence
atgaggctgagtgatgagaccctgctggagatcagcaagcgcttcaggaaggagatggagaagggcctgggcgccaccacccaccccacagctgctgtgaagatgctgcccacctttgtgcgcagcaccccagatggaacagaacatggagagttcctggccctggacctgggcggcaccaacttccgggtgctgtgggtgaaggtgacagacaatggcctgcagaaggtggagatggagaaccagatctatgccatccctgaggacatcatgaggggcagcggcacccagctgtttgaccacatcgccgagtgcctggccaacttcatggacaagctgcagatcaaggacaagaagctgcccctgggcttcaccttctccttcccctgccaccagaccaagctggatgagagcttcctggtgtcctggaccaagggcttcaagagcagcggcgtggagggcagagatgtggtggccctgatcaggaaggccatccagaggagaggagactttgatattgatattgtggccgtggtgaatgacacagtgggcaccatgatgacctgtggctatgatgaccacaactgtgagatcggcctgattgtgggcaccggcagcaatgcctgctacatggaggagatgaggcacatcgacatggtggagggagatgagggccgcatgtgcatcaacatggagtggggcgcctttggagatgatggcagcctgaatgacatcagaacagaatttgaccaggagattgacatgggcagcctgaaccctgggaagcagctgtttgagaagatgatcagcggcatgtacatgggagagctggtgcggctcatcctggtgaagatggccaaggaggagctgctgtttggaggcaagctgagccctgagctgctgaacacaggccgctttgagaccaaggacatcagtgacatcgagggggagaaggatggcatcaggaaggcccgggaggtgctgatgaggctgggcctggaccccacccaggaggactgtgtggccacccaccgcatctgccagatcgtgtccaccaggtctgccagcctgtgtgccgccaccctggccgctgtgctgcagaggatcaaggaaaataaaggagaggagcggctgcggagcaccatcggcgtggatggctctgtgtacaagaagcacccccactttgccaagaggctgcacaagacagtgcggcggctggtgcccggctgtgatgtgcgcttcctgcggagtgaagatggcagcgggaaaggagctgccatggtgacagctgtggcctaccgcctggccgaccagcaccgggcccggcagaagaccctggagcacctgcagctgagccatgaccagctgctggaggtgaagaggaggatgaaggtggagatggagcggggcctgagcaaggagacccacgccagcgcccctgtgaagatgctgcccacctacgtgtgtgccaccccagatggaacagagaagggggacttcctggccctggacctgggcggcaccaacttccgggtgctgctggtgcgggtgagaaatggcaagtggggcggcgtggagatgcacaacaagatctatgccatcccccaggaggtgatgcacggcactggagatgagctgtttgaccacatcgtgcagtgcatcgctgacttcctggagtacatgggcatgaagggcgtgtccctgcccctgggcttcaccttctccttcccctgccagcagaacagcctggatgagagcatcctgctgaagtggaccaagggcttcaaggccagcggctgtgaaggagaagatgtggtgaccctgctgaaggaggccatccacagaagagaggagtttgacctggatgtggtggccgtggtgaatgacacagtgggcaccatgatgacctgtggctttgaggacccccactgtgaggtgggcctgattgtgggcaccggcagcaatgcctgctacatggaggagatgagaaatgtggagctggtggagggggaggagggccgcatgtgtgtgaacatggagtggggcgccttcggggacaatggctgcctggatgacttcagaacagaatttgatgtggccgtggatgagctgagcctgaaccctgggaagcagagatttgagaagatgatcagcggcatgtacctgggggagatcgtgaggaacatcctgattgacttcaccaagaggggcctgctcttccggggccgcatcagcgagcggctgaagacccggggcatctttgagaccaagttcctgagccagatcgagagtgactgcctggccctgctgcaggtgcgggccatcctgcagcacctgggcctggagagcacctgtgatgacagcatcatcgtgaaggaggtgtgcaccgtggtggcccggcgggccgcccagctgtgtggggccggcatggctgctgtggtggaccgcatcagagaaaatagaggcctggatgccctgaaggtgacagtgggcgtggatggcaccctgtacaagctgcacccccactttgccaaggtgatgcatgagaccgtgaaggacctggcccccaagtgtgatgtgtccttcctgcagagtgaagatggcagcgggaaaggagctgccctgatcacagctgtggcctgccgcatccgggaggccggccagaggtag

SEQ ID NO: 3899 - DNA, 2754 bp, Artificial Sequence
  derived and/or modified sequence
atgatcgccagccacctgctggcctacttcttcaccgagctgaaccatgaccaagtgcaaaaagttgatcagtacctgtatcatatgagattatccgatgagacgctgcttgagatttctaagcgtttccgcaaggaaatggagaagggccttggagcgacaacccatcctaccgccgccgtgaaaatgctgccaacttttgtgcggtccacccctgatggcaccgagcatggagagtttctagcattagacctgggaggcacgaattttagggtactgtgggtgaaggtaacggataacggattgcagaaggtcgagatggaaaaccagatctacgccatacctgaggacatcatgcgggggagcggcacccagctttttgaccatatcgccgaatgtctcgctaatttcatggacaaattgcagatcaaggataagaagctgcctctcggatttactttcagcttcccatgtcatcagacgaagctcgacgaaagcttcttggtgagctggaccaaggggttcaaatcgagcggagtggaaggccgagatgtcgtggcgctcatccggaaggcaattcagcgtcgcggagattttgacatcgacattgttgccgttgttaatgacacagtgggaaccatgatgacatgcggctatgatgaccataattgtgagattggactgatagtgggcacaggctccaacgcgtgttatatggaggaaatgcgacacattgacatggttgagggagacgaaggacgaatgtgcataaacatggagtggggggcgtttggtgacgacggcagtctgaatgatatcaggacagagtttgaccaagaaatcgatatggggtctttaaaccccggaaagcagctgttcgaaaagatgatctcaggcatgtacatgggcgagctggtaagattgatcctggtgaagatggccaaggaggaactgcttttcggcggaaaactatcgcccgaattgttgaacaccgggcggtttgaaactaaggatatctctgatattgaaggcgaaaaagatggcatcagaaaagcgcgggaggtgcttatgaggctgggactcgatcctacacaagaagactgcgtggcaacacaccgcatctgccaaatagtttcaaccaggagcgcttccctctgcgccgccactctggctgcagtgttgcagcgaatcaaagagaataaaggggaggagcgactccgttcaactatcggcgtcgacggctccgtgtataagaaacaccctcatttcgccaagagattacacaagaccgtccggagattggtgcctggttgcgatgtgaggttcctcagaagcgaggatggcagtggtaagggtgccgccatggtgaccgccgttgcctatcggctggccgatcaacaccgggccagacagaagacgctggaacacctgcagctgtctcatgaccagttgctggaagtgaagcggaggatgaaagtcgaaatggagcggggcttgtcaaaggaaacacacgctagcgcacctgtgaaaatgctgccaacatatgtatgtgccacacccgacgggacagagaaaggagacttcctggcccttgatctcggagggaccaacttcagggtgcttctcgtccgagtccgtaacggcaagtgggggggagtggagatgcataataaaatctatgccatcccccaggaggtaatgcacggtaccggggacgaactcttcgaccacatcgtgcagtgcatcgctgattttcttgaatacatgggaatgaaaggagtctctctgccgttaggctttacattcagtttcccttgccagcagaatagtctggacgagagtatcctgctgaaatggactaaaggtttcaaagcaagtggatgcgagggtgaggatgtggtgaccttgctcaaagaagctatccatcgccgagaggagttcgacttggacgtcgtagcggtggtgaacgataccgtcggtaccatgatgacttgtggattcgaagatccccactgtgaggttggactgattgtgggaacaggatctaatgcgtgctatatggaggaaatgagaaatgttgaactagttgaaggcgaagaagggcgcatgtgtgttaacatggaatggggcgccttcggcgacaacggatgtctggatgacttccgcaccgaattcgacgtggccgtggatgaactaagcctgaacccagggaaacagaggttcgaaaaaatgatcagcggcatgtatctcggcgaaatcgtgcgtaatatcctcatagacttcacaaaacgcggtttactgttcagaggcaggatatcagagcgcctcaagacacgcggtattttcgaaacgaagtttctgagccagattgagtctgactgcctggcacttttgcaggtacgcgcaatcctgcagcatttgggactggaatccacctgtgacgattctattatcgtgaaggaagtgtgtaccgtagtggccagaagagctgctcagctctgcggcgccgggatggctgcagttgtggatagaattcgcgagaatagaggactggatgccctcaaagtgacagtcggcgtggatggaaccctatataaactccatccacacttcgccaaagtgatgcatgagacagtgaaagacttggcccctaagtgtgatgtaagtttccttcagagcgaggacggttcaggcaagggggcagcactgatcacagccgtagcatgccggattcgggaagcagggcagcgctag

SEQ ID NO: 3900 - DNA, 2670 bp, Artificial Sequence
  derived and/or modified sequence
atgcggctgagcgacgagaccctgctggagatcagcaagcggttcaggaaagaaatggaaaaaggtctcggggccacaactcaccctacagccgcggtgaagatgcttcccacctttgtcagaagcactcccgacggaactgaacacggggagtttttggcgctagatctcgggggcacgaatttccgggtgctgtgggtgaaggtgaccgataacggcctgcagaaggtggagatggagaaccagatctatgcaattcctgaggatatcatgagggggagcgggacccagctctttgatcacattgcagagtgccttgccaatttcatggataaactccagatcaaggataaaaagctccctctgggctttaccttttcttttccgtgccaccagaccaaactcgatgaaagttttctggtgtcatggactaagggattcaaatcttctggtgtggaggggcgggacgtggtggcgctgatccggaaagctatccagaggagaggcgatttcgatatcgacattgttgctgtggtgaatgacactgttggcaccatgatgacttgcggctacgatgaccataattgtgagatcggattgatcgtgggaacgggctccaacgcatgctatatggaggaaatgcgccacattgacatggttgagggcgatgaaggacgaatgtgtattaatatggagtggggcgctttcggagacgacggatcgctgaatgatatccgtactgaatttgaccaggagatcgatatgggctctctgaatcctggcaaacagctctttgagaagatgattagtggaatgtacatgggcgaactcgtgcgactcatcctggtgaagatggccaaagaagagctactgttcgggggcaaactctcaccagagttactcaacaccggtcgcttcgaaaccaaagacatttctgacatagagggagagaaagacgggatcaggaaggctcgagaggtactgatgagacttggcctcgacccaacccaagaagactgtgttgccacacataggatttgtcaaatagtgtccactcgcagtgcctctctatgtgccgccaccctcgctgccgtcctacagagaatcaaggagaataagggcgaagagcgcctccggagcactattggcgtcgacggctctgtgtacaagaaacacccccactttgcaaaacggttgcacaagacggtgaggcgcctggtgccaggttgtgacgtccggtttctgaggagtgaggatgggagcgggaaaggagccgctatggttaccgccgtggcttaccgccttgccgaccaacaccgcgccagacaaaagaccctggagcatttacaattgagtcatgaccagctgctggaggtcaagcgtaggatgaaggtggagatggaacgcggactctcgaaggagacccatgcctcagcccccgtgaaaatgttgccaacatacgtgtgtgccacaccagacggcaccgagaaaggggacttcctggccctagatctgggcggcacaaattttcgggtactgctcgtccgcgtgagaaatggtaagtgggggggtgtagaaatgcacaataagatttacgccattccccaggaggtaatgcacgggaccggtgacgagcttttcgaccacatagtccagtgcatcgccgactttcttgaatacatggggatgaagggggtcagcttgcccctgggcttcaccttctcctttccttgccagcagaatagtctggatgagagtattttgctcaaatggacaaaggggtttaaggcatctggctgcgaaggggaggatgtggtgacactcctgaaggaggccattcacaggagggaggaatttgacctggacgtagtggcggtggtgaacgataccgttggcaccatgatgacctgtgggttcgaggatccccactgtgaggtgggactgattgtgggcaccggttcaaacgcgtgttatatggaggagatgaggaatgtggaattggtggagggcgaagaaggtaggatgtgcgtgaacatggaatggggagctttcggagacaacggctgtctggatgactttcggactgaattcgatgtggctgtcgatgagctctcccttaaccctggcaagcagagattcgaaaagatgattagtgggatgtacctgggcgagatcgtgcgcaacatcttaattgatttcacaaaacggggactgctctttcgaggacggatatctgagcggctgaaaacacgaggaatatttgaaactaaatttctgagccaaatagagtcggattgtctagccctgcttcaagttcgggcaattctgcagcatttaggtctcgagagcacatgcgatgacagtattatcgtcaaggaggtttgcacagtagtggccaggcgtgctgcccagctgtgtggtgctggaatggcggctgtggtggataggattcgggagaacagaggtctggatgccctgaaggtgaccgtaggagtcgacggaacactgtacaagttacaccctcattttgctaaggtcatgcatgagaccgttaaggatctggccccaaaatgtgatgtttccttcctgcaatctgaggatggaagcggcaagggagctgctttgattactgccgtggcttgcagaattcgagaggccgggcagcggtag

SEQ ID NO: 3901 - DNA, 2754 bp, Artificial Sequence
  derived and/or modified sequence
atgatcgccagccacctgctggcctacttcttcaccgagctgaaccatgatcaggtacagaaggtcgatcagtatctgtatcacatgcgcctgagtgacgagactctgctcgaaattagcaaaagatttcggaaggagatggagaaggggctgggcgccacaactcatcctaccgcagcagtgaagatgctgccgacttttgtccgttctacccctgacgggacagagcatggggagttcctcgctttagatctggggggcacaaacttccgcgtcttgtgggtaaaggtaactgataatgggctccagaaagttgaaatggagaatcagatttacgctatccccgaagacataatgcgcggctccggaacccagctgtttgaccacatcgcagaatgtctagccaactttatggataaactgcaaatcaaggacaaaaagcttccattgggatttactttcagcttcccttgtcaccagaccaaactcgacgaatcatttctggtgtcatggacaaagggttttaaaagctctggggttgagggacgtgatgtggtggcgctgatccgcaaagctatccagcggaggggagattttgatattgacatagtagccgtggtcaatgacacagttggcactatgatgacttgcggatatgacgatcacaactgtgaaatcgggcttatcgttgggacaggttccaacgcatgctacatggaggagatgcgacatatcgacatggtagaaggggatgaagggcggatgtgcatcaacatggaatggggggccttcggggacgacggatcactgaatgacatccgcaccgaattcgaccaggagatagatatgggttccctgaatcccggcaagcaactcttcgagaagatgatttctggcatgtatatgggggagttggtgcgcctcatcttggtgaagatggcaaaggaggaactcttatttggaggcaaactaagccccgagctgctgaataccggcagattcgaaactaaagacatctcagacatcgagggggaaaaggacggaatcaggaaggcccgcgaagtgcttatgcgcctaggcctggatcctacccaggaggactgtgtcgccacccaccgtatctgccagatcgtgtctaccagaagcgcctcattatgtgccgctacacttgccgctgttttacaaaggatcaaggaaaataaaggcgaggagagactcagatctactataggcgttgatggctccgtctataaaaagcatccacacttcgcaaagaggctgcataagactgtaaggaggttggttcctgggtgtgacgtcagattcttgcgctcggaggatggcagcgggaagggagccgctatggtaaccgcagtggcctacaggcttgctgaccagcatcgagcccgccagaagactcttgaacacttgcagttgagccatgaccaattgctggaggtcaagcggagaatgaaagtggagatggaaaggggcctctcaaaggagacccacgcctctgcgcccgtgaagatgcttccgacatatgtctgtgccaccccggacgggacagaaaaaggcgactttcttgctctcgatcttggaggtacaaacttcagggtgcttctggtccgggttcggaacgggaaatggggcggggtagagatgcataacaagatatacgctatcccccaagaggtcatgcacggtaccggggatgagttgtttgatcacatcgtccagtgtattgcggactttctggaatatatgggcatgaagggcgtctcactccccctgggattcacgttttcattcccatgccagcagaacagcctcgacgaatcaatacttctcaaatggactaagggtttcaaagcatcagggtgcgagggagaagacgttgtgaccctgctgaaggaagccatacatcgccgtgaggaatttgatctggacgttgtggctgttgtgaatgatacggtcgggactatgatgacctgtggcttcgaagaccctcattgtgaggtgggattgatcgttgggactgggtcgaacgcctgttacatggaggagatgcgtaacgtggaattggttgagggcgaagagggcaggatgtgtgtgaacatggaatggggtgcgtttggtgacaatggctgccttgacgacttccggaccgagttcgatgtcgcagtggatgaattaagtttgaatccgggcaagcagaggtttgaaaaaatgatcagcggcatgtatcttggagagatagtacggaacatcctcattgactttacaaaacgggggctcctgtttcgcggaaggatatcagagagactcaagactaggggcatttttgaaaccaagttcttatcacagatcgagtctgactgtctggcactccttcaagtcagagccatcttacagcatttggggctcgaaagcacatgtgacgactctataatcgtaaaagaagtgtgcacggtggttgcacgccgcgctgcacagctctgcggggctggcatggctgccgtggtggatcgaatacgagagaaccgcggacttgacgctctgaaggtgactgtcggcgtggacggcactctatataagctccaccctcacttcgctaaagtcatgcacgaaactgtaaaagatctagccccaaaatgcgacgtgtccttcctgcagtccgaggacggtagtgggaagggtgcggcgctcatcacagccgtggcatgtagaattagagaggctgggcagcggtag

SEQ ID NO: 3902 - DNA, 2754 bp, Artificial Sequence
  derived and/or modified sequence
atgatcgcatcccatctgctggcttatttctttacagaactcaatcacgatcaggtgcagaaagtggaccaatatctctaccacatgcgactgagtgatgaaactttattggaaatctctaagcggttccggaaggagatggaaaagggcctcggagccaccacccacccaaccgccgctgttaagatgctgcctacgttcgtccggtccaccccagatggcacagagcatggcgagtttctagccctcgatttgggcggtactaattttagggtgctgtgggtgaaagtgaccgataacgggctccagaaagtagaaatggaaaatcagatatacgcgatcccagaagacattatgaggggttcgggcacccaactctttgatcatattgcagagtgcctggctaacttcatggacaaactacagattaaggacaagaagttgcccctgggcttcactttttcctttccctgccaccaaacaaagctggacgaatcattcttagtcagctggacaaaaggttttaagtcatctggggttgagggtcgcgatgtggtggcattaattaggaaggctattcagagacggggagattttgacatcgatatagtggcagtggtaaatgacactgtgggcaccatgatgacttgcggatacgacgaccacaattgcgagattgggcttatagtcggcactggctccaacgcctgttatatggaagagatgagacatatcgacatggtcgaaggagacgagggcaggatgtgtattaatatggaatggggcgctttcggagacgatggaagcttgaatgatataaggacagagttcgaccaggaaattgatatggggtcgcttaatccaggcaagcagctgttcgaaaagatgatcagtggtatgtacatgggcgaattagtaagattgatcctggtgaagatggccaaggaagaactcttgttcggtgggaaactgtctcccgaactgcttaacaccggcaggtttgaaacaaaagacatcagcgacatcgaaggagagaaggacggtattaggaaagctagagaggtcctgatgcgactcggtctagaccccactcaggaggattgcgtcgccactcaccgaatctgccagatcgtctccaccagatctgcatccctctgtgccgcaacactggcggctgtacttcagcggattaaggaaaacaaaggagaggagagactgcgctccacgataggtgtggacggctcagtgtacaaaaaacatcctcatttcgccaagcgcctgcataagacagtgaggaggctggttcccggttgcgacgtgcgcttcctccgttccgaagatggctctgggaagggcgcagcaatggttacggctgtcgcttataggctcgcagaccagcatagagcaaggcagaaaactctggagcatttgcagctctcgcacgatcaattactcgaggtgaaaaggagaatgaaggtcgaaatggagaggggcttatcaaaggaaactcacgcctctgcccctgttaagatgttacctacttatgtttgcgccacacccgacgggaccgagaaaggggactttcttgctttggacttaggtggaactaacttcagggtcctgctggtcagggtcagaaacgggaagtgggggggagttgagatgcataataagatatatgctattccccaggaagtgatgcacggaacaggggatgaattatttgaccacatcgtgcagtgtattgcagattttttggagtacatgggtatgaagggagtgtcgctccctcttgggttcaccttctccttcccttgccagcagaactctctggatgagtcaatcctccttaaatggactaagggtttcaaagccagtggatgtgagggcgaagacgtggtaaccctgctgaaagaagccattcacaggcgcgaggaatttgatctggatgttgtcgcggtcgttaatgatacagtcggcactatgatgacatgcgggttcgaggacccccattgtgaggtgggtttaatagtcggtaccggatcaaacgcatgttacatggaggagatgaggaatgtcgaactagtggagggcgaagaggggagaatgtgcgtgaacatggaatggggtgcattcggggataacgggtgcctggatgattttagaaccgaattcgacgtggcggtggacgagctgagcctaaaccctggaaaacaacgctttgaaaaaatgatctcgggaatgtacctcggggaaatagtcaggaatatccttatagattttactaagcggggactgctgtttagaggcaggattagtgaacgcttgaagactagaggtatcttcgaaacgaagttcctgtcgcaaattgagtctgactgcctcgctttgctgcaggttagagctatcctgcaacacctggggttggaatcaacctgtgatgacagtataatcgttaaagaggtgtgtactgtggtagcgagaagagcggctcagttatgtggcgctggtatggctgctgtcgtcgatagaattagagagaatcggggactggatgctctcaaagtgaccgttggcgtggacggtactctatataaacttcacccgcactttgctaaagtgatgcacgagaccgtgaaggacctggcccctaagtgcgatgtgagcttcctccagtcagaagacgggtctggtaaaggagccgctctgattactgctgttgcttgccggatccgtgaagccggacagcgttag

SEQ ID NO: 3903 - DNA, 2670 bp, Artificial Sequence
  derived and/or modified sequence
atgcggctcagcgatgaaacactgctggaaattagcaaaaggttcagaaaggagatggagaagggtctcggcgctaccacacacccaaccgcggctgtgaagatgctcccgacatttgtgagatcaactccagacggaacagaacatggcgagtttctggccctagacctcggaggcactaactttagagtgctgtgggtgaaagtcaccgacaatggattgcagaaagtggagatggaaaatcagatatacgctatccccgaggacatcatgcgaggatccggcacacagctatttgatcacatagctgaatgtctggcgaacttcatggacaagctgcaaatcaaagacaaaaaactgcctctgggcttcaccttctcgttcccctgtcatcagacaaaattggacgagtcctttctggtgtcatggactaaaggctttaaatcatcaggtgtcgaaggacgcgatgtggtcgctctcatacgcaaggcaatccagcgtagaggcgactttgacattgatatcgtggcagtagttaacgataccgttgggacaatgatgacatgtggctacgacgatcataattgcgaaatcgggttaatcgtgggtaccggatccaacgcttgttacatggaggagatgcgtcacattgacatggttgagggcgatgaaggaagaatgtgtatcaatatggagtggggggctttcggagatgacggatctctgaatgatattcgcacagagtttgaccaggaaatcgacatggggtcacttaatccgggtaaacagctgtttgagaagatgatctctggtatgtatatgggagaattggtgagactcatcttagtgaagatggcaaaggaggaactgttgtttggaggtaagttgtccccggaactgcttaacaccggcagatttgagaccaaggacattagcgacatcgaaggagagaaggacggaatccgcaaggctcgcgaggtactgatgaggttgggcttagatccaacacaggaagattgtgtagctacacaccgcatctgtcagatcgtgagcacacggtccgcttctctttgcgctgcgacgcttgcagctgtgctccagcgcattaaagagaacaagggggaggagcgcttacgctccacaattggcgttgacggctccgtgtataagaaacatccccacttcgcaaagcggctgcataaaacagtgagacgccttgtgcccggatgcgacgtgcgattcttacggagcgaagacggaagtggtaaaggcgctgccatggtgactgctgtggcatatcggctggcagatcagcaccgggcaagacagaaaaccctagagcacctacaactctctcacgatcagcttttggaggtaaagcgccgtatgaaggtggagatggaacggggactgtctaaagaaacacacgccagtgcaccagtgaaaatgctgcccacatacgtatgtgccacccctgacggaacagaaaaaggtgattttctcgccctcgatctgggtggcaccaactttcgcgtcctgctggtccgggtacgcaatggtaagtgggggggtgtcgagatgcataataagatctatgccattcctcaggaagtgatgcatggcacaggcgatgagctgtttgaccacatagtccaatgcattgcggactttttggagtacatgggcatgaagggagtcagtctccccctgggctttacctttagttttccctgtcagcagaattcattggacgaatccatactattgaagtggactaagggatttaaggcgagcgggtgcgaaggagaggatgtggtcacactactgaaggaggctatccaccgccgagaggagttcgacctggacgttgtagcggtggtaaatgacactgtaggcaccatgatgacgtgcggctttgaagatcctcactgtgaggtaggactgattgtcgggactgggtcgaacgcttgttacatggaggagatgaggaacgtggagttggtggagggagaagaaggcagaatgtgcgtaaatatggagtggggggcttttggtgataacgggtgtctcgatgattttagaacagagtttgatgtggccgtggatgagctatcgctcaaccccggaaaacagcggtttgagaaaatgattagcggcatgtacttgggggagatagttcgcaacattctgattgatttcaccaagcgaggactcctgttccggggacggatttccgagaggcttaaaacccgaggaattttcgagacaaagtttttgtcccagatcgaaagtgattgcctggctttattgcaggtgcgagctatccttcagcatctagggctggaatctacctgcgatgatagtatcatcgtcaaggaagtctgtaccgttgtggcacggcgtgcagctcagctgtgcggagccggaatggcagccgttgttgatcgtatccgagaaaacagggggctggacgctctgaaggtgactgttggcgtggatgggactctgtataaactgcaccctcattttgctaaggtaatgcacgagactgtaaaagacttggctccaaagtgcgatgtttcattccttcagagtgaagatgggtcaggcaaaggagcggctcttatcaccgccgtcgcctgccggattagggaagcgggtcagcgatag

SEQ ID NO: 3904 - DNA, 2754 bp, Artificial Sequence
  derived and/or modified sequence
atgatagcgtcacacttgctggcttacttcttcacagaacttaatcatgatcaggttcagaaggtggatcagtatctgtatcatatgagactcagcgatgagaccctgctggagatttccaaaagattcagaaaggagatggaaaaaggactcggcgctacgactcaccctacagccgcagttaagatgctccccacttttgttcgatccacaccagatgggacagaacacggcgagtttctcgccctggacctgggaggtaccaactttagagtgctctgggtgaaagttacagacaatggcctgcagaaggtggagatggaaaatcagatttatgcaatcccagaggacatcatgcggggatccggcactcagctgttcgaccatatcgccgagtgcctggctaattttatggataaactccagattaaggataagaaactccctctgggctttacgttttctttcccctgccatcagactaaactggatgaaagcttcctggtgagttggaccaagggattcaagtcttctggcgtggagggtagagacgtcgtcgccctgatccgcaaagccatccagcgtcggggagattttgacatcgatattgtggccgtggtgaatgatacggtcggcacgatgatgacctgcggttatgacgatcacaattgtgaaatcggcctgatagtgggaactgggtccaacgcatgttatatggaggaaatgcggcatatcgacatggtggagggggacgagggcagaatgtgtatcaacatggaatggggtgcattcggagacgatgggtctctgaatgatattagaaccgagtttgatcaggaaatcgatatgggcagcctgaaccccggaaaacaattgttcgaaaagatgatctccggaatgtatatgggagagctcgtgaggcttattctggtgaaaatggccaaagaggaactgcttttcggcggaaaactgtctccggaactgcttaacaccggcaggtttgaaacaaaggatatttctgatattgaaggcgagaaggacggcatccgcaaagctcgggaagttttgatgcgtctgggattagatccaacacaagaggattgtgtagcaacacataggatttgtcagatcgtgtccaccaggtctgcaagcctgtgtgctgcaacccttgcagccgtactgcagcgtatcaaggagaataagggcgaggagcgccttaggtcaacgatcggggtcgacggctccgtgtataagaagcacccacattttgctaagcgactccataagaccgtaagaaggctcgttcccggatgcgatgtgcgtttccttcggtccgaggacggttctggtaagggggcagccatggtcaccgccgtggcatatagactcgccgaccagcaccgtgctcggcaaaagactttagagcatctgcagctgtcccacgatcagctgctggaagtgaaacgcaggatgaaagtggagatggaaaggggtctgagtaaggaaacccatgcatcagctcccgtgaaaatgctccctacatacgtgtgtgccacccctgatggaaccgagaaaggcgatttcttggcactggatttagggggaaccaatttcagggtgctgcttgttagagtaaggaatggaaagtggggaggcgttgagatgcataacaaaatatatgcaattccgcaggaggtgatgcatggaaccggcgatgaactctttgaccatatagtccagtgcattgctgattttcttgagtacatgggaatgaagggcgtcagtcttccattgggtttcacatttagttttccttgccaacagaattcactcgatgagtccattctgctgaaatggaccaaggggttcaaggcttctgggtgcgaaggcgaagacgtggtaaccttgctcaaggaggccattcaccgaagagaggaattcgacctcgatgtggtggcagtggtgaatgacaccgtgggaacgatgatgacctgcggcttcgaggacccgcactgtgaggttgggcttattgtgggcacgggaagcaacgcctgctacatggaagagatgagaaacgtcgaactggtggagggagaggaaggccgaatgtgcgtgaatatggaatggggcgctttcggagataacggttgccttgacgactttaggacagaatttgacgtggccgtagacgagttatcccttaaccctggcaaacagaggttcgaaaagatgatatccggaatgtaccttggtgaaatagtccggaacatactgattgattttacaaagaggggcctgcttttcagagggagaatctccgaacgactaaaaactcgcggaattttcgagacaaagttcttatcgcagattgagagtgactgtctggcattacttcaggtgagggccattctgcagcatctgggtctcgaatccacctgcgatgacagtatcattgtgaaggaggtgtgtaccgtcgtggctcggagggctgcgcagttgtgtggcgctggcatggcagcagtcgtcgataggattagagagaaccgcggtctggacgctctgaaggtgaccgtgggggtcgatggaaccctgtacaagcttcacccccattttgccaaagtcatgcatgagaccgtcaaggacctcgcccctaagtgcgacgtgtcgttcttgcagtcagaggatggcagcggtaagggcgcagccttgattaccgccgttgcttgccgcatccgcgaggccggacagcgatag

SEQ ID NO: 3905 - DNA, 2754 bp, Artificial Sequence
  derived and/or modified sequence
atgatcgccagccacctgctggcctacttcttcaccgagctgaaccacgaccaggtgcagaaggtggaccagtacctgtaccacatgagactgagcgacgagaccctgctggagatcagcaagagattcagaaaggagatggagaagggcctgggcgccaccacccaccccaccgccgccgtgaagatgctgcccaccttcgtgagaagcacccccgacggcaccgagcacggcgagttcctggccctggacctgggcggcaccaacttcagagtgctgtgggtgaaggtgaccgacaacggcctgcagaaggtggagatggagaaccagatctacgccatccccgaggacatcatgagaggcagcggcacccagctgttcgaccacatcgccgagtgcctggccaacttcatggacaagctgcagatcaaggacaagaagctgcccctgggcttcaccttcagcttcccctgccaccagaccaagctggacgagagcttcctggtgagctggaccaagggcttcaagagcagcggcgtggagggcagagacgtggtggccctgatcagaaaggccatccagagaagaggcgacttcgacatcgacatcgtggccgtggtgaacgacaccgtgggcaccatgatgacctgcggctacgacgaccacaactgcgagatcggcctgatcgtgggcaccggcagcaacgcctgctacatggaggagatgagacacatcgacatggtggagggcgacgagggcagaatgtgcatcaacatggagtggggcgccttcggcgacgacggcagcctgaacgacatcagaaccgagttcgaccaggagatcgacatgggcagcctgaaccccggcaagcagctgttcgagaagatgatcagcggcatgtacatgggcgagctggtgagactgatcctggtgaagatggccaaggaggagctgctgttcggcggcaagctgagccccgagctgctgaacaccggcagattcgagaccaaggacatcagcgacatcgagggcgagaaggacggcatcagaaaggccagagaggtgctgatgagactgggcctggaccccacccaggaggactgcgtggccacccacagaatctgccagatcgtgagcaccagaagcgccagcctgtgcgccgccaccctggccgccgtgctgcagagaatcaaggagaacaagggcgaggagagactgagaagcaccatcggcgtggacggcagcgtgtacaagaagcacccccacttcgccaagagactgcacaagaccgtgagaagactggtgcccggctgcgacgtgagattcctgagaagcgaggacggcagcggcaagggcgccgccatggtgaccgccgtggcctacagactggccgaccagcacagagccagacagaagaccctggagcacctgcagctgagccacgaccagctgctggaggtgaagagaagaatgaaggtggagatggagagaggcctgagcaaggagacccacgccagcgcccccgtgaagatgctgcccacctacgtgtgcgccacccccgacggcaccgagaagggcgacttcctggccctggacctgggcggcaccaacttcagagtgctgctggtgagagtgagaaacggcaagtggggcggcgtggagatgcacaacaagatctacgccatcccccaggaggtgatgcacggcaccggcgacgagctgttcgaccacatcgtgcagtgcatcgccgacttcctggagtacatgggcatgaagggcgtgagcctgcccctgggcttcaccttcagcttcccctgccagcagaacagcctggacgagagcatcctgctgaagtggaccaagggcttcaaggccagcggctgcgagggcgaggacgtggtgaccctgctgaaggaggccatccacagaagagaggagttcgacctggacgtggtggccgtggtgaacgacaccgtgggcaccatgatgacctgcggcttcgaggacccccactgcgaggtgggcctgatcgtgggcaccggcagcaacgcctgctacatggaggagatgagaaacgtggagctggtggagggcgaggagggcagaatgtgcgtgaacatggagtggggcgccttcggcgacaacggctgcctggacgacttcagaaccgagttcgacgtggccgtggacgagctgagcctgaaccccggcaagcagagattcgagaagatgatcagcggcatgtacctgggcgagatcgtgagaaacatcctgatcgacttcaccaagagaggcctgctgttcagaggcagaatcagcgagagactgaagaccagaggcatcttcgagaccaagttcctgagccagatcgagagcgactgcctggccctgctgcaggtgagagccatcctgcagcacctgggcctggagagcacctgcgacgacagcatcatcgtgaaggaggtgtgcaccgtggtggccagaagagccgcccagctgtgcggcgccggcatggccgccgtggtggacagaatcagagagaacagaggcctggacgccctgaaggtgaccgtgggcgtggacggcaccctgtacaagctgcacccccacttcgccaaggtgatgcacgagaccgtgaaggacctggcccccaagtgcgacgtgagcttcctgcagagcgaggacggcagcggcaagggcgccgccctgatcaccgccgtggcctgcagaatcagagaggccggccagagatag

SEQ ID NO: 3906 - DNA, 2670 bp, Artificial Sequence
  derived and/or modified sequence
atgagactgagcgacgagaccctgctggagatcagcaagagattcagaaaggagatggagaagggcctgggcgccaccacccaccccaccgccgccgtgaagatgctgcccaccttcgtgagaagcacccccgacggcaccgagcacggcgagttcctggccctggacctgggcggcaccaacttcagagtgctgtgggtgaaggtgaccgacaacggcctgcagaaggtggagatggagaaccagatctacgccatccccgaggacatcatgagaggcagcggcacccagctgttcgaccacatcgccgagtgcctggccaacttcatggacaagctgcagatcaaggacaagaagctgcccctgggcttcaccttcagcttcccctgccaccagaccaagctggacgagagcttcctggtgagctggaccaagggcttcaagagcagcggcgtggagggcagagacgtggtggccctgatcagaaaggccatccagagaagaggcgacttcgacatcgacatcgtggccgtggtgaacgacaccgtgggcaccatgatgacctgcggctacgacgaccacaactgcgagatcggcctgatcgtgggcaccggcagcaacgcctgctacatggaggagatgagacacatcgacatggtggagggcgacgagggcagaatgtgcatcaacatggagtggggcgccttcggcgacgacggcagcctgaacgacatcagaaccgagttcgaccaggagatcgacatgggcagcctgaaccccggcaagcagctgttcgagaagatgatcagcggcatgtacatgggcgagctggtgagactgatcctggtgaagatggccaaggaggagctgctgttcggcggcaagctgagccccgagctgctgaacaccggcagattcgagaccaaggacatcagcgacatcgagggcgagaaggacggcatcagaaaggccagagaggtgctgatgagactgggcctggaccccacccaggaggactgcgtggccacccacagaatctgccagatcgtgagcaccagaagcgccagcctgtgcgccgccaccctggccgccgtgctgcagagaatcaaggagaacaagggcgaggagagactgagaagcaccatcggcgtggacggcagcgtgtacaagaagcacccccacttcgccaagagactgcacaagaccgtgagaagactggtgcccggctgcgacgtgagattcctgagaagcgaggacggcagcggcaagggcgccgccatggtgaccgccgtggcctacagactggccgaccagcacagagccagacagaagaccctggagcacctgcagctgagccacgaccagctgctggaggtgaagagaagaatgaaggtggagatggagagaggcctgagcaaggagacccacgccagcgcccccgtgaagatgctgcccacctacgtgtgcgccacccccgacggcaccgagaagggcgacttcctggccctggacctgggcggcaccaacttcagagtgctgctggtgagagtgagaaacggcaagtggggcggcgtggagatgcacaacaagatctacgccatcccccaggaggtgatgcacggcaccggcgacgagctgttcgaccacatcgtgcagtgcatcgccgacttcctggagtacatgggcatgaagggcgtgagcctgcccctgggcttcaccttcagcttcccctgccagcagaacagcctggacgagagcatcctgctgaagtggaccaagggcttcaaggccagcggctgcgagggcgaggacgtggtgaccctgctgaaggaggccatccacagaagagaggagttcgacctggacgtggtggccgtggtgaacgacaccgtgggcaccatgatgacctgcggcttcgaggacccccactgcgaggtgggcctgatcgtgggcaccggcagcaacgcctgctacatggaggagatgagaaacgtggagctggtggagggcgaggagggcagaatgtgcgtgaacatggagtggggcgccttcggcgacaacggctgcctggacgacttcagaaccgagttcgacgtggccgtggacgagctgagcctgaaccccggcaagcagagattcgagaagatgatcagcggcatgtacctgggcgagatcgtgagaaacatcctgatcgacttcaccaagagaggcctgctgttcagaggcagaatcagcgagagactgaagaccagaggcatcttcgagaccaagttcctgagccagatcgagagcgactgcctggccctgctgcaggtgagagccatcctgcagcacctgggcctggagagcacctgcgacgacagcatcatcgtgaaggaggtgtgcaccgtggtggccagaagagccgcccagctgtgcggcgccggcatggccgccgtggtggacagaatcagagagaacagaggcctggacgccctgaaggtgaccgtgggcgtggacggcaccctgtacaagctgcacccccacttcgccaaggtgatgcacgagaccgtgaaggacctggcccccaagtgcgacgtgagcttcctgcagagcgaggacggcagcggcaagggcgccgccctgatcaccgccgtggcctgcagaatcagagaggccggccagagatag

SEQ ID NO: 3907 - protein, 344 aa, Artificial Sequence
  derived and/or modified sequence
MRVIRVGTRKSQLARIQTDSVVATLKASYPGLQFEIIAMSTTGDKILDTALSKIGEKSLFTKELEHALEKNEVDLVVHSLKDLPTVLPPGFTIGAICKRENPHDAVVFHPKFVGKTLETLPEKSVVGTSSLRRAAQLQRKFPHLEFRSIRGNLNTRLRKLDEQQEFSAIILATAGLQRMGWHNRVGQILHPEECMYAVGQGALGVEVRAKDQDILDLVGVLHDPETLLRCIAERAFLRHLEGGCSVPVAVHTAMKDGQLYLTGGVWSLDGSDSIQETMQATIHVPAQHEDGPEDDPQLVGITARNIPRGPQLAAQNLGISLANLLLSKGAKNILDVARQLNDAH

SEQ ID NO: 3908 - protein, 361 aa, Artificial Sequence [sequence omitted]

SEQ ID NO: 3909 - DNA, 1411 bp, Artificial Sequence
  derived and/or modified sequence
agtgtcctggttactgcagcggcagcaacagcaggtcctactatcgcctccctctagtctctgcttctctggatccctgaggagggcagaaggaagaaaacagcccaaagatgagagtgattcgcgtgggtacccgcaagagccagcttgctcgcatacagacggacagtgtggtggcaacattgaaagcctcgtaccctggcctgcagtttgaaatcattgctatgtccaccacaggggacaagattcttgatactgcactctctaagattggagagaaaagcctgtttaccaaggagcttgaacatgccctggagaagaatgaagtggacctggttgttcactccttgaaggacctgcccactgtgcttcctcctggcttcaccatcggagccatctgcaagcgggaaaaccctcatgatgctgttgtctttcacccaaaatttgttgggaagaccctagaaaccctgccagagaagagtgtggtgggaaccagctccctgcgaagagcagcccagctgcagagaaagttcccgcatctggagttcaggagtattcggggaaacctcaacacccggcttcggaagctggacgagcagcaggagttcagtgccatcatcctggcaacagctggcctgcagcgcatgggctggcacaaccgggtggggcagatcctgcaccctgaggaatgcatgtatgctgtgggccagggggccttgggcgtggaagtgcgagccaaggaccaggacatcttggatctggtgggtgtgctgcacgatcccgagactctgcttcgctgcatcgctgaaagggccttcctgaggcacctggaaggaggctgcagtgtgccagtagccgtgcatacagctatgaaggatgggcaactgtacctgactggaggagtctggagtctagacggctcagatagcatacaagagaccatgcaggctaccatccatgtccctgcccagcatgaagatggccctgaggatgacccacagttggtaggcatcactgctcgtaacattccacgagggccccagttggctgcccagaacttgggcatcagcctggccaacttgttgctgagcaaaggagccaaaaacatcctggatgttgcacggcagcttaacgatgcccattaactggtttgtggggcacagatgcctgggttgctgctgtccagtgcctacatcccgggcctcagtgccccattctcactgctatctggggagtgattaccccgggagactgaactgcagggttcaagccttccagggatttgcctcaccttggggccttgatgactgccttgcctcctcagtatgtgggggcttcatctctttagagaagtccaagcaacagcctttgaatgtaaccaatcctactaataaaccagttctgaaggtgt

SEQ ID NO: 3910 - DNA, 1086 bp, Artificial Sequence
  derived and/or modified sequence
atgagcggcaacggcaatgcagccgcgacggccgaagaaaactccccaaagatgcgcgtgatccgcgtggggacccgcaagagccaactggccagaatccagaccgactccgttgtagctacacttaaagcctcatatcctggcctgcagttcgaaatcatcgccatgtccaccaccggtgataaaatcctggacaccgcgctatccaagattggcgaaaaatcattgtttacgaaggaactggagcacgctctcgaaaagaatgaggtcgatttggtggtgcatagcctgaaagacctgcctaccgtgctgccaccaggttttaccattggcgcaatatgtaagcgcgagaaccctcacgacgccgtcgtgtttcatcccaagtttgtgggtaagacacttgagactctgcctgagaaaagtgtcgtggggactagcagcctgcgtcgcgcggcccaactgcagcgcaagtttccgcacttggaatttcgaagtatcagaggtaatctgaataccagactgcgcaaacttgatgaacagcaggagttctcagccattatcctggctactgccgggttgcagcggatgggctggcacaacagagtgggtcagattctgcatccggaagagtgcatgtatgcagttggacaaggggccctgggcgttgaggtcagagcaaaggaccaggatattctggatctggtcggagtacttcatgaccccgagactctgttgaggtgcatagcagaaagagcctttcttcgacatcttgagggtgggtgttccgtgcctgtggctgtgcataccgccatgaaggacgggcaactgtatctaacgggcggcgtctggagtctggacggatctgatagtattcaggagaccatgcaggccaccattcacgttcccgcccagcacgaggatggccccgaagatgacccccagctcgtgggtatcactgctcggaacattccccgtggcccgcagttggcagcccagaacctcggaatttccctggccaacctcctgctgagcaaaggcgccaaaaatatcttggacgtggctcggcagttaaacgacgctcattag

SEQ ID NO: 3911 - DNA, 1501 bp, Artificial Sequence
  derived and/or modified sequence
gtgacgcgaggctctgcggagaccaggagtcagactgtaggacgacctcgggtcccacgtgtccccggtactcgccggccggagcccccggcttcccggggccgggggaccttagcggcacccacacacagcctactttccaagcggagccatgtctggtaacggcaatgcggctgcaacggcggaagaaaacagcccaaagatgagagtgattcgcgtgggtacccgcaagagccagcttgctcgcatacagacggacagtgtggtggcaacattgaaagcctcgtaccctggcctgcagtttgaaatcattgctatgtccaccacaggggacaagattcttgatactgcactctctaagattggagagaaaagcctgtttaccaaggagcttgaacatgccctggagaagaatgaagtggacctggttgttcactccttgaaggacctgcccactgtgcttcctcctggcttcaccatcggagccatctgcaagcgggaaaaccctcatgatgctgttgtctttcacccaaaatttgttgggaagaccctagaaaccctgccagagaagagtgtggtgggaaccagctccctgcgaagagcagcccagctgcagagaaagttcccgcatctggagttcaggagtattcggggaaacctcaacacccggcttcggaagctggacgagcagcaggagttcagtgccatcatcctggcaacagctggcctgcagcgcatgggctggcacaaccgggtggggcagatcctgcaccctgaggaatgcatgtatgctgtgggccagggggccttgggcgtggaagtgcgagccaaggaccaggacatcttggatctggtgggtgtgctgcacgatcccgagactctgcttcgctgcatcgctgaaagggccttcctgaggcacctggaaggaggctgcagtgtgccagtagccgtgcatacagctatgaaggatgggcaactgtacctgactggaggagtctggagtctagacggctcagatagcatacaagagaccatgcaggctaccatccatgtccctgcccagcatgaagatggccctgaggatgacccacagttggtaggcatcactgctcgtaacattccacgagggccccagttggctgcccagaacttgggcatcagcctggccaacttgttgctgagcaaaggagccaaaaacatcctggatgttgcacggcagcttaacgatgcccattaactggtttgtggggcacagatgcctgggttgctgctgtccagtgcctacatcccgggcctcagtgccccattctcactgctatctggggagtgattaccccgggagactgaactgcagggttcaagccttccagggatttgcctcaccttggggccttgatgactgccttgcctcctcagtatgtgggggcttcatctctttagagaagtccaagcaacagcctttgaatgtaaccaatcctactaataaaccagttctgaaggt

SEQ ID NO: 3912 - DNA, 1548 bp, Artificial Sequence
  derived and/or modified sequence
ccaggagtcagactgtaggacgacctcgggtcccacgtgtccccggtactcgccggccggagcccccggcttcccggggccgggggaccttagcggcacccacacacagcctactttccaagcggagccatgtctggtaacggcaatgcggctgcaacggcgtcattccagagccctggactaggagtaggaagatctgaattgtggccccaactctctttcggttattagctctgtgaccctaggaagaaaacagcccaaagatgagagtgattcgcgtgggtacccgcaagagccagcttgctcgcatacagacggacagtgtggtggcaacattgaaagcctcgtaccctggcctgcagtttgaaatcattgctatgtccaccacaggggacaagattcttgatactgcactctctaagattggagagaaaagcctgtttaccaaggagcttgaacatgccctggagaagaatgaagtggacctggttgttcactccttgaaggacctgcccactgtgcttcctcctggcttcaccatcggagccatctgcaagcgggaaaaccctcatgatgctgttgtctttcacccaaaatttgttgggaagaccctagaaaccctgccagagaagagtgtggtgggaaccagctccctgcgaagagcagcccagctgcagagaaagttcccgcatctggagttcaggagtattcggggaaacctcaacacccggcttcggaagctggacgagcagcaggagttcagtgccatcatcctggcaacagctggcctgcagcgcatgggctggcacaaccgggtggggcagatcctgcaccctgaggaatgcatgtatgctgtgggccagggggccttgggcgtggaagtgcgagccaaggaccaggacatcttggatctggtgggtgtgctgcacgatcccgagactctgcttcgctgcatcgctgaaagggccttcctgaggcacctggaaggaggctgcagtgtgccagtagccgtgcatacagctatgaaggatgggcaactgtacctgactggaggagtctggagtctagacggctcagatagcatacaagagaccatgcaggctaccatccatgtccctgcccagcatgaagatggccctgaggatgacccacagttggtaggcatcactgctcgtaacattccacgagggccccagttggctgcccagaacttgggcatcagcctggccaacttgttgctgagcaaaggagccaaaaacatcctggatgttgcacggcagcttaacgatgcccattaactggtttgtggggcacagatgcctgggttgctgctgtccagtgcctacatcccgggcctcagtgccccattctcactgctatctggggagtgattaccccgggagactgaactgcagggttcaagccttccagggatttgcctcaccttggggccttgatgactgccttgcctcctcagtatgtgggggcttcatctctttagagaagtccaagcaacagcctttgaatgtaaccaatcctactaataaa

SEQ ID NO: 3913 - DNA, 1559 bp, Artificial Sequence
  derived and/or modified sequence
gacgcgaggctctgcggagaccaggagtcagactgtaggacgacctcgggtcccacgtgtccccggtactcgccggccggagcccccggcttcccggggccgggggaccttagcggcacccacacacagcctactttccaagcggagccatgtctggtaacggcaatgcggctgcaacggcggtgagtgctgagccggtgaccagcacactttgggcttctggacgagccgtgcagcgattggccccaggttgccatcctcagtcgtctattggaagaaaacagcccaaagatgagagtgattcgcgtgggtacccgcaagagccagcttgctcgcatacagacggacagtgtggtggcaacattgaaagcctcgtaccctggcctgcagtttgaaatcattgctatgtccaccacaggggacaagattcttgatactgcactctctaagattggagagaaaagcctgtttaccaaggagcttgaacatgccctggagaagaatgaagtggacctggttgttcactccttgaaggacctgcccactgtgcttcctcctggcttcaccatcggagccatctgcaagcgggaaaaccctcatgatgctgttgtctttcacccaaaatttgttgggaagaccctagaaaccctgccagagaagagtgtggtgggaaccagctccctgcgaagagcagcccagctgcagagaaagttcccgcatctggagttcaggagtattcggggaaacctcaacacccggcttcggaagctggacgagcagcaggagttcagtgccatcatcctggcaacagctggcctgcagcgcatgggctggcacaaccgggtggggcagatcctgcaccctgaggaatgcatgtatgctgtgggccagggggccttgggcgtggaagtgcgagccaaggaccaggacatcttggatctggtgggtgtgctgcacgatcccgagactctgcttcgctgcatcgctgaaagggccttcctgaggcacctggaaggaggctgcagtgtgccagtagccgtgcatacagctatgaaggatgggcaactgtacctgactggaggagtctggagtctagacggctcagatagcatacaagagaccatgcaggctaccatccatgtccctgcccagcatgaagatggccctgaggatgacccacagttggtaggcatcactgctcgtaacattccacgagggccccagttggctgcccagaacttgggcatcagcctggccaacttgttgctgagcaaaggagccaaaaacatcctggatgttgcacggcagcttaacgatgcccattaactggtttgtggggcacagatgcctgggttgctgctgtccagtgcctacatcccgggcctcagtgccccattctcactgctatctggggagtgattaccccgggagactgaactgcagggttcaagccttccagggatttgcctcaccttggggccttgatgactgccttgcctcctcagtatgtgggggcttcatctctttagagaagtccaagcaacagcctttgaatgtaa

SEQ ID NO: 3914 - DNA, 1086 bp, Artificial Sequence
  derived and/or modified sequence
atgtctggaaatggaaatgctgctgccacagctgaggagaacagccccaagatgagggtcatccgggtgggcaccaggaagagccagctggcccgcatccagacagattctgtggtggccaccctgaaggccagctacccaggcctgcagtttgagatcatcgccatgagcaccactggagacaagatcctggacacagccctgagcaagattggagagaagagcctcttcaccaaggagctggagcacgccctggagaagaatgaggtggacctggtggtgcacagcctgaaggacctgcccaccgtgctgcccccaggcttcaccatcggggccatctgcaagcgggagaacccccatgatgctgtggtgttccaccccaagtttgtgggcaagaccctggagaccctgcctgagaagtctgtggtgggcaccagcagcctgcggcgggccgcccagctgcagaggaagttcccccacctggagttccgcagcatccggggcaacctgaacacccggctgaggaagctggatgagcagcaggagttcagcgccatcatcctggccacagctggcctgcagaggatgggctggcacaacagagtgggccagatcctgcaccctgaggagtgcatgtatgctgtgggccagggcgccctgggcgtggaggtgcgggccaaggaccaggacatcctggacctggtgggcgtgctgcatgaccctgagaccctgctgcgctgcatcgccgagcgggccttcctgcggcacctggagggcggctgcagcgtgcctgtggccgtgcacacagccatgaaggatggccagctgtacctgactggaggagtgtggagcctggatggcagtgacagcatccaggagaccatgcaggccaccatccacgtgcctgcccagcatgaagatggcccagaagatgacccccagctggtgggcatcacagccaggaacatcccccggggcccccagctggccgcccagaacctgggcatcagcctggccaacctgctgctgagcaaaggagccaagaacatcctggatgtggcccggcagctgaatgatgcccactag

SEQ ID NO: 3915 - DNA, 1086 bp, Artificial Sequence
  derived and/or modified sequence
atgagcggcaacggcaacgccgccgccaccgccgaggagaacagccccaaaatgagggtcatcagggtgggaactagaaagagccaactcgctaggattcagactgacagtgttgtggccactctaaaggcctcttatcccggactccagttcgagatcattgctatgagtacaacaggggacaaaattttagacactgccctctccaagatcggcgagaaaagcctttttaccaaggaactggaacacgctcttgagaagaatgaggtggatttggtggtgcacagtttaaaagatctacccaccgtgcttcccccaggattcaccattggggcgatctgcaaaagggagaacccccacgatgcagtggtttttcacccaaagttcgtgggcaaaaccttggagacactaccggagaagtctgtggtcgggacgtccagtttgcggcgggccgcacaactccagagaaagtttccccatttagagtttaggtcaatccgcgggaacctaaacactaggttgcgaaagctggatgagcagcaggagttctccgctataatactcgctacagctgggcttcagcgaatgggttggcataatcgggtgggccaaattctccacccagaggagtgtatgtacgccgtcggccaaggcgccttgggcgtcgaggtgagagccaaagaccaagacatccttgatcttgtaggcgtgctgcacgacccggagactctgttgcggtgcatagccgagcgggcttttctcaggcatttggagggcgggtgtagcgtcccggtcgcggtgcacactgctatgaaagacgggcaactatatttgaccgggggcgtctggtctctggacgggtccgattctatccaagagacaatgcaggcgacaatacatgttcctgcacagcacgaagacggaccagaggatgatccgcaactggtgggcatcaccgctaggaacattccacgtgggcctcagctcgctgcgcaaaacctggggatttcgctcgccaaccttctgctgtctaaaggtgctaaaaatatactagatgtggcccgccagctaaatgacgcacattag

SEQ ID NO: 3916 - DNA, 1086 bp, Artificial Sequence
  derived and/or modified sequence
atgagcggaaacggcaatgccgctgccactgctgaggaaaattctcccaagatgcgggttatccgggtcgggactcgcaagagtcaattagctcggattcagactgacagcgtagtggcaacccttaaggcctcctacccaggacttcagttcgagatcattgccatgtctacaactggcgataaaatcttagacacagccttatcgaagatcggcgaaaagagcctattcacgaaggagcttgagcacgcacttgaaaagaatgaggtggatctggtggtacacagcctgaaggatctgccaacagtcttgcctcctggatttacgattggcgcaatatgtaagcgggaaaatccacacgatgctgttgttttccacccaaagttcgttggtaaaacgctcgagactttgcctgagaagtcagtggtgggaacaagtagcctgcgccgagccgctcagcttcaaaggaagtttccccacttggaattcaggagcatacggggaaacctcaatacacgccttcggaagctggacgagcagcaagaattttctgcaattatacttgctaccgctggcctccagaggatgggctggcacaacagagtcgggcaaatcctgcacccagaggaatgcatgtatgctgtgggacagggagcactgggagtggaggtacgggctaaggatcaggacatcctcgacctcgtgggggtgctgcatgatccggagactctgctcagatgcattgccgagcgggcatttctgagacatctggagggcggttgcagcgtgcccgtggcagtacacactgctatgaaggatggccaactttatctgactggcggtgtttggtctcttgacggatcagattctattcaagaaactatgcaagcaactatacacgtgcccgctcagcacgaggacgggccagaggacgaccctcagctcgtcggaataacagctcgtaacatcccacggggaccacagctggcagcacagaacctgggaatcagcctggccaatctgctgctgagtaaaggtgctaagaacatcctggatgtagccaggcagttgaatgatgctcactag

SEQ ID NO: 3917 - DNA, 1083 bp, Artificial Sequence
  derived and/or modified sequence
atgtccggcaacggaaacgccgcagcaaccgccgaggaaaactcacccaagatgcgggtgatacgcgtgggcacgcggaagagccagctggcccggatccagactgactccgtggttgcgactctcaaagctagctaccccggccttcagttcgaaatcattgcgatgtcaaccactggcgacaagattctggacaccgcgctgtcgaagatcggagaaaagtcgctgttcaccaaggagttggagcacgctctcgaaaagaatgaagtcgacctggtggtgcacagcctcaaggacctgccaaccgtcctcccaccgggattcaccatcggggccatttgtaagagggagaaccctcacgatgcagtggtgttccaccccaagtttgtgggcaagactctcgaaaccttgccggagaaatcggttgtgggaacttcaagcctgcgccgcgcggcacaactgcaaaggaaatttccacatctggagttccgttcgatcagaggaaaccttaatacgcggctgcggaagctcgacgagcagcaggaattcagcgcgatcatcctggcgactgcgggcctgcagcgcatgggttggcataaccgggtgggacagatcttgcaccccgaagagtgcatgtacgcggtcggacagggagccctcggagtggaggtccgcgcgaaggaccaggacatcttggatctcgtcggagtgctccacgatccagaaactctgttgagatgcatagctgaacgagcgttcctgcgccacctggagggcggttgttcagttccagtggctgtgcacacggctatgaaggacgggcagttgtacctgaccggcggagtgtggagcctggacggatcagattcgatccaggagactatgcaggctactatccatgtgccagcccagcacgaagatggccctgaggatgacccccaactggtggggatcaccgcacgcaatatcccgagggggccgcagctggccgcccaaaacctcggaattagcctcgcgaatctgctcctgagcaagggagccaaaaacattttggacgtggcccgccaactgaatgacgcccat

SEQ ID NO: 3918 - DNA, 1083 bp, Artificial Sequence
  derived and/or modified sequence
atgtcgggaaacggaaacgcagccgcaactgcagaagagaacagcccgaagatgagagtgatccgcgtgggcacgcgcaagtcgcagctggcaagaatccagacggactccgtggtggctaccctcaaggcgtcctacccggggctgcaattcgagatcatcgcgatgtccactaccggagacaaaatcttggacaccgccctctcaaagatcggagagaaatcgcttttcaccaaggaactcgaacatgcccttgagaaaaatgaggtcgatctcgtggtgcactccctgaaggatctcccgactgtgctgccaccaggcttcactatcggagccatttgcaagcgtgaaaacccccatgatgccgtggtgtttcacccgaagttcgtgggaaagaccttggaaacgctgccggaaaaatcagtggtgggaaccagctcgctccgccgcgctgcacagcttcaaaggaagttcccgcacctggagttccgctccattagaggaaatctgaacactaggctgagaaagctggacgaacaacaagaatttagtgcaattatcctcgctactgcggggctccagcgcatgggctggcataatagagtcggtcagattctgcatccagaagagtgcatgtacgcggtgggacagggagcgctgggcgtggaggtgcgcgctaaagatcaagatatcctggacctggtcggcgttttgcacgacccggaaaccctgctccggtgtatcgcagagagggcattcttgcggcacctcgaaggggggtgttctgttcccgtcgccgtgcacacggcaatgaaggacggtcagctgtaccttaccggcggagtttggagcctggacggatcggatagcatccaggagactatgcaggcaaccatccatgtgcctgcccagcacgaggacggacctgaggacgatcctcagctggtaggcatcactgcaaggaacatcccgcgtggaccacagctggccgctcaaaatctgggaatttctctggcgaatcttctcctttccaagggtgcgaaaaacatcttggacgtagcccggcaactcaacgatgctcac

SEQ ID NO: 3919 - DNA, 1083 bp, Artificial Sequence
  derived and/or modified sequence
atgtcaggtaatgggaacgcggcagcgaccgctgaagaaaactccccgaagatgagggtaattcgcgtcggaacccggaaatcccagctggcgcggatccagactgactccgtggttgccaccctcaaggcatcataccctggcttgcagtttgagatcatcgcaatgtccactaccggcgacaaaatcctcgacacggcgctgtcaaagataggagagaaaagcctgttcactaaagaattggaacacgcgctggagaagaatgaagtcgacctcgtggtgcattcgcttaaggacttgcctactgtcctgccgcccggttttactatcggcgccatctgcaaacgtgaaaacccacacgacgcagtggtgtttcacccgaagtttgtgggaaagacccttgaaactttgccagaaaagagcgtcgtcggaaccagcagcctgagacgggctgcccaattgcaaaggaagttcccgcatctcgaattccgctccatccggggcaacctgaacacgcggctgcgcaagttggatgaacaacaggagttctcagcgatcattctggcgaccgcaggtctgcaacgaatgggatggcataatcgcgtgggacaaattcttcacccagaggagtgcatgtacgccgtaggacagggagctctgggcgtggaagtgcgagctaaagaccaggacatcctcgacctggtgggggtcctccatgatccggagacgctcctgcgctgtatcgcagagagagcgttcctccgccatctggaggggggatgcagcgtgccagtggccgtccacactgccatgaaagatggacagctctaccttaccggaggtgtgtggtccctggacggttcagattcaatccaagagactatgcaggctactatccacgttccggctcaacacgaggacggaccggaagatgatccgcaacttgtcggaattacggcacgcaatatcccgagagggccccaattggctgcccagaatcttggaatcagtctggccaacctcctgctgtctaagggagcgaagaacatcttggacgtcgccagacagctgaatgatgctcac

SEQ ID NO: 3920 - DNA, 1083 bp, Artificial Sequence
  derived and/or modified sequence
atgagcgggaatggtaacgccgcagccactgctgaagaaaactcgcccaaaatgagagtgataagggtgggcactcgcaaaagccaactcgctcgtattcagactgattcagtggtggcaacactgaaggcaagttatccggggctgcagtttgagatcattgccatgagcaccaccggagataagattcttgatacagctctaagtaagattggtgagaagagcctgttcaccaaggaactagagcacgcactggagaagaatgaggtagacctagttgttcactcactaaaagatctcccaactgtcctgccgcccggatttactatcggagctatatgcaagcgggagaatccccacgatgctgttgtgttccaccctaagtttgtcggaaaaaccctggaaacgctgcccgaaaagagcgtggttggaacatctagcctgcgcagagcggctcagcttcaacgcaaattcccacaccttgagttcagaagcattagaggcaatctgaatacccggctccgaaaattagatgagcagcaggaattttctgctattatcctggctactgctggactgcagaggatggggtggcacaatcgagtcggccagatactccatccagaggaatgtatgtacgcagtagggcagggcgcccttggagttgaagtgcgggcgaaggatcaggatattctggacctagtaggggtgttgcacgatcccgagacccttctaagatgcatagctgaacgtgccttccttcgccatctggagggggggtgttcggtccccgtcgcagtgcacaccgcgatgaaagatggtcaattatacttaacagggggcgtgtggagtctcgacggctctgacagcattcaggagaccatgcaagccactatccatgtccccgcgcaacacgaagatggaccagaggatgatccccaactggtcggaattacagctagaaacatccctaggggaccccagctcgctgcccaaaacttaggcatatcactcgccaatctgctgttgtctaaaggtgccaagaatattctggacgtggcccggcagctgaatgatgcgcat

SEQ ID NO: 3921 - DNA, 1083 bp, Artificial Sequence
  derived and/or modified sequence
atgtcgggaaatggaaacgctgctgcaaccgccgaagaaaactcgccgaaaatgagagtgatcagagtcggaactaggaagtcccagctcgcgcgcatccaaaccgacagcgtggtggcaacgctcaaggcgtcgtacccaggattgcaattcgaaatcatcgctatgagcactactggggacaagatccttgataccgcgctgtcgaagatcggagaaaagtccctgtttactaaggaactggaacatgcactggaaaagaacgaggtggacctggtcgtccactcactgaaggacctgccgaccgtgctcccgccgggattcacgatcggggcgatctgtaaacgcgaaaatccgcatgatgccgtggtgttccacccaaagttcgttggcaaaaccctcgagactctcccagagaagtccgtcgtggggacctcatcgctcaggcgggccgcccagctgcagcgcaagtttccgcacttggaattcagatccattcggggaaacctgaatactcggctgcgcaagctggacgagcagcaggaattttctgcgatcatcctcgctaccgcgggacttcagcggatgggatggcataaccgcgtgggacaaatactgcatcctgaggaatgcatgtacgccgtgggccaaggagcgctgggtgtcgaggtgcgggccaaagatcaggatattctggatttggtgggcgtgctgcacgaccctgaaactctcctgaggtgcatcgctgagcgcgccttcctccgccaccttgagggaggttgcagtgtcccagtcgcagtgcacaccgcgatgaaagacggacaactttacctgaccggcggagtgtggagcctcgacgggagcgattccatccaagagactatgcaggccacgatccacgttcctgcacaacatgaggatggcccggaggacgacccccagttggtgggcattaccgcccggaatatccccagaggcccacagctcgccgcccagaacctgggtatttcactggccaatcttctcctgtcgaagggtgcaaaaaacatcctggacgtcgcccgacagctgaacgatgctcac

SEQ ID NO: 3922 - DNA, 1083 bp, Artificial Sequence
  derived and/or modified sequence
atgtctggaaatgggaacgccgcagctaccgccgaggagaactcacctaaaatgagagtaatccgcgtgggtaccaggaagagccaattggctcgaattcagacggattcggtggtggccacgctgaaagcctcttaccctggcctgcagttcgagattatagccatgtcaaccacgggggacaaaatcctcgacactgctctgagcaaaattggggagaagagtctgtttaccaaagagctagagcacgcattagaaaaaaacgaagtggacctggtagtgcattccctgaaagacctacctactgtgctgccgcccggttttacgattggcgcgatctgcaaacgagagaacccgcacgatgctgttgtgtttcacccaaaattcgtggggaaaaccctagagacgctgccggagaagagcgtagtgggtacctctagccttcggagagctgcgcagctgcagaggaaattcccccacctggagtttcgatcaataagaggtaatctcaacacacgactcaggaagctcgacgaacagcaggagttcagcgccatcatactcgccaccgccgggctgcagcgcatggggtggcacaatcgtgtggggcagatcttacacccagaagagtgtatgtacgctgtcggccaaggcgctttgggagtggaggtgagagctaaggatcaggacatcctcgacctagtaggggtgcttcacgatcccgaaaccttgctgagatgcatagccgaacgggcatttttacgccatttggaaggcggctgtagtgtgcccgtcgcagttcataccgccatgaaagatggtcagctgtacctgaccggtggtgtctggtccctggatggttccgacagtattcaagaaacgatgcaggctaccatccacgtccccgctcagcacgaagatggacctgaggatgacccccagttagtgggtatcaccgctcgcaatattcctcgaggccctcaactcgcagcccagaacctaggtatctccctggccaacctgctactcagcaagggcgccaaaaacatcctagacgtggcgcgccaattaaatgatgcccat

SEQ ID NO: 3923 - DNA, 1083 bp, Artificial Sequence
  derived and/or modified sequence
atgtcgggcaatggtaacgccgccgctaccgccgaggaaaattcgcctaaaatgcgtgtgatccgtgtggggaccagaaagagccagctggcacgcatccagacagactctgtggtagcgactctgaaagccagctatcctggactccaattcgagatcattgctatgagcaccacaggagacaagatccttgacacagcgctatccaaaatcggcgaaaaatcactttttactaaagagctcgagcatgctcttgaaaagaacgaggtcgacctggttgtccacagtctgaaggacctccctactgttctgccgccagggtttaccattggagctatttgtaagcgggaaaatccccatgatgccgtcgtgttccatcctaagtttgtgggcaagactctcgagacactgccagagaaatctgtagtcggaacatcttcccttcggcgcgccgctcagcttcagagaaagtttccacacctagaatttaggagtattaggggcaatcttaacactagactacggaaattggacgaacagcaggaattcagtgccatcatcttggctaccgccggactgcagcgaatgggttggcataaccgagtcggacagattctacaccccgaggaatgcatgtatgccgtcggccaaggtgctctgggggtagaagttcgcgctaaggaccaggatattctagatctagtgggcgtcctgcatgaccctgagacactgctccggtgcatcgctgaaagggccttcttgcgacacctggaggggggctgttcagtgccagtggctgtgcatacagcgatgaaggatggccagctctatcttacagggggtgtgtggtcactcgacggaagcgatagcatccaagaaacgatgcaggccactattcatgtgcctgctcagcacgaggatggtccagaagacgatccacaactggtgggcataactgcccggaatatccccaggggcccacagctcgccgctcaaaatttgggcatctctcttgccaatctactgctgtcaaaaggagcaaaaaatattctcgatgtggcccgccagctcaacgatgcgcat

SEQ ID NO: 3924 - DNA, 1083 bp, Artificial Sequence
  derived and/or modified sequence
atgtccgggaacggaaacgcagctgcaaccgccgaagaaaattcgccgaagatgagagtgattcgcgtgggtactcgaaagtctcagcttgcacgaatacaaactgactcggtggtggcaaccctcaaggcgtcctatccggggttgcaattcgagattatagcaatgtccactacgggcgataagattcttgataccgccctttccaaaatcggggaaaagagcctgtttaccaaagaattggaacacgcattggagaaaaatgaagttgatctggtggtgcattcccttaaggatctgccaactgtgcttcccccggggtttactataggagcaatttgtaagcgggagaacccgcatgacgccgtggtgtttcatccgaaatttgtgggtaagacgctggaaacccttcctgaaaagtccgtcgtgggaaccagctccttgaggcgtgcagcacaacttcagagaaagttccctcacctcgaattccgatcaatccggggtaacctcaatacccgcctgcgaaaactggatgagcagcaagaattctcagctatcattttggctacggccgggctccaacggatgggatggcacaaccgggtcggccagatccttcaccctgaagaatgcatgtacgccgtgggtcagggagctctgggagtcgaggtgcgcgccaaagaccaagacattcttgatctcgttggagtgctgcacgatccggagactcttctgagatgtattgctgagagagcgttcctgcggcatctggaaggcggctgttcggtccctgtggcagtccatactgcaatgaaggacggacagctttaccttaccggtggagtctggagccttgacgggtctgactcgattcaggagactatgcaggcaaccattcatgtgcccgcgcagcacgaggatggaccagaagatgacccccaactggtcggtattaccgcgcgcaacattccccgcggacctcaactcgcagcccagaaccttgggatatccctcgcgaacctgcttctgtcaaaaggtgccaagaacatcctggatgtggcacgccagctcaacgatgcacat

SEQ ID NO: 3925 - DNA, 1083 bp, Artificial Sequence
  derived and/or modified sequence
atgagcggtaatggtaatgccgccgctacggccgaagaaaattccccaaaaatgagagtgatccgcgtcggcaccagaaagagccagttggcaagaatacagacggattcagtggtggccactctcaaggcatcctaccccggactccagtttgagatcatcgccatgtctacaaccggcgacaaaatattggacacagcactctccaagatcggtgagaaatctcttttcacgaaagagctcgaacatgccctcgaaaaaaacgaagtcgacttggtcgtgcactcactcaaggaccttccgactgtgttgccgccgggattcaccattggagcaatctgtaagcgcgagaacccgcacgatgctgtcgttttccacccaaaattcgtaggaaaaactttggagacgttgccggaaaagtcagtagtgggtacatcttctctccgccgcgccgcacagctgcagcgcaagttcccacatttggagtttaggtccattcgcggcaatctcaacacccgcctcagaaaactggacgagcagcaagagttttccgccattattttggccactgctggtctccagcgcatgggttggcacaatcgcgtgggacagattctccatcccgaggagtgcatgtacgcagtgggtcagggagcccttggcgtagaagtcagggctaaagaccaagatatccttgacctcgtcggagtgctgcacgatcctgagacactgctcagatgtatagccgagagggcttttctgaggcacctggaaggtggctgtagcgtgccagtcgccgtgcacacggcaatgaaagacggccagctctacttgacaggaggcgtatggagcctggacggatctgattcaattcaggaaaccatgcaggccaccatccacgttcccgcccagcatgaggacggcccagaggacgaccctcagctggtcggtatcaccgcccgcaacatccctcgcggtccccagcttgcagcgcagaatctcggtatcagcctcgccaatttgctcctgtccaaaggagctaagaacatccttgacgtggccaggcaactcaatgatgctcac

SEQ ID NO: 3926 - DNA, 1083 bp, Artificial Sequence
  derived and/or modified sequence
atgagcgggaatgggaacgcagccgccacagcagaagaaaacagccccaaaatgcgcgtgatcagagtgggaactcggaagagccaactggcccggatccagaccgattccgtggttgccacacttaaagcttcatatcccggcctgcagttcgaaatcatagctatgtccaccacgggcgacaagatcctcgatacggcgctgtccaagatcggcgagaagagcctgttcaccaaggagttagagcacgctttggaaaagaacgaggtggatctagtagtccattctcttaaagacctgcccactgtactgcctcccggcttcacgatcggagcgatttgtaaacgggagaatccgcacgacgccgtagtttttcatcccaaattcgtgggcaaaactctggagacactgcccgagaaaagcgttgtcggaacaagttctctgaggcgtgctgcgcagctccagcgcaagtttccgcatcttgaatttaggtcaataaggggtaacctgaacacacgccttcggaaattggatgagcaacaggaatttagtgcgatcatcctggcgacagctggcctgcagagaatgggatggcataatcgggtgggccaaattctgcaccccgaggaatgcatgtacgctgtaggccaaggtgccctaggcgttgaagtcagggctaaagaccaggacatcctagacctggtgggggtgctgcatgatcccgaaacccttttacggtgcatcgctgaacgtgcatttctacgccaccttgagggcggatgcagtgtccctgttgccgtgcacactgctatgaaggacgggcaactctacctcaccgggggtgtgtggagtctcgacggctcggacagcattcaggagaccatgcaggccactatccatgtcccggcacaacacgaagacgggccagaggacgatccacaactggttggcatcaccgctcgcaatatccccaggggcccacaactcgctgcccagaatctcggaatttcacttgcaaacctcctcctcagtaagggtgccaagaacattcttgatgttgcccggcaactgaatgatgcacac

SEQ ID NO: 3927 - DNA, 1083 bp, Artificial Sequence
  derived and/or modified sequence
atgtcgggaaacggaaacgcggccgcaaccgcagaagagaattctccaaagatgcgagtcatcagggtgggtacgcgcaaatcgcaacttgcccgtatccagactgatagcgttgttgcaactctgaaggcaagctaccctggattgcagttcgagattattgcaatgagcaccacgggcgataagatacttgacactgccctgtccaagattggcgaaaaatccctcttcactaaggaactggaacacgcactcgaaaagaacgaagtggatctcgtcgtgcattcgttgaaggatctgcctaccgtccttccaccaggctttacgatcggagcaatctgcaagagagagaaccctcatgacgcagtcgtgtttcaccctaagtttgtcggaaaaacccttgagactcttccagagaaatccgttgtgggaaccagcagcttgagaagggccgcacagctccaaagaaagttcccgcaccttgagtttcggtcaatacgaggcaatctcaatacgcggctgagaaagctggatgagcagcaagaattctcggcgattattctggcaaccgcgggcctgcaacgtatgggttggcataatcgggtgggtcagatccttcacccggaggaatgtatgtatgcagtgggacaaggagctctgggagtcgaagtgagggctaaggaccaggacatactcgatctggtgggggtcttgcatgatcctgaaactctgctccgatgtattgcagagcgtgcatttctgcgccaccttgagggtggatgttcggtgcctgtggcagtgcataccgctatgaaagacggccagctttaccttaccggtggtgtctggtccctggatgggtctgactccatacaagaaacgatgcaagcaactattcacgttcctgcccagcatgaggacggtcccgaagatgaccctcagttggtgggtataaccgctcggaatattcccagaggtccacagcttgcggcacaaaaccttggaattagcctcgccaatctcctgctgtcgaaaggtgctaagaacatcctggacgtggcacgccaactgaacgatgcccat

SEQ ID NO: 3928 - DNA, 1083 bp, Artificial Sequence
  derived and/or modified sequence
atgtcaggcaacggcaatgctgctgcaaccgcggaggagaactcgcctaaaatgagagtgatccgagtggggacgaggaagtcacaactggcccggatccagaccgatagcgtggtggcaacccttaaggctagctacccaggccttcagtttgagatcatcgccatgagtaccaccggagacaagatcctggacactgccctctcgaaaatcggcgaaaagtcgctgtttactaaggaactcgaacatgcgctggagaaaaacgaagtggatttggttgtgcacagccttaaggacctcccaactgtcttgccgccgggattcaccatcggagcgatttgtaagagggagaatccgcatgacgcggtggtgttccatcctaagttcgttggtaagactctcgagactctgcccgaaaaatccgtggtgggaactagctccctcaggcgggccgcgcaattgcagcgcaaattcccgcatctcgaatttagatccattcgcggcaacttgaacaccagactgcgcaagctcgatgagcagcaggagttctcagccatcatcttggcaaccgcaggattgcagcggatgggctggcacaaccgcgttggtcaaatcctccaccccgaggaatgcatgtacgccgtcggacagggagccctcggagtggaggtcagagcaaaagaccaagatattcttgatctggtcggagtgctgcacgaccctgaaactcttctccgttgcatcgcggaacgtgctttcctccggcatctggaaggcggctgttccgtgccagtggccgtccatacggcaatgaaagacggccagctgtacctgactggcggggtctggtcacttgacggttcggactcgatccaggagactatgcaagcaacgattcatgtgcctgcgcaacatgaggacggtcctgaggacgatccgcagttggtcggcatcaccgccagaaacattccgaggggaccacagctggcggcgcaaaaccttggcatctccctggcgaatctgctgctttctaagggagccaagaatattctggacgtggccagacagctcaacgatgcacat

SEQ ID NO: 3929 - DNA, 1083 bp, Artificial Sequence
  derived and/or modified sequence
atgagtggcaacggtaatgcggccgctaccgccgaggagaactcgccgaagatgcgggtcatccgcgtcggcacccgtaaatcccagctggcccgcatccaaactgactccgtggtcgcgaccctaaaggcatcatacccgggtctgcagttcgagattatcgcgatgagcacgaccggcgacaagatccttgacactgcactgtccaagatcggcgagaagtcactcttcacgaaagaactcgaacatgccctggagaagaatgaggtggatcttgttgtgcactccttgaaggatcttcctaccgtcctcccgccgggtttcaccattggtgcaatatgcaaacgggagaacccgcatgatgccgtggtgttccaccccaagttcgttggcaagacgctggagactctccccgagaagagtgttgttgggacctcatctctgcgtcgcgccgcccagctccaacgcaaattcccccacctggagttccgcagcattcgcggtaatcttaacacacgcctccgaaaactggatgaacagcaggaattttcggccattatcctcgcgacagcgggccttcaacggatgggatggcacaaccgcgttggccagatcctccacccggaggagtgcatgtacgcggtcggccaaggcgcgctcggagtcgaggttcgcgcaaaggaccaggacatcttggatcttgtaggtgtgctccacgaccccgagaccctgctccgctgcatcgctgagcgtgccttccttcggcacctcgagggaggttgcagcgtcccagttgctgtccacacggcaatgaaggacggtcagctgtatctcaccggaggcgtttggtccctggatggatccgattctattcaggagaccatgcaggcgaccatccacgtgccggcgcagcacgaggatggaccggaggatgacccacagctcgtaggcatcacggctcgtaacattccgaggggtccgcagctcgccgcgcaaaacctcggtatatcattggcaaacctgctcctgtccaagggagctaagaacattcttgatgtcgctcgtcagctgaatgacgctcac

SEQ ID NO: 3930 - DNA, 1083 bp, Artificial Sequence
  derived and/or modified sequence
atgtcaggcaacggtaacgcggccgcgactgcggaagaaaatagcccaaagatgagggtgatccgcgtcggaacgcggaagtcgcaactggctcggatccaaaccgattcagtcgtggcaaccctcaaagcgtcgtaccccggactccagttcgaaatcatcgccatgtccaccactggcgataagatcttggacaccgctctgtccaaaatcggcgagaagtcattgtttaccaaggagttggaacacgccttggagaaaaacgaagttgacttggtggtgcattcgctgaaagacctccctaccgtcctcccgccaggattcacgatcggcgctatctgcaagcgggagaaccctcacgacgccgtcgtattccatccaaagttcgtaggaaaaacgctcgaaactctcccagagaagtcagtggtcggtacctcctccctgagaagagcggcccaactgcagagaaagttcccgcatctggagtttaggtcaatccgggggaacttgaataccaggctgcgaaaactggacgagcagcaggagttctcggcgattatcctcgccactgccggcctgcaacgcatgggatggcacaaccgggtgggacaaattcttcaccctgaagaatgcatgtacgcagtgggacaaggcgcactcggagtggaggtgcgcgctaaggaccaagatatcctggatctggtgggcgtgctccacgatccggaaactctgctgaggtgcatagctgaaagagcattcctccgacacttggaaggaggatgtagcgtgccggtcgccgtgcacaccgctatgaaagacggtcagctgtacctgaccggtggagtgtggtccctggatgggtcggatagcattcaggaaactatgcaggcgactatccacgtgccagcacaacatgaggatgggccggaggacgacccgcagcttgtggggattactgctcgtaatatccctcgcggtccgcagctcgcggcccagaacttgggcataagcctcgcgaatctcctgctgtctaagggtgctaagaatatactggacgttgcccgccagctgaacgacgctcat

SEQ ID NO: 3931 - DNA, 1083 bp, Artificial Sequence
  derived and/or modified sequence
atgagtggaaacggcaacgcagcggccaccgccgaagagaatagtcctaaaatgagggtgatccgtgtcggtaccaggaagtctcagctggctcgcatacaaacagatagtgtggtggctactctgaaggccagctatccaggccttcaatttgagattatagccatgagcaccaccggggataagatccttgacaccgctttgtcaaagatcggcgaaaagtctctattcactaaggaactggaacatgcacttgagaagaacgaggtggacctcgtggtgcactctttgaaggatctgcctacagtgcttcccccgggatttactattggagcaatttgtaagcgcgaaaaccctcacgatgcagtggtgtttcaccctaaattcgtgggcaaaacattagagaccttgccagaaaagagcgttgtgggcacatctagcttgaggcgcgcagctcagctccaacggaagttcccacacctagagtttcggtccatcagagggaacctgaatacccgcctgcgtaaactcgatgagcagcaggagtttagtgcaataatcttggctaccgctggactccagcggatgggatggcacaacagggttggacagatcctgcatccagaagagtgcatgtatgccgtgggacagggagcactgggggtggaagtcagagccaaagaccaggacatcctcgatctggtgggtgtcctgcatgacccagagaccctgctcaggtgcatcgctgagagggcattcctgcggcatctggaagggggctgcagcgtgcctgtggctgtccatactgctatgaaggacggccagctgtatctaaccgggggcgtatggagcctggatggatccgacagtatccaggagacaatgcaggcaactatccatgtgccagcccagcacgaggatggacctgaagatgatccacagctcgtggggattacagcaaggaatatccctaggggaccacagcttgctgcgcaaaacctggggatctcactggcaaacctgcttcttagcaaaggagctaaaaatatactggacgtcgctaggcagctgaatgacgctcac

SEQ ID NO: 3932 - DNA, 1083 bp, Artificial Sequence
  derived and/or modified sequence
atgtcgggtaatggtaatgcggcggcgacggcggaagaaaattcgccgaaaatgcgtgtaatacgagttggtacgcgaaaatcgcaattagcgcgaatacaaacggattcggtagtagcgacgctaaaagcgtcgtatccgggtttacaatttgaaataatagcgatgtcgacgacgggtgataaaatattagatacggcgttatcgaaaataggtgaaaaatcgttatttacgaaagaattagaacatgcgttagaaaaaaatgaagtagatttagtagtacattcgttaaaagatctaccgacggtattaccgccgggttttacgataggtgcgatatgtaaacgagaaaatccgcatgatgcggttgtatttcatccgaaatttgtaggtaaaacgttagaaacgttaccggaaaaatcggttgtaggtacgtcgtcgttacgacgtgcggcgcaattacaacgtaaatttccgcatttagaatttcgttcgatacgtggtaatttaaatacgcgactacgaaaattagatgaacaacaagaattttcggcgataatattagcgacggcgggtctacaacgtatgggttggcataatcgtgtaggtcaaatactacatccggaagaatgtatgtatgcggtaggtcaaggtgcgctaggtgtagaagtacgagcgaaagatcaagatatattagatttagtaggtgtattacatgatccggaaacgttattacgttgtatagcggaacgtgcgtttctacgtcatctagaaggtggttgttcggtaccggttgcggttcatacggcgatgaaagatggtcaactatatttaacgggtggtgtatggtcgttagatggttcggattcgatacaagaaacgatgcaagcgacgatacatgtaccggcgcaacatgaagatggtccggaagatgatccgcaactagtaggtataacggcgcgaaatataccgcgaggtccgcaattagcggcgcaaaatttaggtatatcgttagcgaatctattattatcgaaaggtgcgaaaaatatactagatgttgcgcgtcaactaaatgatgcgcat

SEQ ID NO: 3933 - DNA, 1083 bp, Artificial Sequence
  derived and/or modified sequence
atgagcggaaacggtaatgctgcagctacagccgaggagaattcccctaagatgcgcgtgatccgcgtgggtacacgtaagagccagctggcacgcatccaaaccgactccgttgtggcaacactcaaggcctcctaccccggtcttcaattcgaaatcatagccatgagcaccactggcgacaaaattcttgataccgctctgtctaaaattggagaaaagagcctctttacaaaggagctggagcacgccctcgagaagaatgaggtggatctcgtcgtacactccctgaaggatttgcctacagtgcttcctcccggttttaccatcggagcaatctgtaaacgtgagaacccacacgatgctgttgtgttccatcccaaattcgtgggtaagacccttgaaacactgccagagaagagtgtggtcggtaccagttctcttcgtcgtgccgcacagctgcagagaaaattccctcacctggagtttcgctcaatccgcggcaacctgaatacccgtcttcgcaagctggatgaacagcaagagttttcagctattatcttggccacagccggcctgcagaggatgggatggcacaaccgcgtgggacagattctgcaccctgaggaatgcatgtatgccgttggccaaggagctcttggcgtcgaagttagagctaaggatcaggacatcttggacctggttggcgtgttgcacgacccagagaccttgctgagatgtattgcagaaagggcattcttgcgtcacctcgagggcggttgctcagttcctgttgcagtacacaccgctatgaaggatggccagctgtatctgaccggaggagtatggtccctggacggatctgactcaatccaagaaaccatgcaggctactatccatgttcccgcacagcacgaagatggcccagaagacgacccccagctggtgggcatcactgcaagaaatattcctagaggtccacagcttgctgcacagaacctgggaatcagcttggcaaatttgttgttgtccaaaggagcaaaaaatattctggatgtggctaggcaactgaacgatgctcat

SEQ ID NO: 3934 - DNA, 1083 bp, Artificial Sequence
  derived and/or modified sequence
atgtccggtaacggtaatgcagccgcaactgcagaagaaaattcccccaagatgagggtcataagggtgggaaccaggaaatcccagctggcacgcattcagaccgatagcgtggtggcgacgctgaaggcctcctatccaggcctgcaatttgagattatcgcgatgagcactaccggtgataagatccttgacactgccctgtcaaagatcggagaaaagagtctttttacgaaggaacttgaacacgctctcgagaagaacgaagtggatcttgtggtgcattcactgaaggatcttccaaccgtcctgccgcctggcttcaccataggtgcaatctgcaagcgagaaaacccacatgatgccgtggtgtttcacccgaagtttgtggggaaaactcttgaaaccctgcctgaaaagtcagtggtgggaacgtcaagcctgcgtcgtgcagcacaactccagcgcaagttcccgcatctggaatttcgttccatacgaggtaaccttaacacgcggcttcgcaaactggatgagcaacaggaattcagcgcaatcattctggcgactgccggtctgcaacgtatgggatggcataaccgcgtgggacaaatactccaccctgaagagtgtatgtacgccgtgggacaaggggcattgggagtggaggtccgagcaaaggaccaagatattctggacctcgtcggcgtccttcatgacccagaaactctccttcggtgtatcgcagagcgcgcgttcctccggcatcttgaggggggatgttccgtccccgtcgcggtccacaccgcaatgaaagatggtcagctgtatctgactggtggggtgtggagcctcgatggctctgactcaattcaagagactatgcaagcaaccattcatgttcccgcacagcatgaggacggacctgaagatgatcctcaactggtgggcattaccgctcggaatattcctagaggcccacaattggcagctcagaacctgggtatctccctcgcaaatcttttgttgtctaaaggcgcaaaaaacattttggacgtcgcccgccagctgaatgacgctcat

SEQ ID NO: 3935 - DNA, 1083 bp, Artificial Sequence
  derived and/or modified sequence
atgtccggaaacggaaacgcggcagcaaccgccgaagagaatagcccaaagatgcgagtgatcagagtcggtacccgtaagtcgcaactggcaagaatccagactgattcggttgtggccactctcaaggcctcatacccaggtttgcagttcgaaatcatcgcaatgtccaccactggagacaagatattggatactgccctcagtaagataggagaaaagagtctctttactaaagagctcgagcacgccctcgagaaaaatgaagtagaccttgtggtccatagcttgaaggatctgcctaccgtgttgcctccgggctttaccataggcgcgatttgcaaacgcgaaaatccccacgatgctgtggtgtttcacccgaagtttgtcggcaagacgcttgaaacgcttccagaaaagtcggtggtcggtaccagctccctccggcgagcagcccagctgcagaggaagtttccacacctggaattcaggtcgataaggggcaatcttaacactagactgagaaagctcgacgagcaacaagaattttccgcgatcattctggccaccgcaggtctgcagcgcatggggtggcataatcgcgtgggtcaaattcttcatccagaagagtgcatgtacgcggtgggccaaggcgcactgggagttgaagtccgagctaaggatcaagacatccttgatctggtgggagtcctccacgatcctgaaacccttttgagatgtattgctgagcgggcattccttcggcatctcgaaggtgggtgttcggtgcccgtggcagtccacactgcaatgaaggatgggcaactctacctcaccggcggagtgtggtcacttgatggttccgacagcatccaagaaactatgcaggctaccatccatgtgcccgcccagcatgaggatggtccagaagatgatccacaacttgttggtattacggcacgaaacataccccgcggtcctcagcttgccgcacaaaacctgggcatttccctcgcaaaccttctgcttagcaagggagctaaaaacattcttgatgtcgcacgacaactgaacgacgcccat

SEQ ID NO: 3936 - DNA, 1083 bp, Artificial Sequence
  derived and/or modified sequence
atgagcggcaacgggaacgctgcggcgacggctgaagagaactccccaaagatgagagtcattagagtgggaacccgcaagtcgcagctggcaagaattcagaccgattcagtggtggccaccctgaaagccagctacccaggattgcaattcgagatcatcgccatgagcacgactggtgataagatccttgacactgccctgtcaaaaatcggggaaaagtcgctgtttaccaaagaactggagcacgcgttggaaaagaacgaagtggacttggtggtccattccctgaaggacttgccaaccgtcctgccacctggattcactatcggagcgatttgcaagcgcgaaaaccctcatgacgccgtggtgttccaccctaagttcgtcggcaagactctcgaaaccctgccggagaagagtgttgtgggcacttcctcgctgcggagagcggcccagcttcagagaaagtttccgcatctggaatttcgctcgatcagagggaacctcaacacccgcctgagaaagctggacgaacagcaagaatttagcgccatcatcctcgcgactgccggtctgcaaaggatgggatggcacaatcgggtgggtcaaatcctccacccagaggagtgcatgtacgcagtcggacaaggagccctgggagtggaagtcagagccaaggaccaggatatcctcgacctggtgggtgtgctccacgatcctgagactctgcttcgctgtatcgcagaaagggccttcttgcgacacctggagggaggatgttccgtgccggtcgctgtgcatactgccatgaaagatggccagctgtacctgacgggtggagtctggagcctggacggttccgactcgattcaggaaaccatgcaagcgactatccacgtgccagcgcagcatgaggacgggcctgaggacgatccgcaactcgttggcatcaccgcccgtaacatcccgagaggtccgcagctggccgcgcaaaacctcggcatttcgctggcaaatctcttgctctcaaagggagctaagaacatcctggacgtggctcggcagctgaatgacgcgcat

SEQ ID NO: 3937 - DNA, 1083 bp, Artificial Sequence
  derived and/or modified sequence
atgtccgggaatgggaacgcagcagctaccgcagaagaaaacagtcccaaaatgcgcgtcatccgggttggcacaaggaagtcccagctagccaggatccagaccgacagcgtggtagcaacactgaaagctagctaccccggactgcagttcgaaatcatcgcaatgagtactactggcgataaaatactggacactgctttatcaaagattggcgaaaagtccctgttcactaaggaactggaacacgcactggaaaaaaacgaagtcgacctcgttgttcatagtctaaaagatctgcctacagttctgcctccaggttttactataggcgcaatttgtaaacgtgaaaatccccacgacgccgtggtctttcaccctaagtttgtgggcaagaccttagaaacactacctgagaagtctgtggtgggcacaagcagtttaagacgggcagcccagctccagcggaagttccctcacctggagtttagatcaatacggggcaacctgaatactcgactgaggaagcttgatgagcagcaggagttttccgctatcatactcgccacagcaggactgcagagaatgggctggcataatcgcgtcggtcaaatcctgcaccctgaggagtgtatgtatgccgtgggccagggcgccctgggtgttgaagttcgcgccaaagaccaggacatactcgatctcgtcggtgtcctgcatgaccccgaaacactacttcggtgtatcgctgagcgggcattcctccgtcacctggaggggggatgcagcgtgcctgttgctgttcacaccgcaatgaaggacgggcaactgtatctgactggaggcgtctggtctctcgacggctctgatagtatccaagaaactatgcaggctacaatccacgtaccagcccagcatgaagatggccctgaagatgaccctcaactagtggggatcacagcacgtaacataccaagggggccccagctggccgcacagaatctgggcataagtcttgccaacctgctcctctccaagggtgccaagaacatcctcgatgtcgcaagacaactcaatgacgcccac

SEQ ID NO: 3938 - DNA, 1083 bp, Artificial Sequence
  derived and/or modified sequence
atgtccggcaatggaaacgccgctgcaacggcagaggaaaacagccccaaaatgcgcgtcattcgagtaggcacccgaaagagccagttggcccgtattcagaccgattctgtggttgccacattgaaagcgtcttatccgggattgcaattcgaaattatagctatgtctactactggagataaaatactggacaccgcactatctaaaatcggggagaaaagcctcttcacaaaggagctggagcatgccttggaaaaaaacgaggtggatctggtggtgcactccctaaaggacctgcctacagtgctgccacctggattcactatcggggccatatgtaaaagagagaatcctcacgacgccgtggtgttccacccaaaattcgtaggcaaaacgctcgaaacattgccggagaaatcagttgtgggaacttcgtctcttaggagagccgcgcagcttcagcgcaagttccctcatcttgagtttaggtcgatacgaggaaatctcaataccaggctgaggaagctggacgaacagcaggaattttccgccatcatcctggcaacggccggactgcagcgcatgggatggcacaatagagtgggacagattctgcaccctgaagaatgtatgtacgcagtgggacagggagcactcggcgtcgaggtgcgagcaaaggatcaagatattctggacctggtcggggtgcttcacgaccccgagaccttgctgcgctgcatcgcagagcgcgcttttttgcgtcacctggagggcggctgttcggtgccagtggccgtgcacaccgcgatgaaagatggccaactctacctcaccggaggagtatggagcctggatggaagcgatagtattcaggagacgatgcaggcgaccatacatgtaccggcccaacacgaggatggccccgaggatgacccacagcttgtaggaatcaccgcccgaaacatacctcgcggtccgcagctggcagcgcaaaatttaggcattagcctggcaaacctgctgctatccaagggagctaagaacatcctggacgtcgcgaggcagctcaatgacgcccac

SEQ ID NO: 3939 - DNA, 1083 bp, Artificial Sequence
  derived and/or modified sequence
atgtcgggcaacgggaatgcagctgctaccgcagaggagaatagcccaaagatgagagtcattcgtgttggcacccggaagtctcaactggcacggattcagacggatagtgtagtggctactcttaaggcaagctaccccgggctacaatttgaaatcatcgctatgagtacaacgggtgacaaaattctggataccgccttatccaagattggcgaaaaaagtctgtttactaaggagctggaacacgcactggaaaaaaacgaggttgacctcgtcgttcactctctgaaagatctgcccacagtgctaccacccggcttcaccattggggcaatctgtaagcgagagaacccccatgatgctgttgtgttccacccgaagtttgttggcaagacattggagacgctgcctgaaaaaagtgttgtgggaacttcctcccttcggagagccgcccagcttcagcgcaagttcccacacttggagttccggtcaataagaggcaatttaaacacgcggctcagaaagttggatgagcagcaggagttcagtgcaattattcttgcgacagccgggcttcagcgaatgggatggcataacagagtgggccagattcttcaccctgaagagtgtatgtacgcggtaggccaaggcgcccttggcgtagaggtgcgtgctaaagaccaggatatcttggatctcgtgggtgtgctacacgatccggaaacattactcagatgtatcgcagaacgagccttcctgaggcacctggagggcggctgttcagttcccgtggccgtgcacaccgccatgaaggacggtcagctctacctgacggggggcgtttggtctcttgatggaagcgactctatccaggagacaatgcaagcgactatccacgtccctgcccagcacgaggacgggccggaggatgatccccagttggtagggattaccgccaggaacatcccgcgcggtcctcagctagccgcccaaaatctgggaatttctcttgctaatctgctgttatcaaagggtgccaaaaacattttggatgtggcaagacaactgaacgatgcccac

SEQ ID NO: 3940 - DNA, 1083 bp, Artificial Sequence
  derived and/or modified sequence
atgtccgggaatgggaatgcagctgcgacggctgaagagaactctccaaagatgagggttattcgagtcggaacgcgaaaaagtcagcttgcgcggatccaaactgactcagtagtggctactcttaaggccagctacccgggactccaattcgagattatcgctatgtctaccacgggagataagatacttgatactgctctgagcaagattggcgaaaaatcgctgttcacaaaggagctggaacatgcactcgaaaagaacgaggtcgacctggtggtgcattcactcaaggatctacctacagtgttacccccaggttttacaattggggcaatatgtaaaagagagaatccccacgacgccgtagtttttcaccccaagtttgtgggcaaaacattagagaccttgccagagaaatcggtggtcgggacctccagcctgaggagagcagcgcaactccaacggaaattcccccacctggagtttagaagcataagaggcaaccttaacacacgactgcgaaagctagacgagcaacaggaattctcagctatcatcctggcaacggctggtcttcaaagaatggggtggcacaatcgcgtaggtcaaatcctccacccagaggagtgcatgtatgcagtgggccagggagcactgggagtggaagtcagggcgaaggaccaagacatccttgacctcgttggtgtgctgcatgatcctgagaccctcctgcgatgcatcgccgagcgcgcgtttctgcgtcacctggagggaggctgctcggtgcccgtggcggttcacactgccatgaaagacgggcagctgtatttgaccggaggcgtgtggtcattagatggctcggactccatccaggaaacgatgcaggctaccatccacgtgcctgcccaacatgaagatggaccagaggacgatccacagctagtgggaatcacagcgcggaatattccgcgcgggccccagcttgctgcccagaatctcgggatctcactggccaacctgctcttatccaaaggagctaaaaatatactggacgtggcccgccagttgaacgacgcacac

SEQ ID NO: 3941 - DNA, 1083 bp, Artificial Sequence
  derived and/or modified sequence
atgagcgggaacggtaatgctgcggcgaccgctgaagaaaactctcctaaaatgagggtgatccgcgttggtactcggaagagtcaactggcgcgtattcaaaccgactctgttgttgctacgctgaaagcctcctaccccggcctgcaatttgagattatcgccatgagtaccacaggcgacaagattctggatacagctttgtctaagattggcgagaagagcctgttcacgaaagaactagaacatgcgctggagaaaaatgaggttgatttggtagtgcactccctcaaagaccttccaaccgtgctgcctccagggtttacaatcggtgcaatttgcaagcgcgaaaaccctcacgacgccgtcgtgtttcatcctaaatttgttggcaagaccctggagaccctcccagaaaaaagcgtcgtggggaccagttcactgagacgcgccgcccaattgcaacgcaagttcccccacctcgagtttcggtccatacgcggtaacctaaacaccaggctcagaaagcttgacgagcagcaggagttttctgccatcatcctcgcaacggctgggcttcagagaatgggatggcataaccgggtggggcaaattcttcatccggaagaatgtatgtacgccgtagggcaaggagctctcggcgtggaagttcgcgccaaagaccaggatattttggacctagtaggtgtgcttcatgatcctgagaccttactgaggtgcattgctgaacgtgctttcttaaggcacctggaggggggctgcagcgtgccggtagcggtccacacagctatgaaggatgggcaactgtacttgactgggggcgtttggtcattggatggatcagactcaatacaagagacaatgcaggccacaattcacgtcccagcgcagcatgaggatggtcctgaagacgaccctcagctggttggtatcaccgcaagaaacatcccgagaggcccccagcttgcagcccagaacctaggaatatcgctagccaacttgttgctgtctaagggcgctaagaatattctggacgtagcccgccaattgaatgatgctcat

SEQ ID NO: 3942 - DNA, 1083 bp, Artificial Sequence
  derived and/or modified sequence
atgagtggcaacggcaatgcagctgcgaccgcagaagaaaactcacctaagatgcgagtgattcgagtcggtacaaggaaaagccaattggctagaatccagacagactctgtcgtggcgaccctcaaggcctcttaccctggcttgcaattcgagatcatcgcgatgtcaaccacaggcgacaagatcctcgatactgcgctgagtaaaatcggcgagaagagtctcttcaccaaggaactggaacacgccctggaaaaaaacgaggtggatttggtcgttcacagtctgaaagatttgccaacagtcctgccacctgggttcaccattggagcaatttgtaaaagagagaatccccatgacgctgtggtgttccaccctaagttcgtaggcaagacactggagacattgccagaaaagtccgtggtcggaacatcatcccttaggagggcggcccaattgcaacgcaagttcccccacttggagttccggtcaattcgagggaatctgaacacacgcctgaggaaactagatgagcagcaggaattctcagcgattattctagccacagccggcctacagcggatgggatggcataacagggtggggcaaatcctccaccccgaggagtgcatgtatgccgtagggcagggcgctttgggggtggaagtgcgggctaaggaccaggatatcctggacctggttggcgtgcttcatgaccccgagaccttgcttagatgcattgctgaacgagcttttctgagacacctcgaggggggctgctccgtgccagtggcggttcatacagccatgaaggacggccagctttacctcacagggggcgtgtggtctctggacggatccgattccatacaggaaaccatgcaggccactatccatgtccccgctcagcacgaagatggcccagaagatgatcctcaactcgtgggtatcaccgccaggaatattcctcggggaccgcagctagccgcccagaatcttgggatctccctcgctaatctactcctttccaagggggcaaaaaacatcttggacgtggctcgtcagctgaacgacgcccac

SEQ ID NO: 3943 - DNA, 1083 bp, Artificial Sequence
  derived and/or modified sequence
atgagcgggaatggaaacgcagcggcgaccgccgaggaaaattctccaaagatgcgcgtgatccgagtggggacaagaaaaagccagctggccaggattcagacagattccgtagtggctacgctgaaagccagctacccagggcttcagtttgaaataatcgcaatgagtacaactggggacaagatcctggacaccgctctgagtaaaataggtgagaagtcgctttttactaaagaactggaacatgcgttggagaagaacgaagtggacctggttgtacattctctgaaagatctcccaacagtactgccccccggctttacaatcggtgccatctgtaagagggagaatccacatgacgccgtcgtgtttcacccaaaattcgtcgggaaaacgctggagacactaccggaaaaatcagtcgtggggacgagctcgctacggcgtgccgcgcagttacagaggaaattcccccatctcgagttcaggtctatccgagggaatctgaataccaggttgcgaaagcttgatgagcagcaagaattctcagctatcatattagcaacagccggccttcaaaggatgggctggcacaacagggttggccagattctgcaccctgaagagtgtatgtacgccgtggggcaaggggccctcggtgtagaagtgagggcgaaggaccaggacatcctagatttagtgggggtgctgcacgatcctgaaactttactacggtgtatcgcggagcgcgcttttctgagacacttggaaggcgggtgttctgtgcctgtcgctgtccacaccgctatgaaggatggacagctgtatctcactggcggcgtctggagcctcgatggctccgactcgatccaggagactatgcaggccacaattcatgttcctgcccaacacgaggacggacccgaagatgatccgcagctcgtgggaatcacagccagaaatatccccaggggaccacaactcgccgcacagaatcttggcatctccctggccaatctgctgctgtcgaaaggagccaaaaacatcttagatgtggccagacagctgaacgacgctcac

SEQ ID NO: 3944 - DNA, 1083 bp, Artificial Sequence
  derived and/or modified sequence
atgtctggaaatggaaacgccgccgccaccgcggaggaaaactcaccaaagatgagagttatccgggtgggcacgcggaagagccagctggcgcgtatccagactgattcggtggtcgcaactctcaaagcgtcatacccgggacttcagtttgagataatcgccatgtcaacgactggagataagattctggacaccgctctgtcaaaaatcggcgaaaagtcgctgtttactaaagaactggagcacgctctcgagaaaaacgaagtcgatctcgtggtccattccctgaaggacctgccgaccgtcctcccacctgggttcacgattggggcgatttgcaagcgggaaaacccacatgacgctgtggtgttccaccctaagtttgtgggaaagactttggaaaccctccccgaaaagtccgtggtcggaacctcgtcactccgcagggcagcccaactgcaacgcaaattcccgcatctggaatttagatcgatccggggaaacttgaacactcggctgagaaaactggacgaacaacaggagttctcggccatcattctcgccactgccggtttgcaacggatgggttggcacaacagggttgggcagatcttgcacccggaggaatgcatgtacgcggtcgggcagggagccctcggagtcgaggtgcgggccaaggaccaagatatccttgacctcgtcggagtgctccatgaccctgaaacgctgctgcgctgcatcgcggagcgggctttcctccgtcacctggaaggaggctgctccgtaccggtggcggtccacaccgccatgaaagacggacaactctatctcacggggggagtgtggtcactggacgggtccgacagcatccaggagactatgcaggccaccattcacgtgccagcccagcacgaggatggaccagaggacgaccctcagctggtgggaattactgcgcggaatatcccgcgcggtccgcagctggcagcccaaaatctcgggatctcgcttgccaatctgctgttgagcaagggagcgaagaatatcctggacgtggcgcgccagctgaatgatgcacac

SEQ ID NO: 3945 - DNA, 1083 bp, Artificial Sequence
  derived and/or modified sequence
atgagtggaaacggaaatgctgcagcaacagcggaagaaaactctccaaagatgagggtgataagagtcgggaccagaaaatcacagcttgctcgaatccagaccgattccgtcgtagcaacactaaaagcgtcctacccgggactccagtttgagatcatcgcgatgtctactaccggggacaagatcctggacaccgcactaagcaagattggggagaagagcctgttcaccaaggagttggaacacgcacttgaaaagaacgaggtcgaccttgtggtccactccctgaaggatctgcccactgtcctgccgccaggatttaccatcggggcaatatgcaaacgagaaaatccccatgatgcagtagtctttcatccaaagttcgtcggcaaaacactggaaacccttccagaaaaatccgtcgtgggcacatcctcactgcgcagggcggcccaattgcagcggaagtttccccacctggaattcagatctattcgaggcaaccttaatacacgtctcagaaaattggatgaacaacaggagttctctgccattatcttggccacggccggtctccaacgaatggggtggcataacagggtcggacaaatcctgcacccagaagagtgtatgtatgctgttggccagggcgctctcggtgttgaagtgagggctaaggatcaagacatcctggatctggtcggtgttctgcatgatccggaaacgctactccgatgcatcgctgaacgagcatttttgcggcacctggaaggtggatgctccgtccctgtcgctgttcataccgcaatgaaggatgggcagctctacctgacaggcggagtttggagcttggatggctctgactccattcaagagacaatgcaggctactatccatgtccccgcacaacacgaagatggacccgaggacgatccccagctcgtaggtattactgcaagaaatattccgagggggccacagcttgccgctcagaatctcgggatctcacttgcaaacctgctcctctccaagggggccaagaacatactcgacgtagccaggcaactaaatgatgcacat

SEQ ID NO: 3946 - DNA, 1083 bp, Artificial Sequence
  derived and/or modified sequence
atgtccgggaatggcaatgccgccgccactgcagaagagaactcaccgaaaatgcgcgtcatcagggtcggaaccagaaaaagccagttggccagaatccaaactgatagcgtggtagcaactctcaaagccagctaccccggactgcagttcgagatcatcgcaatgagcactacgggggacaaaatcttggacaccgcactgtcgaaaatcggagaaaaatcactgttcactaaggagctggaacatgcactcgaaaagaatgaagtcgacctggtggtgcattcgctgaaggatctgccgaccgtgctgcctcctggtttcaccataggagcgatctgtaagagagaaaacccccatgatgcggtggtgtttcatccgaagttcgtcggaaaaaccctggagactctgccagagaaatcggtggtgggcacgtcgtcgctcaggagagccgcccaactgcagagaaagttcccccatcttgaatttcggtctatccgcggaaacctgaacactaggctccggaaattggacgaacaacaggaattctcggcgatcatcctggccaccgcaggactgcaacggatgggatggcacaatagggtgggccagatcctgcatccggaagaatgcatgtacgccgtgggccagggggccttgggggtggaggtgcgagccaaggatcaagacatcttggacttggtcggagtcctccacgacccggagacgctccttagatgtatcgccgagcgggcatttctgagacacctggaggggggctgctccgtccctgtggccgtccacaccgcgatgaaggatggacagctctacctcactggaggggtgtggtcattggacggatcggactcgatccaggaaactatgcaagcgactatccacgtgccggcccagcatgaggatggaccagaggacgacccgcaactcgtgggaattaccgcccggaacattccacgcgggccgcagctggcagctcagaatctgggcattagcctcgctaacctccttctgtcgaagggagcaaagaacatcctggatgtggcccgccagctcaacgacgcccat

SEQ ID NO: 3947 - DNA, 1083 bp, Artificial Sequence
  derived and/or modified sequence
atgagtggaaacggcaatgctgccgccacagcggaggagaactcacccaaaatgcgggtaatcagggtgggaacgagaaagagtcaactcgcacgcatccagactgactctgttgtagccacgctgaaggcctcatacccggggctgcagttcgagatcattgcaatgtctacaacaggagataaaatcctcgacacagcgctctccaagataggtgagaagtcgctcttcacgaaagaactcgagcacgctctggaaaaaaacgaagtcgacttagtggtccattcactgaaggacttgccgaccgtgctcccacctgggtttacaatcggcgccatatgcaagagggagaacccgcacgacgcggtggtcttccacccaaagtttgttggcaaaaccctcgagacccttccagaaaaaagtgttgtggggactagtagtctccgaagggccgcacagctgcagcggaaattcccacacctggagttccggtctatccgcgggaatttgaacactcgtctccggaagctagatgaacagcaagagtttagcgctataattctcgccaccgctggcctgcaaaggatgggttggcacaatagggtagggcagattctacatccagaggagtgtatgtacgctgtgggacaaggagctctgggtgtggaggtgcgcgcaaaggatcaggacatactggaccttgtgggtgttttgcatgatccagagaccctgcttcggtgcatcgcagagagagcctttcttagacacctggaggggggttgctcggtccctgtggccgtgcataccgctatgaaggacggacagttgtaccttaccgggggtgtctggtctctggatggatccgatagtatccaggagaccatgcaggccaccatccacgtgcctgcacagcatgaggatggacctgaggacgaccctcagctggtcggcatcacggcgcggaacattccacgcggccctcagcttgcggcacaaaatctggggatttctctggccaatctgctactgtccaaaggagcgaaaaatatcctcgacgtggcacgacagctaaatgacgcacac

SEQ ID NO: 3948 - DNA, 1083 bp, Artificial Sequence
  derived and/or modified sequence
atgagcggaaacggcaatgccgctgcaacagcggaggagaacagcccgaagatgcgagtcattagggtgggaactcggaaatctcagcttgctcgtattcagacagatagcgtggttgcaactttgaaagcctcatatcccggactccagttcgagatcatcgctatgagcaccactggagataagattctggacacagcgctaagcaagatcggcgaaaaaagcctgtttacaaaggagcttgagcacgccttagagaaaaatgaagttgacttagtcgtacactcactcaaggatctcccaactgtcctgcctccggggttcacgatcggcgcaatatgcaagagggaaaacccccacgatgccgtcgtgttccacccaaaattcgtgggcaaaactcttgaaactctacccgaaaaatctgtcgtgggcacatcctccctaagaagagcggcccagctccagcggaagttccctcatttggagttcagaagcattcgcggtaatctgaatacgaggttaaggaaactcgacgagcagcaagagttctctgcaatcatattggcaacggccggcttgcaacgaatgggctggcacaatcgcgtgggacagattcttcatcctgaagaatgtatgtatgctgtgggtcagggagccctcggtgtggaggtaagggcgaaggatcaagatatcctggacttggttggagtccttcacgacccagaaactctgttgcggtgcatagccgagcgtgcctttctcagacacctggagggtgggtgtagcgtaccagtagcagtgcacacagccatgaaggatgggcagctgtacctgaccggaggggtatggtctttggatggctcggactccattcaggagaccatgcaggccacaatccatgttccggctcagcacgaggacgggcctgaagacgacccccagctcgtcggtatcaccgctaggaatattcctaggggacctcagctggccgcccagaacctgggcatcagtctcgccaacctactgctctctaaaggggcaaagaatatcctggacgtcgccagacaactaaacgacgcgcat

SEQ ID NO: 3949 - DNA, 1083 bp, Artificial Sequence
  derived and/or modified sequence
atgagcggaaacggaaatgccgcagcgacggccgaagaaaactccccgaagatgcgggtgattagagtgggaacccgtaagtcacagctggccaggatccaaaccgacagcgtggtggctactttgaaagcctcctaccccgggctgcaattcgagatcatcgcaatgtcgactactggagacaagatcctggataccgcattgtcgaagatcggtgaaaaatcgctgttcaccaaagagctcgaacacgcgctggagaaaaacgaagtagatctcgtggttcactcactgaaggacctgccaactgtcctgccgccagggttcactattggcgctatttgtaagcgcgaaaatccgcacgatgccgtcgtgttccacccaaagttcgtcggcaagaccttggaaaccctcccagagaagtccgtggtggggacctcttccctccgacgagccgctcagctccagcgcaaatttccgcacctggaatttcgcagcatcaggggaaatctgaacactcgccttagaaagctggacgagcaacaggagttcagcgctatcatccttgcgacggcggggttgcagaggatgggctggcataatcgcgtcgggcaaatcttgcatccggaagagtgcatgtacgcagtcggacaaggtgcgcttggtgtggaagtcagagcaaaggaccaggatatcttggatctcgtgggcgtccttcacgatcccgaaacgctgttgagatgcatcgccgagcgcgcattcctgcgacatctcgaaggtgggtgctcggtgccggttgctgtgcacactgccatgaaagatggccaactgtacctgactggaggcgtttggtccctcgatggatcggactccatccaagaaaccatgcaggccaccatacatgttccagcgcagcacgaggacggacccgaggacgaccctcagcttgtaggaattacggcgcggaacatccctaggggaccgcagctggccgcccaaaaccttggaatcagcctggccaatctgcttttgagcaagggagcgaagaacatcctcgacgtggcacggcagctgaacgacgcccat

SEQ ID NO: 3950 - DNA, 1083 bp, Artificial Sequence
  derived and/or modified sequence
atgagtggaaacggtaatgcagctgcaactgccgaggagaactctcctaagatgcgggttatcagggttgggacgagaaagtctcagctggccagaattcagaccgattccgtagtggctaccttgaaggcctcttaccctggcctgcaatttgaaatcatagctatgagcacgaccggcgacaagatacttgacactgcccttagtaaaatcggcgagaagtcactttttacaaaagaactggagcatgcactggagaagaacgaggtagatctggtcgtgcattccctcaaagacctgcccacggttcttccacctggctttaccattggtgccatctgtaagcgggagaaccctcacgatgccgttgttttccaccccaaatttgtgggtaaaactctggaaacactccctgagaaaagtgttgtgggtacgtcgtcattgaggcgtgccgctcaacttcagagaaagttcccgcacttggaattccggtctatcaggggtaacttgaacactagacttcgtaaactcgacgagcagcaggaattctcggctattatcttggccactgctggactgcagaggatggggtggcataatcgggtgggccaaatcctgcacccagaggagtgtatgtatgccgtaggacaaggggctctgggcgttgaggtgcgggcgaaagatcaagacatcctcgaccttgtgggagtattacatgaccccgagacattgttgcgttgtattgcagagagggcctttttaagacacctggaaggtgggtgttcggtgcctgtagctgtccacactgccatgaaggatggacagttgtatctgactggtggtgtatggtcactggacggtagcgatagcatccaggagacgatgcaagcaaccatccacgtcccagcgcagcacgaagatggtccggaagacgatccacaactggttggcatcaccgcaagaaatatcccaaggggtccccagctggctgcccagaacctcgggatttcattggcgaaccttctcctgtctaagggggctaagaatattctggacgttgcacgacagctcaatgatgcccat

SEQ ID NO: 3951 - DNA, 1083 bp, Artificial Sequence
  derived and/or modified sequence
atgtccggtaacggcaacgctgcggctacggctgaagagaacagcccaaagatgagggtaatccgcgtgggcacaagaaagagccagctagccagaatccagaccgacagtgtagttgccacactgaaggcatcttacccaggcctgcagttcgagatcatcgcaatgtccacaaccggcgacaagattctcgacacggctcttagcaaaatcggagagaagagcctgtttacaaaggaactggagcacgccctggagaagaatgaggtggatctcgttgtgcattcactgaaagacctgccgacagtcctgccaccgggctttaccataggggccatatgcaagagggagaacccacatgatgccgtcgtcttccatcccaagttcgtaggcaagactctggaaaccttgcctgagaaatctgtcgttggaacctcctcgctgcgtcgtgctgcacagctgcagaggaaatttcctcatctggaattcaggtcaattagaggaaatctgaacacccgcctgcgcaagctggatgaacagcaggaattttctgctatcatattagccacagccggactacaaaggatgggctggcacaaccgggtcggccagatcctgcatcctgaggaatgcatgtacgccgtgggccagggggctctcggggtcgaggttcgagcaaaagaccaggacatactagacctggtaggcgtcttgcacgaccctgagactctgctgcggtgtatcgctgagagagcttttctgcggcatctcgagggaggctgtagcgtccccgtggcagtacacactgccatgaaggacggtcagctgtatctgaccggcggcgtctggtctctggatgggtcagattcaattcaggaaacaatgcaggccacaatacatgttcctgctcagcacgaggacggcccggaggacgaccctcagcttgtgggcattacagcccgcaacattccgcgaggaccacagctggcagcacagaacttgggaatttccctcgcgaacctgctgctaagcaaaggagccaaaaatatcctggatgtggctagacagctgaacgacgctcat

SEQ ID NO: 3952 - DNA, 1083 bp, Artificial Sequence
  derived and/or modified sequence
atgagcgggaacggaaatgcggcagcaacggcggaggagaactcgccaaaaatgcgggtcatcagggtgggaactcggaaaagccagctggcgaggatccagaccgattcggtggttgctaccctcaaggcctcgtaccccggactgcagttcgagatcatcgccatgtccactactggggacaagatcctggacaccgccctgtccaagattggagagaagtccctgttcaccaaagagctcgaacacgctctggaaaagaatgaggtcgacttggtggtgcactcactgaaagatctgccgacggtgttgccgccgggtttcaccatcggcgctatttgcaaacgggagaatccgcacgacgccgtggtgttccatccgaagtttgtgggaaagactctggagactctgccggaaaagagcgtggttggcacttcatcactcagaagggctgcgcagctccaacggaagttcccccatctggaattccgctcaatccgcgggaaccttaatacccgactgagaaaactcgacgagcagcaagagttttcggccataatcctcgctactgccggactgcaacggatgggatggcataatcgcgtgggccaaatcctccatccagaggagtgcatgtacgccgtgggccaaggagcactgggtgtggaagtccgcgctaaggatcaggatattctcgatctcgtgggagtcctgcatgacccggaaaccttgctgaggtgcatcgcagaacgggcattcctgcgccacctggagggcgggtgctcggtgccggtcgcggtgcataccgctatgaaggacggtcaactctacctgactggcggagtgtggagcctggacggatccgattcaatccaagaaacgatgcaggccactatccatgtgccagcgcagcacgaggacgggccagaggacgacccacagctggtcggaatcaccgcccgcaatattccccgcggcccgcagctggccgcacagaacctcggaatctcgttggcgaacctcctcctgagcaagggtgcgaagaatattctcgacgtcgcacgccaactcaacgacgcccac

SEQ ID NO: 3953 - DNA, 1083 bp, Artificial Sequence
  derived and/or modified sequence
atgtccggtaatggaaatgcagcagctactgcggaagaaaactccccgaaaatgagggtgatcagagtgggtactcggaaatcgcagctggcaagaattcaaaccgattccgtggtcgcaactctcaaggcatcatacccaggccttcaattcgaaatcattgctatgtccactacgggcgataagattctggatactgcattgtccaagatcggtgagaaaagccttttcaccaaggaacttgaacatgccctcgaaaagaacgaggtggaccttgtcgtgcactcgctgaaggacctgcctaccgtccttcctcctggctttaccataggtgcaatttgtaaacgggaaaaccctcatgacgcggtcgtgtttcatcctaagttcgtggggaaaacccttgagacgctgcccgagaagtctgtcgtcgggacctcctcacttaggcgcgcggcacaactccaaagaaagtttcctcatctggaatttcggtcaatacgcgggaacctgaacactagactcagaaagctcgatgaacaacaagaatttagcgccatcatactggcaacggccggacttcagcgtatggggtggcacaatagggtgggacaaatactccaccccgaagaatgcatgtacgccgtgggtcagggtgcactcggagttgaagtccgcgcgaaagaccaagatatacttgacctggtgggagtgcttcacgaccccgaaaccctccttcgatgcatcgccgaacgagcatttctcagacatctggagggtggatgttcagtgcctgtggcagtccacaccgccatgaaagatggacagctctaccttaccgggggagtttggtcgttggacgggtccgattccattcaagaaactatgcaagcaaccattcatgtgcctgcacaacatgaagatgggcctgaagatgatcctcaacttgtaggaatcaccgccagaaacattcctaggggtccacaacttgcagcacagaatctcggaatttcccttgcaaatcttcttctttcaaagggtgccaagaacatcttggacgtggcaagacagttgaacgacgcccac

SEQ ID NO: 3954 - DNA, 1083 bp, Artificial Sequence
  derived and/or modified sequence
atgagcggcaatggcaatgcagctgctacagctgaagaaaattcccctaagatgagggtcatacgagttggaacccggaagagccagctcgctaggatccagaccgactcagtcgtggcaaccctgaaggctagctaccccggcttacagttcgagatcattgccatgtcaacaaccggggataagatcctggacaccgccctttccaagatcggagagaaaagcttgtttactaaggagttggaacatgctctagagaagaacgaagtagacctggtcgtgcatagtctgaaggacctcccaactgttttgccaccagggttcacgattggggctatttgtaaaagggagaacccgcatgacgcagtagtctttcatcccaagttcgtgggcaagacgctcgagacgctgccggaaaagagtgtggtcggaacgtccagcctgcgtcgcgctgcgcaactgcagagaaaatttccacatttagagttcaggtcaatcaggggtaatcttaacaccaggctccgcaagctggacgagcagcaggaattctccgccataattctcgctacagccggactgcagagaatggggtggcataacagggtgggccaaatcttgcatccagaagagtgcatgtatgcggtggggcagggggcgcttggagtggaggtgagagccaaggatcaagacatccttgatctagttggggttctgcacgatcccgaaaccctcttaaggtgcattgctgaacgggcgttcctacgccatctggagggaggttgtagcgtgccagtggccgtgcacacggccatgaaagatggacagctttacctcacaggaggcgtctggtcattggatggttcagacagtatccaagaaacgatgcaggccaccatacacgtcccggcacaacacgaagacggcccagaagacgatccccaactagtcggcatcaccgcccgaaacatccctagagggccccaactggccgctcaaaaccttggcatctctctggccaatctgctacttagtaagggggcaaagaatattcttgatgtagcacgccagttaaacgatgcccac

SEQ ID NO: 3955 - DNA, 1083 bp, Artificial Sequence
  derived and/or modified sequence
atgtctggcaatggtaacgcagcagcaactgcagaggaaaattcacctaagatgcgcgtcattcgcgttgggacccggaagtcccagctggcaagaatccagaccgattccgtggtggccactcttaaggcatcgtaccctggtctgcagtttgaaatcattgcaatgtccactactggagacaaaattctggataccgcactgtcaaagataggcgaaaagtcgcttttcaccaaagagctggaacatgcgctggagaagaacgaggtggatcttgtggtgcattcgttgaaggatttgcctactgtgcttccacccggatttactattggcgcgatctgtaagcgtgaaaaccctcatgatgcggtggtgtttcatccgaaatttgtgggtaaaacgctcgaaacccttcctgagaagtccgtcgtcggcacctcatcgttgcgacgagccgcacagctccaaaggaagttcccccatcttgaattcagatcaattcgcggcaatcttaacaccaggctcagaaagttggacgaacagcaggaatttagcgcaattatcctggccaccgcgggtctgcagagaatgggttggcataatcgagtgggacagatcctgcatccggaagaatgtatgtacgcagtcggacaaggagctctgggcgtggaggttcgcgcaaaggaccaggacatactggacctggtcggagtcctccacgacccagaaactcttctgcggtgtatcgctgaacgggcatttcttagacatctggagggagggtgttccgtccccgtggcagttcatactgctatgaaggacggccaactttatcttaccggaggagtgtggtcccttgatggaagcgacagcatacaggagactatgcaagcgactattcacgtcccagcccagcacgaagatggtcctgaggatgacccacagctggtgggaatcacggcaagaaatatcccacgagggccccaactcgcagcacagaatctgggaatctcactggccaacctcctgctttccaagggagcaaaaaacatcctggatgtcgcaagacaactcaacgatgcacac

SEQ ID NO: 3956 - DNA, 1083 bp, Artificial Sequence
  derived and/or modified sequence
atgtcgggaaatgggaacgcagcggcaaccgctgaggaaaactcccccaaaatgcgcgtgatcagagtgggcactcgcaaatcacagctggcacggattcagactgactctgtcgtcgcaactctcaaggcaagctaccctggcctgcaatttgagattatagcaatgtcaaccaccggagacaagattttggatactgctctgtccaagattggagaaaagagcttgtttaccaaagaactcgaacatgccttggagaagaacgaggtggatctggtggtgcattcgctgaaggatcttcctaccgtgctcccgcctggatttacgatcggcgcaatttgtaagagggaaaaccctcatgacgcagtggtctttcaccccaaatttgttggaaagaccctggagactctgccagagaagtcggtggtgggaacttcatcactgcggcgggcagcacaactgcagcgcaagtttccccatcttgaatttcgatctatccgcggtaatctgaacacgaggctgaggaaacttgatgagcagcaagagttttcggcaataatccttgcaaccgcaggactccaacgaatggggtggcacaacagagtaggccaaatccttcatcctgaggagtgtatgtacgcagtggggcaaggcgctttgggtgtcgaagtgcgggccaaggatcaggatatccttgatctggtgggagttctccacgatccagaaactctgcttcggtgtatcgccgagagagcctttctccgacatcttgaaggtgggtgtagcgtgccagtcgcagtgcacaccgcaatgaaggacggtcagctgtaccttaccggtggtgtctggtcactggacggatccgatagcatacaagaaaccatgcaagccaccatacatgtgcctgcacagcatgaggacggaccggaggatgacccacagcttgtgggaattaccgcgcgcaacattcctagaggaccacaactcgctgcacagaatcttggaatttccctcgctaaccttttgctttccaagggtgcgaagaacattcttgatgtcgcaagacagttgaacgacgcacac

SEQ ID NO: 3957 - DNA, 1083 bp, Artificial Sequence
  derived and/or modified sequence
atgtcaggaaatggaaatgcagctgctactgctgaagaaaattcaccaaagatgcgagttattcgagttggaactcgtaaaagtcaacttgcacgaattcaaacagattcagttgttgctacattaaaggcatcatatccaggtcttcaatttgaaatcattgcaatgtccacaacaggtgataaaattcttgatactgctttatcaaaaattggagaaaaatctctttttactaaagaattagagcacgcacttgaaaaaaatgaagttgatttagtagttcatagtcttaaagatcttccaacagttttgcctcctggatttactattggtgcaatttgtaaaagagaaaatccacatgatgcagtagtattccatccaaaatttgttggaaagaccttggaaacacttccagaaaaaagtgttgtaggaacttcatcattacgtcgagcagctcagttacaaagaaaatttccacaccttgaatttagaagtattagaggaaatcttaatacaagattaaggaaattagatgaacaacaagaattttcagcaattatcttagcaactgcaggtcttcagagaatggggtggcataatagagtaggtcaaatccttcatcctgaagaatgcatgtatgccgttgggcaaggggcattgggagttgaagtaagagcaaaagaccaagacattcttgatttagttggagttttacatgatcctgaaactttgttaaggtgtatcgctgaaagagcattccttagacatttagaaggaggatgtagtgttcctgttgctgtccatactgctatgaaagatggtcaactttatcttactggaggagtgtggagtcttgatggaagtgattcaattcaagaaacaatgcaagcaactattcatgttccagctcaacatgaagatggaccagaggatgatccacaattggttggaattacagctagaaacattcctagaggacctcaattagctgcacaaaatttaggaataagtttagctaatttattattatcaaaaggagctaaaaatattcttgatgtagctagacaattaaatgatgctcat

SEQ ID NO: 3958 - DNA, 1083 bp, Artificial Sequence
  derived and/or modified sequence
atgtctggcaacggaaacgccgctgctactgctgaggagaactcacctaagatgcgcgttatccgtgtaggaaccaggaagtcgcaattggcacggatacagactgatagtgtcgtagccactctcaaagctagttatcctggactgcagtttgaaatcattgctatgagtacaactggcgataagattctggataccgccctctccaaaattggtgagaagtctctcttcaccaaggaattagagcatgctttggaaaagaatgaggttgaccttgttgtgcattccttaaaggatttgccgaccgtacttcctccgggtttcaccatcggtgcaatctgtaaaagagaaaatcctcacgatgcagtcgtattccaccctaaattcgtcgggaaaaccctcgaaacgttgccggagaaatcggttgtgggtactagctcactcagacgtgcagcccaattacaaagaaagtttccacatttagaatttcgaagtatccgcggcaacttgaacactcgcctccgaaaactagacgagcagcaggagttttctgctatcattttggctaccgctggccttcagagaatgggttggcataaccgggttggccaaatacttcatcctgaggaatgtatgtatgctgtaggacaaggagctcttggtgttgaagttagagctaaagatcaggatattctggacctagttggtgttctgcacgatcccgaaacgctccttagatgtattgctgagcgcgctttcctacgccacttagaaggtgggtgctcagttccggtggcagtgcatacagctatgaaagacggacagctgtatctcactggaggcgtctggtcactagatggttcagattcaattcaggaaactatgcaagctactatccatgtccccgctcagcatgaggatggacctgaagatgatccacaactggttggcattaccgctcgaaacatcccacgaggtcctcaactcgccgcccaaaacttgggaatctccctcgcaaaccttcttctctcaaaaggcgcaaagaacatacttgacgtagctcggcaacttaatgatgctcat

SEQ ID NO: 3959 - DNA, 1083 bp, Artificial Sequence
  derived and/or modified sequence
atgtcgggaaacggcaacgctgcagcgactgcagaagagaactctcctaaaatgagagtgattcgagtgggaaccagaaaaagccaactcgctaggattcaaactgatagcgtggtggctaccctgaaggcctcgtaccctggacttcaatttgaaatcattgcaatgtcgacgacgggagataagattcttgacactgcactctccaagataggcgaaaagtctctttttaccaaggaacttgaacacgcacttgagaagaatgaggtcgatcttgtcgtgcactccctgaaggatctccctactgtgcttccgccaggttttacgatcggtgcaatttgcaagagggagaacccgcacgacgccgtggtatttcatcctaagtttgtgggtaagactcttgaaaccctgcctgaaaagtcggtcgtgggcacctcgtcgcttcgtcgcgcagcacaattgcagcggaagtttccacatctcgagtttcggtccattcgcggtaatcttaacactcgactcagaaaactggacgagcaacaagagttctcggccatcatactcgccactgcaggtctgcagcggatgggatggcataacagagtgggacaaattcttcatccagaagaatgtatgtacgcagtgggacagggtgccctgggagtggaggtccgcgccaaagaccaagacattcttgatctggtgggcgtgctccacgatccagaaacccttctgagatgcattgcagagcgggcctttcttagacatctggagggaggatgctcggtgcccgtggccgtgcatactgcgatgaaagacggacagctttacctgactggcggtgtttggtcgctcgatggatcagattccatacaggaaaccatgcaagcaaccatccacgtcccagcacaacatgaagatgggccggaggacgacccacagcttgtcggtattaccgcacgtaatatccccagaggacctcagcttgccgcacagaacctgggtatatcgctggcaaacctgctgctgtccaagggtgcaaagaacatcctcgatgtggcacggcaactgaacgacgcacac

SEQ ID NO: 3960 - DNA, 1083 bp, Artificial Sequence
  derived and/or modified sequence
atgagcggcaacggaaacgccgcggcaaccgctgaggagaactccccaaagatgcgcgttattcgggttggtactcgaaagtctcaactcgcccgaattcagacagatagcgttgttgccactctgaaagcctcctatcctggcctccaattcgagatcatcgccatgtccactactggagataagatactcgacacagccctttctaagattggtgaaaaaagtctcttcacaaaagagctagagcatgcccttgagaagaacgaggtggacttggtagtccactcccttaaagacctgcctaccgttctgccccccgggtttactattggtgccatatgcaagcgtgagaacccgcacgacgccgtagtgtttcacccgaaatttgttggaaagacccttgagacattacccgagaaatcggttgtcggtacgagctcgttgcgccgagctgcccaattgcaaaggaagtttcctcaccttgagttcaggtcaattaggggaaatctcaacacgcgcctccggaaacttgacgaacagcaggaattttcggcaatcattcttgctaccgctggtctccagcgtatgggatggcacaacagggttggtcagatattgcaccccgaggaatgcatgtacgctgttggccagggcgcactaggcgtagaggtgagggcgaaggatcaggatattttggatctggtcggagtgcttcacgatcccgagacattgctgagatgtattgccgagagagcgtttctcagacatcttgagggcggttgcagtgtccctgtcgctgtgcatacggccatgaaagatgggcaattgtacttaactgggggcgtttggagcttggacgggtccgattctatccaagagactatgcaggcgacaatccatgttccggcccaacacgaggacggccccgaggatgacccacaacttgtcggcattactgcaaggaatattccaaggggcccgcagctagccgcccaaaatcttggcatcagtttggctaatcttctcctgagcaagggcgccaaaaacatcctcgatgtggcgcgacagcttaatgatgcccac

SEQ ID NO: 3961 - DNA, 1083 bp, Artificial Sequence
  derived and/or modified sequence
atgtcagggaacggaaatgccgccgcaacggctgaagaaaactctccgaagatgcgagtcatacgcgtgggaacccgaaaaagccaacttgcaaggatccaaacagacagcgtcgttgcaacgttgaaagccagctatcccgggttgcagtttgaaattatagctatgagcaccacaggggacaaaatacttgacacagccctgtctaagataggagaaaagagcctgttcactaaagagttggaacatgctctcgagaaaaatgaggtggatctcgtggtgcactcactgaaggacttgcctacagtgttgcccccgggcttcaccatcggtgcgatttgtaagagagagaatccacacgacgccgtggtgttccaccccaaatttgtgggtaagaccctagagacattaccggaaaagagcgttgtgggcacctcttccctccgtcgcgccgctcagttgcaacgaaaatttccccaccttgagttccggtcgatcagaggaaacctgaacactaggctgagaaaacttgacgagcaacaggagttttctgctatcattctggctacggctggactccagaggatgggctggcacaatcgtgtgggccagatcttacacccggaagaatgcatgtatgccgtgggacagggcgctctgggtgtggaggtacgggccaaagatcaggatattctggacttagtaggggtccttcatgatccagagacactccttagatgcattgcggagagagctttcctacggcatttggaggggggatgctccgtgcctgtggcagttcacactgctatgaaggacgggcaactgtatctaaccggtggggtatggtcactggacggctccgatagcattcaagaaactatgcaggctaccatccatgttccagcgcagcacgaggatggtcctgaagatgatcctcagttagtgggcattactgccagaaatatcccaaggggcccacagctggccgcccaaaatcttggcatctccctggccaatttactattgtccaagggggccaaaaatatcttggatgttgcacgtcagcttaatgatgcccat

SEQ ID NO: 3962 - DNA, 1083 bp, Artificial Sequence
  derived and/or modified sequence
atgtcaggtaatggaaacgcagctgcaaccgccgaggaaaacagccccaaaatgcgagtcatcagagtggggaccagaaagtctcagcttgcgcgcattcagacggatagtgtcgtggcaaccttgaaggctagttatcctggcctgcagtttgagatcatcgcaatgagcacgacaggtgacaagatcttagacaccgctctgagcaagattggcgaaaaatctttgtttacgaaggagctggaacacgctctcgagaagaacgaagtggacttggtggtgcactctttaaaggacctacctaccgttctaccccccgggtttaccattggagccatatgtaagcgggagaatccgcatgatgctgtagtgttccatcctaagttcgtcggcaagacgctagaaacgctgcccgaaaaatccgtggtgggcacaagcagcttaagacgcgccgcacaactacagcgaaagttcccacatttagaattcagatcaattagaggcaacctcaataccagactgcgcaaacttgacgagcagcaggagttcagcgcgattattcttgctaccgcgggtttgcagcgtatgggttggcataatagagtgggtcagatcctgcatccagaagagtgtatgtatgctgtcggtcagggggccctgggggtggaagtacgggctaaagatcaggacatcctcgacttggtgggtgtgctccacgatccagaaacgctgttaaggtgcatagctgaacgggcctttctccgccatctagaaggcggctgtagtgtcccagtggcagtccacacagccatgaaagatggtcagttgtatctcacgggcggagtgtggtctttagacgggagcgattcgatccaggaaaccatgcaggccacgattcacgttccggcacagcacgaggacggtcctgaggatgaccctcagttggtaggcatcactgcccggaatataccgaggggcccgcaactggccgcccaaaatctcggcatttccctggccaatctcttactgagtaagggcgccaagaatatcttggatgtggcaaggcagttaaacgatgcccac

SEQ ID NO: 3963 - DNA, 1083 bp, Artificial Sequence
  derived and/or modified sequence
atgtctgggaatgggaatgctgctgctactgccgaggaaaactctccaaaaatgcgcgttatcagagtcggcacaagaaagagccaacttgccagaatccaaacagactccgtggtggcaacgctcaaggccagctatcctggccttcagtttgaaattatagccatgtcaaccaccggagataagattcttgacaccgcactcagcaagattggggagaagagtttgttcaccaaggagctggaacatgccctagagaagaacgaggttgatcttgtggtgcatagtctgaaggatttgcccacagtgctgcccccggggtttaccatcggtgcaatctgcaaaagggagaacccccatgacgccgtggtattccatccaaaattcgtcggcaagacactggagaccttgccagagaaatccgtcgtaggaacaagcagcttgaggcgcgccgcacagctccagagaaagttcccccatctggaatttagatctatccgtggtaatctaaacactaggttaaggaaactggacgagcagcaggagttctcagccatcatattagccaccgctggcctccagcgcatgggatggcataacagggttggtcagatcctccatccagaggaatgtatgtatgcggtgggccagggcgccctgggggtcgaagtccgtgcgaaggatcaagatatcctggacctggtcggagtcctccacgaccctgaaaccctccttaggtgtatcgctgaaagagccttcctccgccatctcgagggaggctgcagcgttcccgtcgcggtccacaccgctatgaaggacggacaactttatcttacaggaggtgtatggtcattggacggatcagatagtatccaagagactatgcaggcaacaattcacgtacccgctcaacatgaagacgggccagaagacgaccctcagcttgtcggcattactgctaggaacatcccacgcggcccacaactcgccgcacagaaccttggaatcagcctcgccaatcttttgctaagcaagggagcgaaaaacattcttgacgttgctaggcaactcaatgatgcgcat

SEQ ID NO: 3964 - DNA, 1083 bp, Artificial Sequence
  derived and/or modified sequence
atgtccggaaatggaaatgccgcagccacagctgaagaaaattccccaaagatgagagttatccgtgtaggaactagaaaatctcaacttgctagaattcagactgactcagtggtggcaacgcttaaggcatcctatccgggactgcaatttgaaattattgcaatgtctacaaccggagataaaatcctcgatacggctttatcaaaaatcggagagaaatcattattcaccaaagaattggaacatgctcttgaaaaaaatgaagtggacttagttgttcatagtttaaaggatctaccaacagtactcccaccaggttttactataggagcgatttgcaaaagagaaaacccacatgacgcagtggtattccatcccaaatttgttggaaaaacacttgaaactctcccggaaaagtcagttgtcggaacaagttctttgcgacgagcagcacaacttcaacggaaatttccccacctggaatttcgtagtatacgaggaaatttgaatacacgccttcgaaaactcgacgaacaacaagaattttctgccatcattctcgccacggccggattgcagcgtatggggtggcataatcgggtgggacaaattctccacccagaagaatgtatgtatgctgtgggacagggtgccttgggagttgaggttcgggcaaaggatcaagatattcttgatcttgttggcgttttgcatgatccggaaactcttttgagatgtatcgccgagcgtgctttcctaagacatcttgagggagggtgttccgtgccagtcgccgttcatacagcgatgaaggatggacaactttaccttaccggtggagtctggtctttggatggaagcgatagtattcaagaaaccatgcaagcaacgattcacgtaccggcacaacatgaggatggccctgaggacgacccacaacttgtaggaatcacagctcgaaatattcctaggggacctcaattagcagcacagaacctaggaattagcctagcaaatctcttgctatcgaaaggagccaagaacatcttagatgtcgccaggcaattaaatgatgctcat

SEQ ID NO: 3965 - DNA, 1083 bp, Artificial Sequence
  derived and/or modified sequence
atgagtgggaacggtaacgccgccgcaacagccgaggagaactcccctaaaatgcgagtaatccgtgttggtactcgaaaaagccaactagccagaatccagacagactctgtggtagccactttaaaagccagttatcccggcctgcagtttgaaattattgctatgagcacaactggggataagatcttggatactgcgctgtcaaagataggagagaagagtctgttcactaaggagttggagcacgctctcgagaagaatgaggtcgacctagtcgtgcactctcttaaagaccttccaacggtgttgcccccaggattcactattggcgctatttgcaagcgagagaacccacatgacgccgtcgtgttccaccctaagttcgtgggcaaaacccttgaaacactgccagaaaagagcgtggtgggcacgtcaagcctgcgccgggctgcccagttacaacggaagtttccacatttagagtttcggagcatacggggcaacttaaacacaagactgcggaaacttgatgagcagcaggagttcagcgccatcatacttgctaccgctgggcttcaacgtatggggtggcacaaccgggttggacagatcctgcatcccgaagaatgtatgtacgcagtaggccagggcgcgcttggagtcgaggtgagagcgaaggaccaggatatactggacttagtgggggtactccatgatcccgaaactctgcttcgatgtatagcggagcgggccttcctcagacacctcgaaggcgggtgttccgtgcctgtcgctgtgcataccgccatgaaagatggccagctgtatctgaccgggggggtgtggtcgcttgacggctcggactccatccaggagacaatgcaggccaccatacacgtacccgcgcagcacgaagacgggccagaggacgatccacagctggttgggataacagctcgaaacatacctagaggcccccagctggcggcacagaaccttgggataagcctggctaacctcctgctgtccaaaggagctaagaatattttagacgtggcacggcaattgaatgatgcccat

SEQ ID NO: 3966 - DNA, 1083 bp, Artificial Sequence
  derived and/or modified sequence
atgagcggcaatggcaacgcagccgcgactgccgaggagaacagccccaaaatgagagtgatcagggtgggcaccagaaaatctcaacttgctcgcatccaaactgattcggtcgtcgccacattaaaggcgtcctatccaggcctccagttcgagataatcgccatgtcaacaactggggacaaaatcctggatacggccttgagtaaaataggcgaaaagagcttgtttacgaaggaactcgagcatgctctggaaaagaatgaggtggacctcgttgtacacagtctcaaagatctgcctaccgtcctgcctcctggcttcactatcggcgcaatttgtaagcgcgaaaacccacacgacgccgtggtgtttcatcccaaattcgtgggtaagaccctggagactcttccagagaagtccgtcgtgggcacgtcaagcctgagacgtgcagcacagttacagagaaaattcccccacctcgaatttagatcgatccgggggaacctcaacactcggcttcggaaactggatgagcagcaggagttttctgcgataatcctggcaaccgcgggcttgcagaggatgggatggcacaaccgggtgggccagatactccatccagaggaatgcatgtacgcagtgggacagggagctttgggcgtggaggtccgcgccaaggatcaggatatcttggacctcgttggcgtgctgcatgatcccgaaacactccttcggtgcattgccgaacgtgccttcctaagacatttagagggcgggtgttccgtccctgtagcagtgcacactgccatgaaagacggtcagctgtacctcactggtggggtgtggtctcttgacggttctgacagcatccaggagacaatgcaagccacaattcacgtccccgcacagcacgaggacggacccgaagacgatccccagcttgttgggatcactgcgcggaatatccccagggggcctcagctggccgcccagaacctgggcatctctctggcaaacttgctgcttagcaaaggagccaagaatatactggacgtggcccgacagctgaatgatgctcac

SEQ ID NO: 3967 - DNA, 1083 bp, Artificial Sequence
  derived and/or modified sequence
atgtcaggcaatggaaacgccgcagctactgcagaagaaaatagtcccaaaatgcgagtcatcagagtgggaacacgtaagagccaactggcccggattcagacggatagtgttgtcgccacgctgaaggccagttatcctgggcttcagttcgaaataattgccatgtcaacgactggggataaaatcttagacacggctttatctaaaattggagaaaaatcactcttcacaaaagaacttgagcacgctttggaaaaaaacgaagttgatttagtcgtgcactccctaaaagacttaccgacagtattaccgccgggctttacaatcggcgctatttgcaaaagagagaatcctcacgatgccgttgtctttcaccctaaattcgttggcaaaacattggagacgctgcctgaaaaatctgttgtgggcacaagctccctgcgtcgtgcagcccagcttcagagaaaatttccgcatctagagtttcgttcaatcagaggtaacttgaatactcgtcttcgtaaattggatgagcaacaagaatttagcgctatcatcttggcaacagccggactgcagaggatgggctggcataatcgggtgggccagattttacatccagaagaatgtatgtatgcggttggacagggtgccctgggcgtggaagttagggctaaagatcaagatatcttagatttagtgggcgttctccatgatccagagacgttgttgagatgtattgcagaacgggcttttttgagacatttagaaggtggttgttcagttcctgttgcggttcatacggccatgaaagatggacagctttatttaacaggaggtgtttggtcgctggatggtagtgacagcattcaggaaactatgcaagctactattcatgtgccggcccagcatgaggacggacctgaagatgatccgcaattggtaggaatcacggctcgtaatatcccgagaggtccgcaattagccgcacaaaacctgggaatctcactcgctaatctgcttttatcaaagggagctaaaaatatactggatgttgcccggcagcttaatgacgcacat

SEQ ID NO: 3968 - DNA, 1083 bp, Artificial Sequence
  derived and/or modified sequence
atgtcaggtaacgggaacgcagcagcgacggcggaggaaaattcccccaaaatgcgggttatccgtgtgggcacaagaaagtcccagttagcacgcatccagaccgactcagtggtcgctactctgaaggcaagctaccctgggctccaatttgaaattattgccatgagcaccacgggcgacaaaattctcgacaccgcactgagtaaaattggcgagaagtcactcttcacaaaggagctggagcacgccttggaaaagaatgaggtggaccttgtggtacatagcttaaaggacctgccaaccgtgctgccccctggatttaccatcggggccatttgcaaacgagaaaacccccatgacgccgttgtgtttcaccctaagtttgttgggaagaccctcgaaaccctaccggagaaatccgtggtcggaaccagctctctgcgccgtgccgcccagctccagcgcaagtttcctcacctcgagtttagatccatcagagggaatctgaataccagactgagaaaattggacgaacagcaggagttttctgccatcatactggcgaccgccggcttgcagagaatgggatggcataaccgcgtgggccagatactgcatcctgaggaatgtatgtacgccgtcggtcagggcgctctgggagtagaggtgcgggctaaggaccaggacatccttgatctagtgggagtgctgcacgatcccgagaccctcctccgatgtattgccgagcgggcatttctccggcaccttgagggaggctgttccgtccctgtggccgtccatactgctatgaaagacggccaactctaccttacaggaggagtctggagtctggatggatccgattccatacaagagactatgcaggcaaccatccacgtgccagcccaacacgaggacggcccagaagatgaccctcaactagtaggcataacggcacgaaacattcctcggggtccccagcttgccgcgcagaatctcgggatctccctagccaatctccttctgagcaagggtgccaagaatatactggacgtggcaagacagctcaacgacgctcat

SEQ ID NO: 3969 - DNA, 1083 bp, Artificial Sequence
  derived and/or modified sequence
atgtcaggaaacggaaacgctgccgcaaccgcagaggaaaattcccctaagatgagagtgatacgggttggaacccgaaagtcgcagcttgctcgtattcaaaccgacagcgtcgtcgcgactcttaaagcatcgtacccggggctccagtttgaaatcatagcaatgagcaccactggagacaaaatactggatactgcactgagcaaaatcggggaaaagtcactgtttactaaggagttggaacatgcgctggagaagaacgaagtggatttggttgtgcattccctcaaggatctgcctaccgtcctgccacctggtttcaccataggagccatatgtaagagggagaatccccacgacgcagtggtgttccatcctaaattcgtcggaaagacgctggaaactcttccagagaagtcagtggtggggacctcctcgcttcgccgggcggcacagcttcagagaaaattcccccatctcgaattccggtcgattagaggaaatcttaatactaggctcagaaagctggatgaacaacaggaatttagcgcaatcatccttgcgacggccggcctgcagcggatgggatggcacaacagggtcggacagatcctccaccctgaggaatgcatgtacgcggtcgggcaaggtgcacttggagtggaggtgagggcaaaggatcaagatattctggatttggtcggcgtcttgcatgaccctgagactttgctccgatgtatagcggaacgggcatttctgcgtcatttggaaggaggctgcagtgtgccagtggctgtccataccgcaatgaaggatggtcaactttaccttactggaggggtgtggtcacttgatggttcggactcgattcaagagactatgcaagccaccatccatgtgcctgcacaacatgaagatggtccagaagatgatccccagctggtgggcatcaccgcacgcaatatccctcggggacctcagctggcagctcaaaatctgggtatctcgctggcaaacttgcttctctccaaaggagccaaaaacatccttgatgtcgccaggcaacttaatgatgcccat

SEQ ID NO: 3970 - DNA, 1083 bp, Artificial Sequence
  derived and/or modified sequence
atgagcggaaacggaaacgccgccgcgactgctgaagaaaactcccctaagatgagggtgatccgagtggggactcgcaagagtcaactcgcccggatccagactgattcggtggtggccactctgaaagcctcatacccgggtctgcaatttgagatcatcgcaatgagcacgaccggtgacaagatcctcgatactgcgttgtccaaaatcggagagaagtccctgttcactaaagaactcgaacatgcgctggagaaaaatgaggtggacctggtggtgcattccctcaaggacctcccgaccgtgttgcccccagggttcaccatcggggcaatctgcaagcgggagaacccacatgatgccgtggtgttccacccgaagtttgtcggaaagactctggagacgctccctgaaaaatcggttgtaggtacttcatcacttcgccgcgccgcacaattgcagcgcaagttcccacatcttgagttccgtagtatcagaggaaatctgaacacccgccttcggaagctcgatgaacaacaggagttttcggcaatcatcctggccactgctggcctccaaagaatgggatggcacaacagggtggggcagatcctgcacccggaagagtgtatgtacgcggtgggtcagggagccttgggcgtcgaggtgcgcgccaaggaccaagatatcctggacctcgttggcgtccttcacgatccggagactctgctgaggtgcatcgccgaaagagcgtttcttcgccacctcgagggcgggtgctccgtcccagtggctgttcatactgccatgaaggatgggcaactctacctcaccggcggggtctggtcgctggacggctccgattccatccaggaaactatgcaggcaaccattcacgtcccagcacagcacgaggacggacccgaggacgacccgcaacttgtgggaattaccgcgaggaatatcccgcgcggacctcagctcgccgcccagaatttgggaatttcgctcgcgaacctgctcctgtcgaaaggagccaagaacatcctggacgtggctcggcagctgaacgatgcccac

SEQ ID NO: 3971 - DNA, 1083 bp, Artificial Sequence
  derived and/or modified sequence
atgtccggtaacggcaatgcggcggccaccgcggaggagaatagtccaaagatgagggtcattagggtgggcacgagaaagagtcagctggcgcgaattcagactgattccgtcgttgccacgttgaaggctagctaccccgggctccagttcgaaattatagcaatgtctactacgggggacaaaatcctcgacacagctcttagtaagattggtgaaaagtctctgtttacaaaagaactcgagcacgcactggagaaaaacgaggtagacctggtcgttcattccctgaaggatcttcctaccgtactgcctcctggatttaccattggggcgatttgcaagcgcgaaaatccccacgatgccgtcgtgtttcatcccaagtttgttggcaagaccctcgagacccttcccgaaaagtccgtcgtaggtaccagttccttgcgccgagccgcacagttgcagcgcaaatttccccatctggaatttaggagtataagggggaatctgaacacaagactcagaaaactggatgagcaacaggaatttagtgcaatcatacttgcaaccgcagggctgcagcggatgggctggcataacagagtcgggcagatcctgcacccggaggagtgcatgtacgctgtcggccaaggcgctctgggggtggaggtgagggctaaagatcaggacattttggatctcgtcggggtactgcacgacccggaaacattgcttcggtgcattgccgagagagcctttctccgacaccttgaagggggatgtagtgtgcctgttgcggttcacaccgcaatgaaggatggtcagctgtacctgacgggcggagtttggtctttggacggaagtgactccatccaggagacaatgcaggccacaatccacgtcccagcccagcacgaagacggtcccgaagatgacccccaattggttggaatcacagcccgaaacattccccgcggaccccaactggcggcccagaacctgggaatatctttggccaacttgctgttgagcaagggcgcaaaaaacattctggacgtcgcccgacaactgaacgatgctcat

SEQ ID NO: 3972 - DNA, 1083 bp, Artificial Sequence
  derived and/or modified sequence
atgtcgggaaatgggaatgcggcagcaactgcagaagaaaacagcccaaaaatgagagtcatcagagtgggtactcgcaagtcgcagctggctagaattcaaactgattctgtggtggcgacgcttaaggcatcataccctgggctgcagtttgagattatcgcgatgtcaactaccggagacaaaattcttgataccgctctgtccaaaattggcgaaaagtcactcttcactaaagagctcgaacacgcgcttgaaaagaacgaagtcgatctggtggtccatagcctgaaggatttgccaactgtcctgcccccagggttcactatcggcgcaatttgcaagagagaaaacccccacgatgcggtggtgtttcacccgaagtttgtggggaaaacccttgaaacgctccctgaaaaaagcgtggtgggtacttcgtcccttcgccgcgcggcacaactccaacgtaagttcccccacctggaatttagatcgattaggggtaatcttaatacgagacttagaaaactggacgaacagcaagagttttcggcaatcatccttgcaactgcgggtctgcagcggatgggatggcataaccgggtgggtcaaattctgcatcctgaggagtgcatgtacgcagtggggcagggcgccttgggagtcgaagtgcgagcaaaggaccaagatattctcgacctggtgggcgtcttgcatgaccccgaaactcttctgcggtgtattgctgagcgagcattcctgagacatcttgagggtggatgctcagtcccagtcgcagtacatactgcaatgaaggacggtcagctctatctcaccggaggcgtctggtcgcttgacgggtccgattccattcaggaaactatgcaagcaactatccatgtgcccgcacaacatgaggacggtccggaagatgatccccaactggtgggcattaccgcccggaatattcctcgtggacctcagctggcagcgcagaaccttggcatttcactggccaatcttctgctttccaaaggagcgaagaacattcttgatgtcgcacgacaactgaacgacgctcac

SEQ ID NO: 3973 - DNA, 1083 bp, Artificial Sequence
  derived and/or modified sequence
atgtcagggaacggaaacgcagccgcgaccgccgaggagaattctcctaagatgcgggtcattcgggttggtacaaggaaatctcagctggccagaattcaaaccgactctgtggtcgcgaccttgaaggcctcataccccggacttcagttcgagatcattgctatgtcaactaccggcgataaaattctcgatactgccctcagcaaaattggagaaaagtctctgttcactaaggagctagagcacgccctcgaaaagaacgaagtggatttggtggtgcactccttaaaggatcttccaaccgtactgcccccaggctttaccatcggagccatctgcaagagagagaatccccacgatgctgtagtattccaccccaagtttgtggggaagacactggagactctcccggagaagtctgtcgttgggacatccagcttaaggagggcagcccagctgcagcgaaaatttcctcacctagaattcaggtctatcagggggaatttaaatactcgcctccgaaaactcgacgaacagcaggaattcagcgcaataatactggccacagcgggattgcagagaatgggctggcacaatcgcgtagggcagatcctgcatccggaagagtgtatgtatgccgttgggcagggggctttaggagtagaggtccgtgccaaggaccaggacattctggacctcgtcggggttctgcacgatccagaaacgttgctgcggtgcatcgcagaacgggcctttctccggcacctcgaaggtggttgctcggtgcccgtggccgtccataccgcgatgaaagacggtcagttgtatctgacaggaggcgtgtggtcactggatggatctgactctatccaggagactatgcaggcgacaatccacgtcccagcacagcatgaagacggccctgaagacgatccacagcttgtaggcatcacggcaagaaacatccccagggggccgcaactggcggcccaaaacttgggaatcagtctggcgaatctgttgctgtcaaagggggcaaagaatatcttggacgtcgcaagacaattgaatgacgctcat

SEQ ID NO: 3974 - DNA, 1083 bp, Artificial Sequence
  derived and/or modified sequence
atgtctggcaacggtaacgctgcggcgacagctgaagagaactctcccaaaatgcgcgtaatccgtgtgggcacaaggaaatcccaattggcccgtatacagaccgattcggtggttgccaccctgaaggcgagttaccctggtctccagtttgagattattgctatgtcaacgacgggcgacaaaattctcgacaccgccttgtccaagatcggtgagaaaagcttgttcacaaaggagttagaacacgcgttagagaagaatgaagtcgatctggtagtacacagcctcaaggatctgccaaccgtcctgccgcccggattcacgattggagccatttgcaaacgcgagaacccgcatgacgccgtggttttccatccgaagttcgtcggcaagaccctcgagaccctgccggagaagtctgtggtaggaaccagtagtttgcgcagggctgcgcagctgcagcgtaaattcccacacttagaattccgctcgattcgcggcaacttgaatacccgtctaagaaaattggatgaacagcaggagttttcggccatcattctggcaaccgccggactccagcggatgggctggcacaatcgtgtgggccagatattgcacccagaagaatgcatgtatgcagtcgggcagggcgccctgggagtggaggtcagggccaaagatcaagatatcctggatctggtgggcgtgctgcatgaccccgagactcttctccggtgcatagctgagagagccttcctacgccatcttgagggaggctgctcagtgcccgtcgccgtgcacacagccatgaaggacggccaattgtacctaactggcggcgtttggtcgctggatggttcggatagcatccaggagaccatgcaggctaccattcacgtgccagcccagcacgaggatggccctgaagatgatccgcagcttgtgggaatcaccgcccgtaacattccacgaggaccccagctagcggctcagaatttaggcatttccctggccaatctcttgctgtctaaaggcgccaagaacatcctggatgtagcacgccagctgaatgatgcccat

SEQ ID NO: 3975 - DNA, 1083 bp, Artificial Sequence
  derived and/or modified sequence
atgtccggaaacggcaatgcagctgcaaccgcagaagagaattcgcctaagatgcgcgtcatcagagtcggaaccaggaaaagccagctcgctaggattcagactgacagcgtggtggcaaccttgaaggcatcctatcctggccttcaatttgagattattgcaatgtctaccaccggtgacaaaattctggatacggccttgagcaagatcggtgaaaagtcactgtttaccaaggaactggaacacgccctcgaaaagaacgaagtggatcttgtcgtccattcgctgaaggatttgccgaccgtgctcccgccaggtttcaccataggggcgatatgtaaaagagaaaatcctcatgacgcggtggtgttccatcccaagtttgtgggaaaaacccttgagactctgccagaaaaatcggttgtgggcacctcctcgctgaggagggcggcacaactccagaggaagtttccacatctggagtttcggtcaattcgtggaaaccttaacacgagacttcggaagttggatgagcaacaggaattctcagcgattattctcgcaacggctggtctgcagcgaatgggctggcataatcgggtcggccagatacttcatccagaggaatgcatgtacgcagttggtcagggggcactgggagtcgaggtgcgcgcgaaagaccaagatatcctcgaccttgtgggtgtgctgcacgaccccgaaacgctcctgcgctgcattgcagagagagcattcctgagacaccttgaaggtggatgttcggtgccggtggcagtccataccgcgatgaaggatggacagctgtaccttactggaggcgtgtggtccctggatggctcagattcgatccaagagactatgcaagccactatacacgtccccgcacaacacgaagatggaccggaagatgatcctcaactggtgggaattacggcgagaaatatccctcgcggtcctcaactggccgcccaaaacctcggtatcagcttggcaaaccttctgcttagcaagggcgccaagaacatattggatgtggcgaggcaactgaacgacgcacat

SEQ ID NO: 3976 - DNA, 1083 bp, Artificial Sequence
  derived and/or modified sequence
atgtctggcaatggaaacgctgcggcgaccgctgaagagaactcgccgaaaatgcgcgtgatccgcgtcggaactagaaagtcacaactggccagaatccaaaccgactcggtcgtggctaccctgaaagcgtcctaccccgggctgcagttcgagatcattgccatgtctactacgggtgacaagatcctcgacaccgcactgtcaaagatcggagagaagtcactcttcactaaggaactggagcacgccctggagaaaaacgaagtcgacctggtggtccactctctgaaagacttgccgaccgtgcttcctccaggattcaccatcggagcaatctgcaagcgcgaaaacccccacgatgcagtcgtttttcatccaaagttcgtgggaaagactctcgaaacgctccctgaaaagtcagtggtcggtacctcatccctgagacgagccgcccagctccaaaggaagttcccgcatctcgaattccgctcaatccgaggtaacctcaacacccgcctgcgcaagctggacgaacagcaggaattctccgctatcattctcgctaccgccgggttgcagcggatgggctggcacaacagagtgggtcagattttgcacccggaggaatgcatgtacgcagtgggacaaggcgccctcggggtggaagtgcgggccaaggatcaggatatcttggacctcgtcggagtcctgcacgacccggagactcttcttcggtgtatagcggaacgagcctttctcagacatttggagggaggttgctcggtcccggtggctgttcacactgccatgaaggatggacagttgtacctcactggaggcgtgtggagcttggatgggtccgattccatccaggagactatgcaagctaccatccatgtccccgcccaacatgaggacggccctgaagatgacccgcagctggtgggaatcaccgcccgcaacatcccgagaggaccacaactggccgcccagaacctgggtatctccctcgcaaatctcctgctcagcaagggcgccaagaacatcctggatgtcgcaagacaactcaacgatgcacac

SEQ ID NO: 3977 - DNA, 1083 bp, Artificial Sequence
  derived and/or modified sequence
atgagtgggaatggtaacgcagcagctaccgctgaagagaacagccccaaaatgcgcgtaatcagggtaggaactcgcaaaagccaactggcccggatacaaaccgattcagtggtggccaccctgaaagcaagttaccccggcctgcaatttgagattatcgcaatgtcaaccacaggtgataaaatcctggacaccgctttgagcaagattggcgaaaagagtctgttcaccaaggaactcgagcatgcgctcgagaagaacgaggtggacctggtagtgcactccctcaaggacctgccgaccgtgctgccacccgggttcaccatcggcgcgatctgtaaacgcgagaacccccatgatgcggttgtgtttcaccctaaattcgtgggtaagaccttggagacactgccagaaaagagcgttgtcggaacctcaagcctgcgacgagcggctcagctccagaggaagtttcctcacctggaatttcgctctatcagagggaacctgaacacccgcctcaggaagctcgatgaacagcaagaattttcagcgatcattctggccacagcgggcctgcagcgaatgggttggcacaacagggtgggccagatcctgcatcccgaagagtgcatgtatgccgtgggacagggcgcactgggggtggaagtgagggccaaggaccaggatatcctggatctggtgggagtgctgcatgatccggagactctcctgcgatgcatcgcagagagggcatttcttaggcatcttgagggcggctgttccgtgcccgttgctgtgcacacagccatgaaggacggccagctctacctgaccggcggggtgtggtccctggacgggagtgactcaatacaagagaccatgcaggccactatacacgtgcccgcccaacacgaggacgggccggaagacgatccccagctggtcggaatcactgccaggaatatcccccgaggccctcagctggctgcgcagaatctgggaatcagcctggcgaatcttctgctgtcaaagggagccaaaaatatactcgatgttgcccgacagctgaacgatgcccac

SEQ ID NO: 3978 - DNA, 1083 bp, Artificial Sequence
  derived and/or modified sequence
atgagcgggaatggaaacgcggccgcaaccgcagaggagaattcaccaaagatgcgggtgatacgggtgggaacgagaaagtcacagctggccagaatccagactgacagcgtggtggctaccctgaaggcctcctacccggggttgcaattcgagatcatcgctatgtctacgaccggagacaaaatcctggacactgcgctgtcgaagatcggagagaaatcattgttcactaaagagcttgaacacgcgttggagaaaaacgaggtggatctcgtggtccatagcctgaaagacctgcctaccgtgctgccaccaggattcaccattggagccatctgcaagcgcgaaaatccgcatgacgctgtcgtctttcacccgaagtttgtcggaaaaaccctggaaaccctgccagagaagtcggtggtgggtacttcgtccctgcggcgcgctgcccaactgcaaagaaagttcccccatctggagttccggagcattcgcggaaatctgaacactagactccgcaagctcgacgaacagcaggagttctcggccatcatcctcgcgacggccggtttgcagcgcatgggatggcacaacagagtgggacagatattgcatccagaagagtgtatgtacgcggtcggccaaggcgcgctgggtgtagaagtgagagctaaagaccaggacatcctcgacctcgttggagtgctgcatgatccggagactctgctgcggtgcattgcagaaagagcgttcctgcgccacttggagggaggctgcagcgtcccggtggcagtgcacaccgccatgaaagatggccagctctatctgaccgggggcgtttggtcacttgacggtagcgactccatccaggaaactatgcaagcgaccatccatgtcccggcgcaacacgaagatggacccgaggacgaccctcaattggtcggaatcactgcaagaaacatcccacgggggccgcaactggccgcacagaacctcggaatttcacttgcgaacctgctgctgagtaagggtgcaaagaatattctcgacgtggcccgccagctgaatgacgctcat

SEQ ID NO: 3979 - DNA, 1083 bp, Artificial Sequence
  derived and/or modified sequence
atgagcggcaacggtaacgctgcagcaaccgcagaggaaaactcgccaaaaatgcgggttattagggtgggaacgcgaaagtcacagttggcgaggatccagactgattccgtggtcgctaccctgaaggcatcctaccctgggctccagtttgagatcattgctatgtcgaccactggagataagatactggataccgcactgagcaagattggcgaaaagtccctctttaccaaggaacttgaacatgcactggagaagaacgaggtggatctggtggtgcattccctgaaagacctccctacggtgctgccccccggcttcactattggagctatttgtaagcgcgagaatcctcacgatgcagtcgtgtttcaccctaagttcgtgggaaagactctggaaactctcccggaaaagtcggtggtggggacctcctcattgcggcgggcagcacaacttcagcggaaattcccacacctggaattccgtagtattcgcggtaatctgaacacccggctgcggaagctggatgaacaacaggaattttcggccattattctggcaactgcgggactccagcgcatggggtggcataacagggtggggcagattctccaccccgaggaatgcatgtacgccgtgggccagggcgcacttggagtggaggtgagggcaaaagatcaagatattctggatcttgtcggagtccttcatgaccctgaaaccctgctgcgatgtattgcagaaagagcctttctccgtcatctggaaggtggttgttcggttccagtggcagtccacactgccatgaaagacggacaactttacctcaccgggggcgtgtggtcgcttgacggtagcgactcgatccaagaaactatgcaagctaccatccatgtcccagctcaacatgaggatggcccggaagatgaccctcagcttgtgggaattaccgcacgcaatattcctagaggcccccaactggcggcacaaaaccttggtatatcactggcaaatctgctcttgtccaaaggagccaagaatatactcgatgtggcacgccagcttaacgatgcacat

SEQ ID NO: 3980 - DNA, 1083 bp, Artificial Sequence
  derived and/or modified sequence
atgagcggcaacgggaacgccgccgctaccgccgaagagaactcacccaagatgagggtcatccgggtaggtaccagaaagagtcagctagcccgaatacagactgactcagtggtggccacgctgaaagcatcctatccaggcttacaatttgaaattatagctatgtcaaccaccggggataagattctggatacggccctgtcgaagataggagagaagtcactgttcactaaggagctggaacatgctctggagaaaaacgaggtggacctcgtggtgcacagcctaaaggacctgcctacagtattgccaccaggttttacaattggggccatttgtaagcgagaaaatccccacgacgctgtggtgttccaccctaagttcgtgggaaagaccctggagacactgcctgaaaagtctgtcgtcggaacaagctctctacggcgcgccgcgcaactccaaagaaagttcccccatctcgagtttcggagcatccgcggaaacctcaataccaggctgcgcaaactggacgagcagcaagagttttctgcgatcattctagcgacagccggcctccagcgcatgggatggcataacagggttgggcagatcctccaccccgaggaatgtatgtacgctgtgggccagggtgcactgggggttgaggtgagagccaaagatcaggatattttggatctcgtcggtgttctgcacgaccccgaaacccttcttaggtgcatcgctgagcgtgcattcttgagacacctcgaaggaggatgcagtgttcctgtggctgtgcacaccgcaatgaaagatggacagttgtatctcacaggcggtgtgtggtccctcgacggtagcgactcaatccaggaaacgatgcaggctacgatccacgtcccggctcagcacgaagatggcccagaagatgacccacagttggtcgggatcaccgcacggaacattcctcggggcccgcagttggccgctcaaaatctcggtatttcactggctaatttgctactgtccaaaggtgcaaagaacattctcgatgtggccaggcagctgaatgacgcccac

SEQ ID NO: 3981 - DNA, 1083 bp, Artificial Sequence
  derived and/or modified sequence
atgtcgggtaacggaaacgcggcggccactgctgaagaaaactcaccgaaaatgcgcgtaatccgcgtgggaactagaaagtctcaactcgcaagaatccagactgactccgtcgtggctactttgaaggcctcctacccaggactgcaatttgaaatcatcgctatgtcgaccaccggcgataagattctcgacactgccctgagcaagatcggagaaaaatcgctgttcaccaaggagctggagcacgcgctcgagaaaaatgaagtcgacctggtggtgcattcgcttaaagatcttccgaccgtgctcccacccgggttcactatcggagccatctgcaagagggagaatccccacgacgcagtggtgttccacccgaaattcgtcggcaagaccctggagactctcccagaaaagtcggttgtgggtaccagttcgctgcggcgcgcagcacagctgcagcgtaaattcccacacctggagttcaggagcattcggggcaatcttaatactaggctccgcaaattggacgaacagcaggagttttcagccattattctggccacggcagggctgcaacggatgggctggcataatagagtgggacagatcctccatccggaagagtgcatgtacgcagtagggcaaggagccctgggggtggaggtccgggccaaggaccaagatatcctggacctggtgggcgtgctccacgacccggaaaccctcttgcggtgcattgccgaaagagcgttcctgcggcacctggagggaggttgttcggtgcctgtggcggtccataccgcaatgaaagacggccagctgtacctcactggcggcgtgtggtcactcgacggttcggattcaatacaggaaaccatgcaggctaccatccacgtgccggctcaacatgaggacggtcctgaggatgacccgcagttggtgggaatcaccgcgcgcaacattccgaggggaccgcaactggcagcccagaatctgggaatttccctggccaacctgctcctctcaaaaggtgcgaagaacatcctcgatgtcgctcgccaactgaacgatgcacac

SEQ ID NO: 3982 - DNA, 1083 bp, Artificial Sequence
  derived and/or modified sequence
atgtcaggaaacggaaacgccgccgcgaccgctgaggaaaactccccaaagatgagagtcattcgcgtgggcactcggaaatcacagttggcccggatccagaccgactctgtggtggccacccttaaggcttcatacccaggcctgcagtttgaaatcattgccatgtcgaccacgggtgacaagatccttgacactgcgctgtccaagatcggagaaaagtctctgttcaccaaggagttggaacacgccctcgaaaagaatgaggtcgatctggtggtccattcactgaaggacctccctaccgtgctcccacccgggttcacgatcggagcaatctgcaaacgcgaaaatccgcacgacgccgtggtgtttcatccgaagtttgtgggaaagactttggaaaccttgccggaaaagtccgtcgtcggaacttcctcacttcggcgggcggctcagctgcagcgcaagttcccccaccttgagttcagatcgattaggggtaatctgaacactcgtctgcggaagttggacgagcagcaggaattctccgcgattatcctggcgacggccggtctgcaacggatgggctggcataaccgcgtcggacagatcctccacccagaagaatgcatgtacgctgtcgggcagggagcactgggggttgaagttcgcgcaaaggatcaagatatcctggacctcgtgggggtgctccacgacccggaaacgctgttgcgctgcattgcagaacgcgccttcctgagacatctcgagggtggatgttccgtgcctgtggctgtgcacaccgctatgaaagacggacagctgtatctcaccggaggcgtgtggtcgctcgacggatcggacagcatccaggaaacgatgcaggccaccatccacgtccctgcccaacacgaggacggacccgaggatgatccacagctggtcggaatcactgccagaaacatcccaaggggaccccagctggccgcgcaaaatctgggaatcagcctcgccaaccttctgctttcgaaaggagcgaaaaacatcctcgatgttgctcggcaactgaatgacgcccat

SEQ ID NO: 3983 - DNA, 1083 bp, Artificial Sequence
  derived and/or modified sequence
atgtcagggaacggtaatgcagctgcgaccgctgaagaaaactctccaaagatgagagtcatccgagtgggaactaggaagtctcagctggcaaggatccaaaccgatagtgtggtagccacactcaaggcatcatatcctggactccagtttgagatcattgcaatgagcacaaccggagataagattctggacaccgctctgagtaaaatcggtgagaaatccctctttaccaaagagctggaacacgccctcgagaagaacgaagtggacttggtggtccattcactcaaagaccttcccacagtattgccgccaggattcacaatcggcgcgatttgcaaaagagagaaccctcacgacgcagtggtctttcacccaaaattcgtgggaaaaaccctggagactctgcccgagaagtccgtggtgggaacttctagcttgcggagagcagctcagctgcagaggaagtttccgcacctcgagtttaggtctatccggggaaatctgaatacgagactgcggaagcttgatgaacaacaagagtttagcgccattattttggctactgctggacttcagagaatgggttggcacaatcgggtggggcagatcctgcaccctgaggaatgcatgtatgcagtcggacagggcgccctgggcgtggaggtgagagctaaggatcaggatatccttgacttagtgggcgtcctgcatgatcctgagacacttctcagatgtattgccgagcgggcattcttacgacaccttgagggcgggtgtagtgtccctgtggctgtccatacagctatgaaagacgggcagctgtatctcacaggaggagtgtggagtctcgacgggtcagactcaatccaggagacgatgcaggccaccattcacgtgcctgctcagcacgaggatggtcctgaggatgatcctcagttggtgggtatcacagccaggaacatccctcgtggaccgcagctggccgcccaaaacctggggataagcttggctaaccttctgctgagcaaaggagctaaaaacatcctggacgtcgcccggcaactcaatgatgctcac

SEQ ID NO: 3984 - DNA, 1083 bp, Artificial Sequence
  derived and/or modified sequence
atgagcgggaacgggaatgctgccgcaacagctgaggagaattccccgaaaatgagggtcatccgagtcggcactcgaaaaagccagctggcccgtatccagaccgattcggttgtagctactctaaaagcatcataccctggcttacagtttgagatcattgcaatgtcaacaaccggagataaaatacttgatacggccctctctaagatcggggagaagtcactgtttacaaaagagttggagcatgcactggaaaagaacgaggtggatctagtggtacacagtctgaaagatctgcccacagttctgcccccgggatttacaataggagccatttgcaagcgggaaaacccgcatgatgcggtggtcttccatccaaaattcgtcggaaagaccctagagacgctgccggaaaaaagcgttgtcggaacttcctcactgcggcgggccgcccaattgcagcgaaaattccctcacttagagttccggtccatccgaggtaacctgaacactaggttacggaagttggatgaacaacaagagttctcagccatcatcctcgccactgccggccttcaaaggatggggtggcacaatcgcgtgggtcagatactccaccccgaggaatgtatgtacgcagtcggtcagggagctctcggagttgaggttcgcgcgaaggatcaggatattctggatctggtcggagttcttcacgacccagagacactgttgcgctgtattgcggaacgggcgttcttacgacacctcgaaggcggctgctcagttcctgtcgcggttcacacggctatgaaagacggacagctttacctgacaggaggcgtttggtcactcgatggatcagacagcattcaggaaacgatgcaggcaacgattcatgttccagcccagcatgaggacggtcctgaggacgaccctcagctggtgggtattactgcacggaatattcccagggggccccagctggccgcccaaaatctaggcatatccctggcaaatctgctcctgagtaaaggcgcaaagaatattctcgacgtcgccaggcagctcaacgacgcacac

SEQ ID NO: 3985 - DNA, 1083 bp, Artificial Sequence
  derived and/or modified sequence
atgagcggcaacgggaacgccgcggccacggctgaggagaattctcctaagatgcgcgtcattcgggtggggaccaggaaatctcagttggcccgcatccagacggactctgtggtcgcaacacttaaagctagctatcctggtctgcaatttgaaataatagctatgagcaccacaggcgacaagatactggacacagctctcagcaaaatcggcgagaaatctctgttcactaaggaactggagcacgccctcgagaaaaatgaggtggaccttgtggtgcacagcctgaaggacctgcctaccgtcctgcctccggggttcacaataggggctatctgcaagagggaaaatccgcacgatgccgttgtgttccacccaaaatttgtagggaagactctggagaccctgcccgagaagagcgtggtgggaactagttctttacggcgcgccgcccagcttcagaggaagttcccacacctagagttcagatcaatccgcggcaacctgaatacaagactgcgtaagctggatgagcagcaggagttctctgctataatactcgccactgctggcttgcagcggatggggtggcacaatcgcgtggggcagattctgcaccctgaagaatgcatgtatgccgttggacagggcgctcttggagtagaagtccgggccaaagaccaggacatcttggatttggtcggggtactgcacgatcccgagacgcttctgcgctgcattgcagaaagagcctttctgcggcacctggaaggcggctgttctgttcctgtcgcagttcacaccgccatgaaagatgggcagctctatctgacaggtggcgtgtggtccctagatggcagcgactctatccaggagaccatgcaggccacaatccatgtgcctgcccagcacgaagatggaccggaggacgacccacagttggtcggcattaccgccaggaacataccacgggggcctcagttagccgcccaaaatctagggatttccctcgccaatctattactgtctaaaggagccaagaatatactggacgttgcacgtcagctgaacgatgcacac

SEQ ID NO: 3986 - DNA, 1083 bp, Artificial Sequence
  derived and/or modified sequence
atgagcggaaacgggaatgcagccgctaccgctgaggagaacagccccaaaatgagggtgatccgcgtgggtacccgtaagagtcagttagcccgcatccagactgattctgtcgtagccactcttaaggcctcttatcccggtttgcaattcgagatcattgctatgtctactacaggagacaagattctagacactgcattgtctaagataggagaaaagagccttttcaccaaggaactggagcatgccctggaaaagaatgaagtagacctggttgtccacagcctgaaggatctaccaacagtgcttcctcctggattcacaatcggtgctatatgtaagagagaaaacccacacgatgccgttgtgttccaccctaagtttgtgggaaagacactggaaaccctccccgagaaaagtgtggttggtacatcgtcattacgccgggccgcccagttgcagcggaaatttcctcatcttgaattcagaagtatccggggcaatttgaatactaggcttcggaagctggatgagcagcaggaatttagcgccattattcttgccaccgctggcctgcaacgcatgggttggcacaatagagtgggacaaatcttgcaccccgaggagtgcatgtacgccgttgggcaaggtgccctcggtgttgaagtgcgggcgaaggatcaggatattctggacttggtgggtgtattacatgacccggaaactctcctgagatgcatagccgaacgtgcctttcttagacatctcgaggggggctgcagcgtgccagtagccgtgcacacggctatgaaggacggacaactgtacctgactgggggcgtgtggagcttagatggatcagatagtatccaggaaactatgcaggctactatccatgtgccagcacagcatgaagacggtcctgaagacgatccacagctggtgggaatcacagcacgtaatatcccccgaggtccccagctggcggcccaaaacctgggaatcagtcttgccaatctgttgctgtctaagggcgcgaaaaacatcctcgatgtggctcggcaactcaatgatgcccac

SEQ ID NO: 3987 - DNA, 1083 bp, Artificial Sequence
  derived and/or modified sequence
atgagcggaaacggaaacgcggccgctacggcggaagagaattcgccgaagatgcgcgtcatcagagtcggcactcggaagtcgcagctggctcgcattcagaccgactccgtcgtcgccactctgaaggcctcttaccctggcctgcagtttgaaattatcgccatgagcactactggagacaagatccttgacaccgctctctctaaaataggcgagaagtccctgttcacgaaggaactggagcatgccctcgagaagaatgaggtggatctggtcgtgcactcactcaaggacttgcctactgtgctcccgccgggatttaccatcggagccatctgtaaacgggaaaacccgcatgacgccgtggttttccatccaaaatttgtgggtaagaccctggaaactctgccggagaagtcagtggtgggaacctcgtccctgcgccgcgcggctcaactccagaggaagttcccccaccttgaattccgctccattcgcggaaatctgaacactcgcctgcgcaagctcgatgaacagcaggaatttagcgcgatcatcctggcgacggcgggactgcaacggatgggatggcataaccgggtgggacagatcctccatccggaggaatgtatgtacgctgtcggacagggagcgctgggagtggaagtcagagccaaggaccaagatatccttgatctcgtgggcgtgctgcacgatcctgaaaccctgctcagatgcatcgctgaacgcgcctttctcaggcacctggaaggaggatgctcggtgccagtcgctgtgcacactgcgatgaaggatgggcagctgtacttgaccgggggagtgtggtccctggacggcagcgactcgatacaagaaactatgcaagcaactatccacgtcccagctcaacatgaggacggtcctgaagacgacccccaattggtggggatcaccgcgcggaacatcccgcgcggaccgcagctggctgcccaaaatctcggcatctcacttgcgaatttgctcctgagcaaaggtgccaagaatatcctcgatgtcgcccggcagctcaatgatgctcat

SEQ ID NO: 3988 - DNA, 1083 bp, Artificial Sequence
  derived and/or modified sequence
atgagtgggaatggaaacgctgccgctacagccgaagaaaattcacccaaaatgagggtgatacgggtggggactcggaaatcgcagctggctagaatccagactgacagtgtagtggccacattgaaagcctcttatcctgggctccagtttgagatcatcgcaatgtccactactggagataagatcctcgatactgccctttctaagattggagagaaatctttattcactaaagagcttgagcacgcactggaaaagaatgaagtagacctggttgtccatagtcttaaagatctgccaactgtacttccccctgggttcactataggagcgatttgtaaacgggaaaacccgcacgatgccgtggttttccatccaaaattcgtagggaaaacactcgaaacacttcctgagaaatccgtagtgggaacttcctcactaaggagggccgcgcagctccagcggaagttcccacatttagaattcaggagtattcgaggaaatttaaacacaagattacgcaaactcgatgagcaacaggaattttcagccatcatactcgccacagctgggctccagcgaatggggtggcataatcgggttggacaaattctacatcctgaagaatgcatgtatgccgtcgggcagggagcacttggggttgaagttagggcaaaagatcaggatatactggatctggttggagtgctacacgatccagaaacattacttagatgtattgctgaacgcgcctttctcagacacctagaaggggggtgttccgtccctgtggctgtgcatacagcaatgaaggacgggcagctttacctcactggaggagtgtggtctctagatggatctgattccatccaggaaacaatgcaggctacaatacacgtccccgctcagcatgaagatgggccagaagatgatcctcagctggtagggattactgcaagaaatatccccaggggaccccagcttgctgcccagaacctggggatcagtctggcaaaccttctgctaagtaaaggagccaagaatatcctcgacgtcgcacggcagcttaatgacgctcac

SEQ ID NO: 3989 - DNA, 1083 bp, Artificial Sequence
  derived and/or modified sequence
atgtcgggaaatggaaacgccgctgccacggccgaagagaattcacctaaaatgcgggtgatccgggtagggacgcgcaagtcccagctggcacggattcagactgactccgtggtggccactctgaaagcgtcgtacccgggtctgcaattcgagatcatcgctatgtcaaccactggcgataagattctggacaccgctctgtccaagatcggagaaaagagcctgttcactaaggaactcgagcatgctcttgagaaaaatgaggttgatctggtggtccactctctcaaggatctgccaaccgtacttccgccgggattcactatcggtgccatttgcaagagggagaacccacacgacgccgtggtgttccaccccaaatttgtgggcaagacgctcgagactcttcccgaaaagagcgtcgtgggaaccagctcactgagacgggctgcacagcttcaacgaaaattcccacatctcgagtttcgttccatcaggggtaatctgaacacccgcctgcgcaaacttgacgaacaacaggaattctctgcgatcatcctggccactgcgggactccagcgcatgggatggcacaacagagtcggacaaatcctgcatccggaggaatgcatgtacgccgtggggcagggcgctctgggcgtcgaagtgcgggccaaagaccaggacatcctcgacctggtgggagtcctccacgaccccgaaactttgctcagatgcatagcggagcgtgctttcctgcgacacctggaaggagggtgttccgtcccggtggccgtccataccgccatgaaggacggtcagctttaccttaccggaggcgtgtggagcctggatggatcggattcgatccaggaaacgatgcaggccacgatccatgtccccgcacaacatgaggatggccctgaggacgatccacagctggttggcatcaccgctagaaacatcccccggggtccgcaattggcggcccaaaacctcggaatcagcctcgcgaaccttctgctctcgaagggtgcgaaaaacattctggatgtggccaggcaattgaatgacgcgcac

SEQ ID NO: 3990 - DNA, 1083 bp, Artificial Sequence
  derived and/or modified sequence
atgtcgggcaatggaaatgccgcagctactgctgaggaaaactcacctaagatgcgcgtgatccgggtgggaacaaggaaatctcagctcgcaagaatacaaactgacagcgtcgtcgctactctcaaggccagctatccgggcctacagttcgaaatcatagcgatgagcacgacgggagacaagattctggatactgcactcagtaagatcggcgagaagagcctgttcacaaaggagctggagcacgcgcttgaaaaaaatgaggtcgatctggttgttcactcattgaaagacctacccactgtccttccaccaggttttaccatcggcgccatctgtaaacgagaaaaccctcacgatgctgttgtgttccaccctaaattcgttggcaagactctggaaacacttccagaaaagagcgtggtgggaacatcaagtctcaggagagccgcacaactgcagagaaagtttccacatttagaattccgcagcattcgcgggaacctgaataccagactgcgcaagcttgatgagcagcaggagttttccgctatcattctggcaacggcaggcttacagcggatgggttggcacaaccgagtaggccaaatcctccacccagaggagtgtatgtacgccgtcggccaaggggcccttggggtcgaggttcgcgccaaagatcaggacatcctcgacctggtgggtgtcctgcacgatcccgaaacattgcttagatgcatagcggagcgcgcgttcctccgtcacctggaaggcggttgctccgtgcccgtggcagtgcatactgcaatgaaagatggtcagctctatttaaccggcggtgtctggagcctcgatggctcagattctattcaggaaacaatgcaggcaaccattcacgtgccagcccagcacgaagatggccccgaggacgatcctcaactggtgggcatcacagcaaggaacatcccgaggggaccacagctggccgcccaaaacctgggtattagccttgcaaatttgctcctctcaaaaggggccaaaaatattcttgacgtcgcaagacagcttaatgatgcacac

SEQ ID NO: 3991 - DNA, 1083 bp, Artificial Sequence
  derived and/or modified sequence
atgtcgggcaatggtaacgctgcagcaaccgcggaggaaaactcaccgaaaatgagagtgatccgggtcggaacgcgcaagagccagcttgcacgcatccagaccgatagcgtcgtggcaaccttgaaggcaagctaccctgggctgcagttcgagattatagccatgtcgaccactggcgacaagatacttgataccgccctcagcaaaatcggtgaaaagtcactcttcaccaaagaacttgaacacgcactggagaagaacgaggtggatctggttgtgcattcacttaaggacctccccaccgtgcttcctcctggattcaccattggagcaatttgtaagagagagaatcctcacgatgccgtggtgttccatcctaagtttgtagggaaaacgctcgaaaccctgccagagaaatcggttgtgggaactagctcccttcggcgcgcggcacaactgcagcgtaagttcccccatcttgaatttagatcgattagaggaaatcttaatacccgtctgcgaaagctggatgagcagcaagaattcagcgcaattatcctggccaccgcaggtctgcaacgcatgggatggcacaacagagtgggccagattctgcatccagaggaatgtatgtacgcggtgggtcaaggggcactgggggtggaagtgagagcgaaggaccaggatatcctcgatttggtcggagtcctgcatgatcccgaaaccttgctgcgctgtatcgcggagcgggcatttttgcggcatctggaaggcggatgcagcgtgccagtggcggtccatactgcaatgaaggatggacagctttacctgactggtggggtctggtcgctggacggtagcgattccatccaggagactatgcaggcgaccatccatgtcccggcccagcacgaagatggaccagaggacgatccccagctggtggggattaccgcacgcaacataccccgcgggcctcaacttgcagcacaaaacctcggcatttcccttgcaaatctgctgctgtcaaagggagcaaagaacatacttgatgtcgcaagacaactgaatgacgcccat

SEQ ID NO: 3992 - DNA, 1083 bp, Artificial Sequence
  derived and/or modified sequence
atgtcaggaaacgggaacgcagcagcaaccgcagaagaaaactcaccaaagatgcgggtgatccgagtgggcaccagaaaatcacaactggcacggatccagaccgattccgtggtggccaccctgaaagcaagctacccgggcctgcaattcgaaatcattgccatgtcgaccactggtgataagatcctggacaccgccctgagcaagatcggggaaaaatcactgtttaccaaggaacttgaacacgctcttgaaaagaacgaagtggaccttgtggttcacagcctcaaggatcttcctaccgtcttgccacccggatttactattggagcaatctgtaagcgtgaaaacccacacgatgcggtggtgtttcatccaaaattcgtgggaaagactctggagactcttcctgagaaatcggtggtgggcaccagctccctccgaagagcagcacagcttcaaaggaagtttccacatctggaatttcgctcaattcggggtaatcttaacacgagactccggaagctcgatgaacaacaagagttctcggccattattctggcaaccgcagggctgcagcgtatgggatggcataatagagtgggtcagatacttcatcccgaagagtgtatgtacgccgtcggtcaaggagcacttggtgtcgaagtgcgggcaaaggaccaagatattctggacttggtgggtgtgctccatgatccagaaaccttgttgagatgtatcgcagaacgcgcattcctgaggcatctcgaaggcgggtgctcggttcctgtggcggtgcacaccgctatgaaagacggacaactgtacctgaccgggggtgtctggagcctggatggatcggattccatccaagaaactatgcaagccactatccatgttcccgctcaacatgaggacggtcctgaggatgaccctcaactggtgggtatcaccgcaaggaacatcccacgcgggccacagctggcagcacagaatctgggaatttcgcttgccaaccttctgctctccaaaggtgcaaagaatatcctggacgtggcgaggcaactgaatgatgcacat

SEQ ID NO: 3993 - DNA, 1083 bp, Artificial Sequence
  derived and/or modified sequence
atgtcgggaaacggtaacgcagccgccaccgcagaagaaaatagccctaagatgagagtgattcgggtcggcactcggaagtcacagctcgcgcggattcaaactgattccgtcgtcgcaaccctgaaggcatcttatccaggacttcaatttgaaatcatcgcaatgtccaccaccggtgataagattcttgatactgcactgtcgaagattggtgagaagtcactgttcacgaaggagctggagcacgctcttgagaaaaacgaggtggatctggtggtgcatagcctcaaggaccttccaaccgttttgccacctggttttaccatcggagcaatttgcaaaagagagaacccgcatgatgctgtagtgttccaccccaaatttgtgggaaaaacccttgaaaccctgcccgagaagagcgtggtcggcacttcaagccttagacgcgcagcacaacttcaacgaaaattcccccatcttgagtttagatcaattaggggtaatttgaacacccgactgaggaagttggatgaacagcaggaattctcggcaataatcctcgccaccgcaggtttgcagcgaatgggctggcacaaccgcgtggggcagatcctccacccagaagaatgtatgtatgcagtgggtcagggagcacttggcgtcgaggtgagagcgaaggaccaagacattcttgatttggtcggagtgctccatgacccagagactctcctgagatgtatcgcggaaagggcatttctgaggcatctggagggcggttgtagcgttcctgtggccgtccacactgccatgaaggacggacagctttaccttactggtggagtgtggtccttggacggttccgattcgattcaagaaaccatgcaagcgactatccatgtgcccgcccaacatgaggatggacctgaagatgacccccaacttgtcgggatcactgcaaggaacattccacgtggaccacaattggcagcacaaaatctgggtattagccttgcaaatctgcttctgtccaagggagccaagaatatcctcgacgtcgcacgccaactcaacgacgctcat

SEQ ID NO: 3994 - DNA, 1083 bp, Artificial Sequence
  derived and/or modified sequence
atgtcggggaacggtaatgccgcggccaccgcagaggaaaactcacctaaaatgagggtgataagggtgggaaccagaaagtcgcaactcgcacgtattcaaactgattcggtggtggcaaccctgaaagcctcataccctggactccaatttgaaatcatcgcaatgagcactactggcgataagattctggatacggccctctccaaaatcggagagaagtccctctttaccaaggaacttgaacacgcactcgaaaagaacgaagtggaccttgtcgtccattctctcaaggacttgcctactgtgttgcccccaggtttcactattggtgccatttgtaagcgggaaaaccctcatgacgcagtcgtattccatccaaagttcgtcggtaaaactctggaaacccttccggagaagagcgtggttggcaccagtagcctgcgccgagcagcacagctgcagcggaaatttccacatctcgaattccgctccatacgcggcaacctcaataccagactgagaaagctggatgaacaacaagaattttcggctatcatccttgccactgcgggtttgcaaagaatggggtggcacaatcgggtgggccagatccttcatcccgaggaatgcatgtacgctgtgggtcaaggggcactgggggtggaggtccgggcaaaggatcaggacatcttggatctcgtgggagtcctgcacgatccagaaacgcttctgcgttgtatcgcagaacgtgcgtttttgcgccatctggaaggtggatgctccgttcctgtggctgtacataccgcaatgaaggatggacaactgtacctgactggaggtgtgtggagcctggatggatcagattcgatacaagagactatgcaggcaaccattcacgtgccagcacagcatgaggacggaccggaggacgatccccagcttgtgggcattaccgcgaggaacattcctagagggccacagttggcggcacagaacctgggcatttcccttgcgaatctgcttctgagtaaaggagccaagaatattctggatgttgcgcgacaacttaacgacgcccac

SEQ ID NO: 3995 - DNA, 1083 bp, Artificial Sequence
  derived and/or modified sequence
atgtccggaaacggtaacgccgccgccaccgctgaagaaaactccccaaagatgagggtgatcagagttggcacgcgtaaatctcagctcgcaaggatccagactgactccgtcgtcgctaccctcaaagctagctacccagggctgcagttcgagattattgctatgtccaccaccggagacaaaatcctggatacggccttgtctaagataggcgagaagtcgctcttcactaaggaattggaacatgcgctggagaaaaacgaggtcgaccttgtcgtccactcattgaaagacctgcctacagtgctgcctcccggctttacaataggagccatatgcaagcgggagaacccacatgacgctgtcgtgttccatcccaagtttgttggcaaaaccctggaaactctgcctgaaaagtccgtagtcggtacctcgtctttgcgaagagcagctcagctgcagcgcaaattcccacacctggagtttcgtagcatccgcggaaatcttaacactagactgaggaaactggatgaacagcaggaattttctgccattattcttgccaccgccgggttacagagaatgggatggcataatagggtgggccagatcctgcatcccgaggaatgtatgtatgctgtgggccagggcgctctgggtgtagaggtcagggctaaggatcaggacatactcgacttggtgggtgtgctgcatgaccctgagaccctgcttcggtgcatcgccgagcgagcttttcttcggcacctggaggggggttgctccgtacccgtggcagtacacacagcaatgaaggatggccagttgtacctgaccgggggggtctggtcactcgacggctcagattctattcaggagaccatgcaggccactattcacgtccccgcccagcatgaggatggccccgaagacgatcctcagctggtgggcatcacagctagaaacatccccaggggaccccagttggccgcccagaacctcgggatctcgctggctaaccttctcctgagcaaaggagccaagaacattctggacgtggccagacagctaaatgacgcccat

SEQ ID NO: 3996 - DNA, 1083 bp, Artificial Sequence
  derived and/or modified sequence
atgtcagggaacgggaatgcagccgccacagccgaggagaattcccctaaaatgcgagtgattagggtgggtacaagaaaatcacagctggccaggatccagaccgactcagtggtggctactctcaaggcctcctatccgggactgcagttcgaaattatcgccatgagtacaacaggcgataaaatacttgatacagccctgagcaagataggagaaaagtcactgttcacaaaggagctggagcacgcgctggagaagaacgaagtggatctggtggttcactcactgaaggacttgccaacagttctgcctccgggcttcaccattggcgccatctgtaagcgcgagaacccccacgacgctgtggtcttccatcctaagttcgtcgggaaaacactcgaaacgttgcccgagaaatccgtcgtggggacctcaagcctgaggagggccgcccagctgcagaggaagtttccacatctggagtttagatccattagggggaacctgaatacccgcctgcgcaagctcgacgaacagcaggaattctctgccatcatcttggccactgccgggctgcagcgcatgggttggcacaaccgggtggggcagatcctgcatcctgaagagtgtatgtacgcagtcggacaaggggccttgggggtggaagtgcgggcaaaagaccaggatatcctggatctggtcggtgtgctgcatgatccagagacactgctgcgatgcattgccgagagagcctttctccggcacctcgaaggcgggtgcagcgtaccagtcgccgtgcacactgcgatgaaggatggacaactgtacctgactgggggggtgtggagtttggacggatctgattctattcaggagacaatgcaggctaccatccatgtcccagctcagcatgaggatgggccagaagatgatcctcaactggtcgggatcacggctcggaacattccaaggggaccacagctggccgcccagaacctgggtatctccctggctaatctcctgctgagtaagggcgccaagaatatcctggacgtagcaaggcagctcaacgatgcgcac

SEQ ID NO: 3997 - DNA, 1083 bp, Artificial Sequence
  derived and/or modified sequence
atgagtgggaatggaaacgccgcagccactgcagaggaaaactctccaaaaatgagggtaataagggtcgggactcgcaaatcccagcttgctcggatacagactgactctgttgtggcaacacttaaagctagttatcctggacttcagttcgaaattatcgctatgtccacaactggagataaaattctcgacacagcactgtcgaagattggggaaaaatctctgtttacaaaagaactcgaacacgctctggagaaaaacgaagtggatcttgtggtgcatagtttaaaagatttaccaactgttctaccccccggatttacaattggagctatctgcaaacgggaaaatccccacgacgccgtagtgtttcatcctaagtttgtaggaaaaacgctggagactctccccgaaaagtctgtggtgggaacttcctctcttaggagagcagctcagcttcagcgaaaattcccccatctcgaatttaggagtatccgcgggaaccttaacacaaggctccggaaactagatgaacagcaggagttctccgccatcatactggcaactgctgggctgcagcgcatgggatggcacaacagggtggggcagatcctgcatcctgaagaatgcatgtacgccgtcggacagggggctcttggggttgaagtccgagccaaagatcaagatatactcgatcttgtcggagtcctgcatgatccagaaacactcctcaggtgtattgctgagcgggcattccttcggcacctagagggggggtgcagtgtccctgtggcggtccacacagccatgaaagatgggcagctatatctcactggaggagtctggagtctggatggatccgatagtatccaggaaactatgcaggctacaatccacgtacccgcccagcatgaggacggacccgaagatgatcctcagcttgttgggatcactgcccggaatatacctaggggaccccagctcgccgcccagaacctgggaattagtctcgcgaatctactcctttccaaaggagctaaaaatatccttgatgtagcccgccagttgaatgatgcccac

SEQ ID NO: 3998 - DNA, 1083 bp, Artificial Sequence
  derived and/or modified sequence
atgtctgggaacggaaacgccgcggcaacagccgaggagaactctccaaagatgagagtcatacgggttgggacgcgaaagagccagcttgcccggatccagacagattccgtggtggccaccctcaaagcatcataccccggactgcagtttgaaattatcgcgatgagcactaccggcgacaaaatcttagataccgccctgagcaaaatcggagaaaagtccctcttcacgaaggaactggaacacgcgctggaaaagaatgaagtagacctggtggtacactcactcaaggatctgcccaccgtgctgcctcctggattcaccattggcgctatatgtaagcgagaaaaccctcatgatgccgttgtgttccacccaaaatttgtcggcaagacgcttgagactcttcctgagaagtctgtagtgggtacatcgagtctacgccgagccgctcaacttcaacgtaagttcccacacctagagttccgaagcataaggggcaacctcaacacccgacttagaaagctggatgagcaacaggaattctcggccatcatccttgccactgcaggactgcagcggatgggctggcacaacagagtgggacagatcttacaccccgaagagtgtatgtatgctgtgggccagggggccctgggagtagaggtgagggccaaggatcaagacatcttagatctcgtgggcgtgctgcatgaccccgagacgctgctgcgctgtatcgcagagcgggctttcctgaggcatctcgaagggggatgctccgtccctgtggctgttcatactgcgatgaaggatggccaactctatctcaccggcggcgtgtggtcattggacggatccgactctatccaagaaacaatgcaggcaacaatacacgtacccgcgcagcacgaagacggccctgaggacgatccgcagttggtgggcatcacggcccgtaacatcccccgtgggccgcagctggccgcgcagaacctaggcatctctctcgccaacctcctgctatcaaagggtgcgaaaaatatcttggatgtggcccgccagttaaatgacgctcat

SEQ ID NO: 3999 - DNA, 1083 bp, Artificial Sequence
  derived and/or modified sequence
atgtccggaaacggtaatgcggcggctaccgcggaggaaaactctccgaagatgcgggttatcagggtcgggactcgaaaaagccaactggctcgtatccagacggacagcgtggtcgcgaccctgaaggcatcctatccaggtctgcaatttgagataatcgcgatgagcaccacgggtgacaaaatcctcgataccgccctctcgaaaattggcgagaagagcctgttcacgaaggagctggaacatgctctagaaaagaatgaagtggacctggttgtgcattctctaaaagatcttccgaccgtacttccgcccggctttaccatcggcgctatttgtaagcgcgaaaaccctcacgatgcggttgtgtttcatccaaagtttgtgggtaagacgcttgaaaccttgcctgagaagagcgttgttggtacctcctctttgcgccgagctgctcaattgcagaggaagttcccgcaccttgaattccgctccatccggggaaatctcaataccagactgcgcaagctggatgaacagcaggagttcagcgccattatcctggcaaccgcgggtcttcaaagaatgggttggcacaacagggtcggacaaatacttcaccctgaggagtgcatgtacgccgtcggtcaaggggcactgggtgtcgaggtgcgagccaaagatcaggacattctggatctggtcggagttctccacgaccccgaaactctgctacggtgcattgccgagagagcgttcctaagacatctggagggtgggtgctccgttccagtggcagtgcacactgcaatgaaggatggccagctgtatctgactggtggcgtgtggagcctggacggcagcgattctattcaagagaccatgcaagcgaccattcacgttcctgcgcagcacgaggatggaccagaggacgatccacaacttgttggcattacggctcggaatataccacgaggtccgcaactggccgcccagaacttggggatctctttggccaacctgctgctctcaaagggggcaaagaacattctggacgtcgcacgccagctaaatgacgcccac

SEQ ID NO: 4000 - DNA, 1083 bp, Artificial Sequence
  derived and/or modified sequence
atgtccggtaacggtaacgcggcagcaacggcagaggagaactcacctaagatgcgggtcattagagtgggaaccagaaagagccagctcgcaaggatccagaccgatagcgtggtggcaactctcaaggcctcttaccccggtctgcaatttgagattatcgcaatgagcaccaccggggacaaaatcctggataccgcactgtccaagattggcgaaaagagcctgttcactaaggaactcgaacacgcgctggagaagaatgaagtggatttggtcgttcattcccttaaggatctgcctaccgtcctcccacctggtttcaccattggcgcaatttgcaaaagagaaaacccacatgatgctgtggtgtttcacccaaagtttgtgggcaaaactcttgaaaccttgcccgaaaaatcggtggtcggtacttcttcgctgcggcgggcggcccaactccaacgaaagtttccgcatctcgagttccggtccattcgcggaaatctgaatactaggctgaggaagctggatgaacagcaggaattttccgctatcattctcgcgaccgcgggacttcaaagaatgggttggcataaccgagttgggcagattctgcatcctgaggaatgtatgtacgcggtggggcagggagcattgggcgtagaggtgcgtgccaaagatcaagatattcttgatcttgtcggggtccttcacgacccagaaaccctgcttcgatgtatcgcggagagagcgtttcttagacacctcgaaggtggctgctcggtccctgtggccgtgcataccgctatgaaggacggtcaactctacttgactggcggagtgtggtccctcgatggctccgatagcatacaagaaactatgcaagcaacgatccacgtcccggcgcaacatgaagatggacccgaggatgatcctcaactggtgggtataaccgcacgcaacatccctcggggacctcagctcgctgctcaaaaccttggtatcagcctggctaacctgcttctctcaaaaggtgccaagaacattcttgatgtggccaggcagctgaacgacgcacat

SEQ ID NO: 4001 - DNA, 1083 bp, Artificial Sequence
  derived and/or modified sequence
atgagcggaaacggtaacgcggcggcaaccgcggaagagaattcacccaagatgcgtgtgatccgagtcggtaccaggaaatcccagcttgcccgcatacagactgactcagttgtggctacgttgaaggccagctaccccggactgcagttcgaaatcattgcaatgtcgactaccggcgacaaaatcttggacactgctctctccaagatcggagaaaagtcactgttcaccaaggagctggagcacgcgctggagaaaaatgaggtggacctggttgtccactctctcaaggacctcccgaccgtgctgccacctggattcaccatcggagccatctgtaagcgggaaaacccacatgacgccgtggtgttccatcccaagtttgtgggcaaaactctggagactctcccagagaagagcgtcgtgggcacctcctctctgagacgtgccgcgcagcttcagcggaagttcccgcatctggagttccgctcgatccgcgggaacctgaatactcggcttagaaaactcgacgaacagcaagaattttcggcgattatcctcgcgactgcgggactgcagcgcatgggatggcacaaccgggtgggacaaatcctgcacccggaagaatgcatgtacgccgtgggacaaggggcattgggtgtggaggtgagagccaaagatcaggatatactggatctcgtgggcgtcctccacgatcctgagactctgctgcgctgcatagcagaaagggctttccttcgccatctggaagggggttgctccgtgccggtcgcggtccacacggccatgaaggatggtcaactgtacctgaccggaggagtctggagcctggacggatcggactcaatccaagaaactatgcaagcgaccatccacgtgccggctcagcacgaggacggcccggaagatgatcctcagcttgtgggcatcaccgcccggaacatcccacgcggcccacagttggcggcacaaaatctgggaatttccctcgccaacttgctgctgtcgaagggtgccaagaatattctcgacgtcgcccgccagcttaatgatgcccat

SEQ ID NO: 4002 - DNA, 1083 bp, Artificial Sequence
  derived and/or modified sequence
atgagcggtaacggcaacgctgccgccacagctgaagagaactctcccaaaatgagggtcatacgtgtcggaacgcgcaaatctcagctggctaggatccagaccgatagcgtagtggctactcttaaagctagttatcctggcctgcagtttgaaatcatagccatgtccaccacaggcgacaaaatcttggatacagccttatctaagataggagagaagtccttgttcactaaggagctggagcacgcactcgagaagaatgaagtagaccttgtggtccatagcttgaaggatcttcccacagtgcttcccccaggctttacaatcggggcaatttgcaaacgcgaaaacccacacgacgccgtggtcttccatccgaagtttgtagggaaaacccttgaaacactgccggagaagagtgtggtgggtacctctagtctcagaagagctgcacaactgcagagaaagtttccacacctcgagtttagaagcatcagagggaacctcaacactagattgagaaaacttgatgagcagcaggaattttcagcgattattctggccaccgctggacttcaacgcatggggtggcataacagggtcggtcagatcctccatccagaggaatgcatgtacgccgtgggacagggagcactcggggtggaagtgagggctaaggatcaggacatcctggacctggtgggagtgttacacgatccggagacactgttgcgatgtatcgccgagagggcttttctgagacacctcgaagggggctgcagtgtgccagtggcagtgcacacagccatgaaggacggacagctgtacttaacaggaggagtttggagtctggatgggagcgactctattcaggagaccatgcaagccacaatccacgttccagctcagcacgaggatggccctgaggatgatcctcagcttgtgggcattacagcgaggaacatcccccgcgggcctcagcttgctgcacaaaatctcggtattagcctggccaaccttttgctcagcaaaggtgccaagaacatcctcgatgtggcccgtcaactgaacgatgctcat

SEQ ID NO: 4003 - DNA, 1086 bp, Artificial Sequence
  derived and/or modified sequence
atgagcggcaacggcaacgccgccgccaccgccgaggagaacagccccaagatgagagtgatcagagtgggcaccagaaagagccagctggccagaatccagaccgacagcgtggtggccaccctgaaggccagctaccccggcctgcagttcgagatcatcgccatgagcaccaccggcgacaagatcctggacaccgccctgagcaagatcggcgagaagagcctgttcaccaaggagctggagcacgccctggagaagaacgaggtggacctggtggtgcacagcctgaaggacctgcccaccgtgctgccccccggcttcaccatcggcgccatctgcaagagagagaacccccacgacgccgtggtgttccaccccaagttcgtgggcaagaccctggagaccctgcccgagaagagcgtggtgggcaccagcagcctgagaagagccgcccagctgcagagaaagttcccccacctggagttcagaagcatcagaggcaacctgaacaccagactgagaaagctggacgagcagcaggagttcagcgccatcatcctggccaccgccggcctgcagagaatgggctggcacaacagagtgggccagatcctgcaccccgaggagtgcatgtacgccgtgggccagggcgccctgggcgtggaggtgagagccaaggaccaggacatcctggacctggtgggcgtgctgcacgaccccgagaccctgctgagatgcatcgccgagagagccttcctgagacacctggagggcggctgcagcgtgcccgtggccgtgcacaccgccatgaaggacggccagctgtacctgaccggcggcgtgtggagcctggacggcagcgacagcatccaggagaccatgcaggccaccatccacgtgcccgcccagcacgaggacggccccgaggacgacccccagctggtgggcatcaccgccagaaacatccccagaggcccccagctggccgcccagaacctgggcatcagcctggccaacctgctgctgagcaagggcgccaagaacatcctggacgtggccagacagctgaacgacgcccactag

SEQ ID NO: 4004 - protein, 462 aa, Artificial Sequence
  derived and/or modified sequence
MLLLARCLLLVLVSSLLVCSGLACGPGRGFGKRRHPKKLTPLAYKQFIPNVAEKTLGASGRYEGKISRNSERFKELTPNYNPDIIFKDEENTGADRLMTQRCKDKLNALAISVMNQWPGVKLRVTEGWDEDGHHSEESLHYEGRAVDITTSDRDRSKYGMLARLAVEAGFDWVYYESKAHIHCSVKAENSVAAKSGGCFPGSATVHLEQGGTKLVKDLSPGDRVLAADDQGRLLYSDFLTFLDRDDGAKKVFYVIETREPRERLLLTAAHLLFVAPHNDSATGEPEASSGSGPPSGGALGPRALFASRVRPGQRVYVVAERDGDRRLLPAAVHSVTLSEEAAGAYAPLTAQGTILINRVLASCYAVIEEHSWAHRAFAPFRLAHALLAALAPARTDRGGDSGGGDRGGGGGRVALTAPGAADAPGAGATAGIHWYSQLLYQIGTWLLDSEALHPLGMAVKSS

SEQ ID NO: 4005 - DNA, 1389 bp, Artificial Sequence
  derived and/or modified sequence
atgctgctgctggccagatgcctgctgctggtgctggtgagcagcctgctggtgtgcagcggcctggcctgcggccccggcagaggcttcggcaagagaagacaccccaagaagctgacccccctggcctacaagcagttcatccccaacgtggccgagaagaccctgggcgccagcggcagatacgagggcaagatcagcagaaacagcgagagattcaaggagctgacccccaactacaaccccgacatcatcttcaaggacgaggagaacaccggcgccgacagactgatgacccagagatgcaaggacaagctgaacgccctggccatcagcgtgatgaaccagtggcccggcgtgaagctgagagtgaccgagggctgggacgaggacggccaccacagcgaggagagcctgcactacgagggcagagccgtggacatcaccaccagcgacagagacagaagcaagtacggcatgctggccagactggccgtggaggccggcttcgactgggtgtactacgagagcaaggcccacatccactgcagcgtgaaggccgagaacagcgtggccgccaagagcggcggctgcttccccggcagcgccaccgtgcacctggagcagggcggcaccaagctggtgaaggacctgagccccggcgacagagtgctggccgccgacgaccagggcagactgctgtacagcgacttcctgaccttcctggacagagacgacggcgccaagaaggtgttctacgtgatcgagaccagagagcccagagagagactgctgctgaccgccgcccacctgctgttcgtggccccccacaacgacagcgccaccggcgagcccgaggccagcagcggcagcggcccccccagcggcggcgccctgggccccagagccctgttcgccagcagagtgagacccggccagagagtgtacgtggtggccgagagagacggcgacagaagactgctgcccgccgccgtgcacagcgtgaccctgagcgaggaggccgccggcgcctacgcccccctgaccgcccagggcaccatcctgatcaacagagtgctggccagctgctacgccgtgatcgaggagcacagctgggcccacagagccttcgcccccttcagactggcccacgccctgctggccgccctggcccccgccagaaccgacagaggcggcgacagcggcggcggcgacagaggcggcggcggcggcagagtggccctgaccgcccccggcgccgccgacgcccccggcgccggcgccaccgccggcatccactggtacagccagctgctgtaccagatcggcacctggctgctggacagcgaggccctgcaccccctgggcatggccgtgaagagcagctag

SEQ ID NO: 4006 - DNA, 1389 bp, Artificial Sequence
  derived and/or modified sequence
atgctactcttggctcgctgcctgttattggtgctggttagcagcctattggtgtgtagcgggctcgcctgcgggccagggcggggttttgggaagcgacgacaccccaaaaagctgacccctctcgcatacaaacagtttataccgaacgtggccgagaagactctgggagccagcggaagatacgagggaaaaatctcaaggaattccgaaaggttcaaggagctgactccgaattataatccagacattatcttcaaggacgaagagaacacaggtgcggaccgtctgatgactcaaaggtgtaaagacaaactgaacgccctggccattagtgtaatgaatcagtggcccggggtcaagctgagagttaccgaggggtgggacgaagatggccaccatagcgaggagtctttgcactacgaaggccgtgccgtcgatattaccaccagcgatcgagacaggtctaaatacggaatgctcgctcggctcgccgtggaggctggcttcgactgggtatattatgaaagtaaggctcatatccattgcagcgtgaaggcagaaaacagtgttgccgcaaaaagtgggggctgctttccgggatcagcgactgtgcacctcgaacaaggcggtacaaaattggtgaaagatctgtcccccggggatagagttttggcggcagacgatcaagggaggctgctgtacagtgattttctgacgttccttgatcgggacgacggggctaagaaagtcttttacgtgatcgagaccagggagccgcgcgagcggctgctcctcacagctgcacacctcttatttgtggctccccacaacgatagtgccacaggagaaccagaagctagctctggatctggccctccaagcggtggggctttaggtcctagggcactgtttgcttctagagtcagacctggccagagggtgtatgtcgtagccgaaagggatggggaccggcgcctccttcccgctgccgtacacagtgtgacactgtctgaggaagccgcaggggcttatgctcctctgaccgctcaaggcaccatcttaattaatcgtgtcctggcctcttgttacgccgttatcgaggaacacagctgggcccatagagccttcgcgccctttaggctggcccacgccctcctggcagcccttgccccggccagaactgacagagggggggacagcgggggaggcgataggggcgggggcggaggcagagtggcccttaccgctcccggagccgctgacgcaccaggggcaggggcaaccgccggtatccattggtattctcagctactctatcagataggcacatggcttctggatagtgaggccttgcacccacttggtatggcggtcaagagttcctag

SEQ ID NO: 4007 - DNA, 1389 bp, Artificial Sequence
  derived and/or modified sequence
atgctgctgctggcccgctgcctgctgctggtgctggtgagcagcctgctggtgtgcagcggcctggcctgtggccctggccggggctttgggaagagaagacaccccaagaagctgacccccctggcctacaagcagttcatccccaacgtggccgagaagaccctgggcgccagcggccgctatgagggcaagatcagcaggaacagcgagcgcttcaaggagctgacccccaactacaacccagacatcatcttcaaggatgaggagaacacaggagctgaccggctgatgacccagcgctgcaaggacaagctgaatgccctggccatctctgtgatgaaccagtggccaggagtgaagctgcgggtgacagagggctgggatgaagatggccaccacagcgaggagagcctgcactatgagggccgggctgtggacatcaccaccagtgaccgggacaggagcaaatatggcatgctggcccggctggccgtggaggccggctttgactgggtgtactatgagagcaaggcccacatccactgcagcgtgaaggccgagaacagcgtggccgccaagagcggcggctgcttccctggcagcgccaccgtgcacctggagcagggcggcaccaagctggtgaaggacctgagccctggggacagagtgctggccgcagatgaccagggccgcctgctgtacagcgacttcctgaccttcctggacagagatgatggagccaagaaggtgttctacgtgattgagacccgggagccccgggagcggctgctgctgacagctgcccacctgctgtttgtggccccccacaatgacagcgccaccggggagcctgaggccagcagcggcagcggccccccatctggaggagccctgggcccccgggccctgtttgccagccgggtgcggcccggccagagggtgtatgtggtggccgagagagatggagaccggcggctgctgcctgctgctgtgcacagcgtgaccctgtctgaggaggccgccggggcctatgcccccctgacagcccagggcaccatcctgatcaacagagtgctggccagctgctatgctgtgattgaggagcacagctgggcccaccgggcctttgcccccttccggctggcccacgccctgctggccgccctggccccagccaggacagaccggggcggggacagcggcggcggggacagaggaggcggcggcggccgggtggccctgacagcccctggagctgctgatgcccctggggccggggccacagctggcatccactggtacagccagctgctgtaccagatcggcacctggctgctggacagcgaggccctgcaccccctgggcatggctgtgaagagcagctag

SEQ ID NO: 4008 - DNA, 1389 bp, Artificial Sequence
  derived and/or modified sequence
atgctgctgctggcccggtgcctgctgctggtgctggtgagcagcctgctggtgtgctctgggttggcttgcggtccaggcaggggtttcggcaagcgaaggcacccaaagaaactcacccctctggcttacaaacagttcatccctaacgtggccgagaaaacccttggtgcctctggcagatatgagggcaagatttccagaaattcagaaagattcaaggagttgaccccaaactacaacccagacataatattcaaggatgaggagaacactggcgcagatcgactgatgacccagcgatgtaaggacaaattgaacgcattagcaattagcgtgatgaatcagtggcccggtgtgaaattacgcgtcacggagggctgggacgaggacggccatcactcagaagaaagtttgcactacgaagggcgggccgtggacattactacgtctgatcgcgaccgctccaagtacggcatgcttgcgcggcttgcagtggaggccgggttcgactgggtctattacgaaagcaaagctcacatccactgctccgttaaagccgagaactcggtagccgctaaatccggcgggtgtttccccggcagtgctaccgtccacctggagcagggcggtaccaagctggtgaaggacctgtcccccggagacagggtgctggccgccgacgatcagggacggctgttatactcggactttcttactttcctcgaccgggatgatggcgctaaaaaagtgttttatgtgattgagaccagggaacctagggagcggttgttgctgaccgcggcccatctccttttcgtggcgccccacaacgacagtgcaactggcgaacccgaagcctcctcagggagcggacctccttctggcggcgctctgggacctagggccttattcgcttctagagtcaggcccggacagcgcgtctatgtggttgccgaacgggatggcgatagaagattgctacctgctgccgtccactctgtgactctgagcgaagaagctgctggtgcgtatgccccccttacagcacaagggactatcctaattaatcgggttttagccagttgttacgctgtcattgaagaacactcctgggctcatagagcgttcgcgcccttcaggttagcccatgccctgctggccgccttggcccccgcccgcaccgaccgcggaggcgacagcggaggaggcgatcgtggaggggggggagggagggtggcgctcactgcaccaggcgctgcggatgctccgggcgccggagcaactgcaggcattcactggtattcccagctgctgtatcagattggtacttggcttttggatagcgaggcactccacccgcttggaatggcagtaaagtctagctag

SEQ ID NO: 4009 - DNA, 1389 bp, Artificial Sequence
  derived and/or modified sequence
atgctacttctggccagatgtctcctcctggtgttagtgtcgtcgctgttggtatgctccggcctggcctgcggccctggcagggggttcggtaaaagaagacatcccaagaaactcactcctctggcatacaagcagtttattccaaatgtcgctgagaaaaccttgggagcttccggcagatacgaaggcaagatctcaagaaattctgagcggttcaaggagctgacacctaactacaaccctgatataatcttcaaagatgaggagaatacaggcgctgacagattgatgacacagcggtgtaaagacaaacttaatgcgttggcaataagtgtgatgaaccagtggcctggagtaaaattgagggtaaccgaggggtgggatgaagatggtcatcacagcgaggagtcacttcactacgaaggacgcgcagtggatatcacaactagcgaccgagatcgaagtaagtacggcatgctggcgaggcttgccgtcgaggccggtttcgactgggtctattatgaatcaaaagcccatattcactgcagcgttaaggcagagaacagcgtagcagcaaagagtgggggttgctttcctggttccgctacagtgcatctcgaacaggggggtactaaactggttaaagatctaagccccggagatagggtattggcagcagatgaccagggacgacttctttattctgacttcctcacattcctcgacagagatgatggggctaaaaaagtgttctatgtgattgagacccgagagccacgtgaacggcttctactgacggcggctcatcttcttttcgtagcccctcataatgatagcgccacaggcgaaccagaggccagctccgggagcggccctcctagtggcggagccctgggtcccagggcactcttcgcatctcgcgtgaggcctggccagcgggtatatgtcgtggccgaaagggacggggataggcgcctgctgcctgcggctgttcactcggttactctgtccgaggaggcagcaggggcatatgctcctttgaccgcacaaggtactatcctcattaacagagttctcgcgagttgctacgctgtgatcgaagagcatagttgggctcaccgtgccttcgccccattcaggctggcccatgcactccttgccgctctcgcccctgctcgaaccgaccgcggaggggacagcggaggcggagacagaggcggagggggaggtcgcgtcgcactgaccgctccaggcgctgccgatgcacccggtgcgggagcaactgctggtattcattggtactcccagctcctctaccaaatcggcacgtggctgctggatagcgaagcactgcaccccttaggcatggcagtcaagtcgtcttag

SEQ ID NO: 4010 - DNA, 4454 bp, Artificial Sequence
  derived and/or modified sequence
gcgaggcagccagcgagggagagagcgagcgggcgagccggagcgaggaagggaaagcgcaagagagagcgcacacgcacacacccgccgcgcgcactcgcgcacggacccgcacggggacagctcggaagtcatcagttccatgggcgagatgctgctgctggcgagatgtctgctgctagtcctcgtctcctcgctgctggtatgctcgggactggcgtgcggaccgggcagggggttcgggaagaggaggcaccccaaaaagctgacccctttagcctacaagcagtttatccccaatgtggccgagaagaccctaggcgccagcggaaggtatgaagggaagatctccagaaactccgagcgatttaaggaactcacccccaattacaaccccgacatcatatttaaggatgaagaaaacaccggagcggacaggctgatgactcagaggtgtaaggacaagttgaacgctttggccatctcggtgatgaaccagtggccaggagtgaaactgcgggtgaccgagggctgggacgaagatggccaccactcagaggagtctctgcactacgagggccgcgcagtggacatcaccacgtctgaccgcgaccgcagcaagtacggcatgctggcccgcctggcggtggaggccggcttcgactgggtgtactacgagtccaaggcacatatccactgctcggtgaaagcagagaactcggtggcggccaaatcgggaggctgcttcccgggctcggccacggtgcacctggagcagggcggcaccaagctggtgaaggacctgagccccggggaccgcgtgctggcggcggacgaccagggccggctgctctacagcgacttcctcactttcctggaccgcgacgacggcgccaagaaggtcttctacgtgatcgagacgcgggagccgcgcgagcgcctgctgctcaccgccgcgcacctgctctttgtggcgccgcacaacgactcggccaccggggagcccgaggcgtcctcgggctcggggccgccttccgggggcgcactggggcctcgggcgctgttcgccagccgcgtgcgcccgggccagcgcgtgtacgtggtggccgagcgtgacggggaccgccggctcctgcccgccgctgtgcacagcgtgaccctaagcgaggaggccgcgggcgcctacgcgccgctcacggcccagggcaccattctcatcaaccgggtgctggcctcgtgctacgcggtcatcgaggagcacagctgggcgcaccgggccttcgcgcccttccgcctggcgcacgcgctcctggctgcactggcgcccgcgcgcacggaccgcggcggggacagcggcggcggggaccgcgggggcggcggcggcagagtagccctaaccgctccaggtgctgccgacgctccgggtgcgggggccaccgcgggcatccactggtactcgcagctgctctaccaaataggcacctggctcctggacagcgaggccctgcacccgctgggcatggcggtcaagtccagctgaagccggggggccgggggaggggcgcgggagggggcggggcggggcagcaacagcaacgcaaagcaaaaagacactcggaaaaggcgcacgaaccagactgagttataataagaataagaataataaagtaggacagtccaaagtagactctaaggaaacaaggaccccgggaagttttgttgttgtgcttagttgatatatattttttgaatttttttggttattgttttattttggttattttttcctcctctcctggctatttatttgtttggtatgaatagatgttttaaataatatgaaccggaccttcaagagccttaaatagtttgtttcttggataatttattatgatcatgtgaactgtactcacgggggaaagattattttgtgaggccaagcaacctgctcagagtctatttttctacatgtccctcgtcccggctgtcagaaagcaaacctctgtccccgccatccctcccttccatctcctgcttctcagcaagtgcaaactcaaacgtgcttcatgggggtccacaaattatatttttatacacagaattgtaaattagattttttgagagatcaatacttaactgaattacatttcatttttgaaatagtgtaaaatatgaaaatatattattttaatttaactagtttccgatgtaacagccatctcctctgttgtctttatggtttcatattccctttgtattcaccattttgccacattcttggaagccaagactgttacacacacaacatacacacacacttttctttttcttttcttttcttttttttttttttttttttttttggacaaactggaagaactgttatttttaacttcaaagaatttattagaaaataatattttttaaaagcgcacatagtgacgagcccacgaggatggagcctgcagtttgtacagagaaaacaaaggatgtttttgcattaataaattgagaaataacgctgtaaatttactaaaatgtatttttgaatattttgtaatagttttatagaaataaaatgtgccatgcacagaacgcttagtatctaataactaagaattcctgttgcagccctttttcttttagtttttggcttctttgtttgggaaacctagcgctgacaggagctcccaatattctatttagatgtgttgcttatactgtgaactcagactgactgacttaggtaaccaaagtaggcacacaaaccaacttgtttcttctcatggctggagaaacctcagctctgtttgtatttattgtgtgaagctctttctacactcccaaaggttgggagtgccattcgtggggactgtgctgtccccctcaccccaccccttaactagcaaagcctgatgtgtaagcccagaggaggtggcctggggatggccaccaacaaccttctcttaggactcctgtgtgtggttgctgggcagacccctggcctgaccctgtttgtgcttctctgatctgtagggaggaggctcattgctgctttctgaggtcctgttgtgtcccttccagaaagcatccttagaagagaggacccggtttgatcttctctgaagctcctatcctcttttcttgagggtccccttaaatctgagtggcaagcccacagtggcgagggccagtcgctggaatgtcggggctgctgttgaggtcctcaggctacactggttgtctgtgtcacatggcggtcgggcgtggactttgatccctgttgagagagcatgctgctgtgggcgctgggctggggaaggtccttccatgcttcatgctgccttggaggtttggccaagagggtctctgcccttggcggttgtcagggtcccaggtggaggactactcccagttctttggcttacggaaggtgtctgccatgctttgtgctttgggccgaatcgtctgagcaggctgggccttggaagagttgcgctgcatgagcttggggcctcccagcagctgcagcctgtgtagaaggtggtccaggcttagggaacaggagtgaacagacttcagccccacctggcaggggctggctcccgaggttgggcccagtccctgagggtctgctctgctacgggtctgcccttgagtggccttccgtggagggtgtgtgaccaggtggatggcgcagggcctctggagccctctcctcaggagcagtcctcagcctttttctgtaaaagacttttctttggtgttctaggtggtcagcaggttccaggctggtgtttacaatctcggaggaagtgcgatggtttctgttcttttgacagttcagtctgatttcaagtcagtcgaaagcgaaccagaagcaccgggcacagcagctcctctggctgtgtagacagacctggcaatgtggccgtgcagcccagacgatcagagagaagccaggcgttgaccaagccccaaggtgcctgaggccatggtgcaactctgctggtgactggggcaccttggagcagagcttcacccggatgggaaatcctcactcctgggtggcactccctcctggacaggcccggtggcagagtgtccgtgctgctgggtgctgtccccagccctcctggtccatcttcttaagatgcgtccactgctttatatttaaaattctctttttcacaggcaaggaaaggaaaccactgcttagagacactaggtacagggcatcaagagggtgcagcccagccccgccaggacgaggcgccgacttctcattcagggttgacggagccaagagtttgtgcaaaatgtatgcatggtggttgctgccagcctccctcatgactaaatgcatatctattcctgtcaaaacgtgtatcacaatgtacttgaaactgttatctttgtgctctattgtttgaataattaaagaaattacagag

SEQ ID NO: 4011 - protein, 218 aa, Artificial Sequence
  derived and/or modified sequence
MATRSPGVVISDDEPGYDLDLFCIPNHYAEDLERVFIPHGLIMDRTERLARDVMKEMGGHHIVALCVLKGGYKFFADLLDYIKALNRNSDRSIPMTVDFIRLKSYCNDQSTGDIKVIGGDDLSTLTGKNVLIVEDIIDTGKTMQTLLSLVRQYNPKMVKVASLLVKRTPRSVGYKPDFVGFEIPDKFVVGYALDYNEYFRDLNHVCVISETGKAKYKA

SEQ ID NO: 4012 - protein, 218 aa, Artificial Sequence
  derived and/or modified sequence
MATRSPGVVISDDEPGYDLDLFCIPNHYAEDLERVFIPHGLIMDRTERLARDVMKEMGGHHIVALCVLKGGYKFFADLLDYIKALNRNSDRSIPMTVDFIRLKSYCNDQSTGDIKVIGGDDLSTLTGKSRLLAEDIIDTGKTMQTLLSLVRQYNPKMVKVASLLVKRTPRSVGYKPDFVGFEIPDKFVVGYALDYNEYFRDLNHVCVISETGKAKYKA

SEQ ID NO: 4013 - protein, 14 aa, Artificial Sequence
  derived and/or modified sequence
EMGGHHIVALCVLK

SEQ ID NO: 4014 - DNA, 654 bp, Artificial Sequence
  derived and/or modified sequence
atggctacacggtcgccaggagtagtcatttcagacgatgaacctggatacgacttggacctcttctgtattcctaaccattatgccgaagatttggagagagtttttatcccacatggattgattatggatcgtacggagaggttagctagggacgtgatgaaagaaatgggaggacaccacatcgttgcgttgtgtgttcttaaaggtggttataaattctttgcagacctccttgactacattaaagcgctcaacagaaactcggatcgttctattccaatgaccgtggactttatacgtcttaaatcttattgcaatgatcaatctacaggggatatcaaggttataggaggagatgatctcagtacactgactggaaaaaatgttcttatagtagaagatatcattgatactggaaaaacaatgcaaaccttgttgtctctggtccgacagtacaatccaaaaatggtgaaagtggcttccttgttggtcaagcgaaccccaagatcagtgggttataaaccagattttgttggatttgagattcccgataaattcgtcgtgggatacgcattagattacaatgaatattttcgtgatttaaaccatgtttgcgttatttcggaaacgggtaaagccaaatataaagca

SEQ ID NO: 4015 - DNA, 654 bp, Artificial Sequence
  derived and/or modified sequence
atggcaacgcggagtccgggagtggtgatttcagacgatgaaccgggatacgatctggacttattctgcatacctaatcactacgctgaagacctcgaacgcgtttttataccccatggtctgattatggaccgtactgaacgcctggcacgagatgtgatgaaggaaatgggcggccatcatatcgtggcgctctgcgtccttaaaggcggctataaattctttgccgatctactggattatatcaaggcccttaacaggaattcagataggtcaatccctatgacggtggactttatccggttaaaatcatattgtaacgaccaatcaacgggtgacatcaaagtcataggtggagacgatttgtctactctcacaggtaagaacgtgttgatcgtagaagatataattgacacagggaagacaatgcagactctgctcagcctcgtacgtcaatacaatcccaagatggtcaaggtggcatccctcttggtaaagaggacaccgcggtcagtgggttacaaacccgattttgtaggattcgagatacccgacaagttcgttgtgggatacgccctggactacaatgaatactttagagacctgaatcatgtgtgtgttataagtgaaactggcaaagccaagtacaaggcc

SEQ ID NO: 4016 - DNA, 654 bp, Artificial Sequence
  derived and/or modified sequence
atggcaacgcgatcgccgggggtcgtcataagtgacgatgaaccggggtacgaccttgacctcttttgcatccctaaccactacgccgaggatctggaacgtgtgttcatcccacatggactgattatggatcgaaccgagagactggcaagagacgtgatgaaggagatgggaggccaccatatagtggctctctgtgtacttaaaggaggatacaagttttttgcggaccttttggattacattaaagcacttaaccgcaacagcgaccgttcaattcccatgactgtcgactttattcggcttaagtcctattgtaacgatcaatctaccggcgacataaaagtgattggaggggatgatctgtctaccttgacgggaaagaatgtgctcatcgtagaggacattattgatactggtaagaccatgcaaactttgctctcgcttgtgaggcagtacaatcctaagatggtgaaggtcgcatccttgctggttaagcgcactccacgctcagtcggctacaaacctgacttcgttggttttgaaatccccgataagtttgtggtcggctacgccctcgattacaacgaatacttccgggatctgaatcatgtgtgcgtgatttcagaaactggtaaagcaaagtacaaggcg

SEQ ID NO: 4017 - DNA, 654 bp, Artificial Sequence
  derived and/or modified sequence
atggccaccagatcccccggcgtggtgatcagcgatgatgaacccggttacgacctggatctcttttgtattcctaaccactatgctgaggacctcgagcgggtattcatcccccacgggcttatcatggatcgaacagaacgtctggctcgcgatgtgatgaaagaaatgggcggacaccacattgtagctctctgcgtcttaaagggcggctataaattcttcgccgatttgctggactatatcaaggctttgaacaggaatagtgaccggagcatccccatgacggtggatttcatcagacttaagtcctactgtaacgatcagtcaacaggtgatatcaaagtcattggcggtgatgatctgagtaccctgactgggaaaaacgtcctcattgtggaggacattatcgatacagggaaaacaatgcagactctcttgtcacttgtgcgccagtataacccgaagatggtcaaagtggcaagcctgcttgttaagagaaccccccgctctgtcgggtataagccagactttgtcggatttgagatccctgacaagttcgttgttggatatgcgctcgattacaacgaatacttcagagacctcaatcacgtgtgtgtgatttccgaaacagggaaggctaaatataaggcc

SEQ ID NO: 4018 - DNA, 654 bp, Artificial Sequence
  derived and/or modified sequence
atggctaccagatccccgggagtggtgatctcagacgatgagccgggatacgatctcgacctgttttgcattcccaaccactacgccgaagatctggagcgggtgtttatcccacacggtctgatcatggacaggactgagcgcctggcccgcgacgtgatgaaagaaatgggcggacatcacatcgtcgcgctgtgcgtgctgaagggaggatacaagttcttcgctgatctgctggactacatcaaggcgctcaaccgcaattccgaccggtccatcccgatgactgtggacttcattaggctgaagtcatactgcaatgaccaatcgacgggggacatcaaggtcatcggcggagacgatctgtcgaccctgacgggcaagaacgtcttgatcgtggaagatatcattgataccggaaagactatgcaaaccctgctcagtctggttcggcaatacaatccgaagatggtgaaagtggcgtctctgcttgtgaagcgcaccccacgcagcgtgggctacaagccagatttcgtgggatttgaaattcccgataagttcgtggtgggctatgcgttggattacaacgaatactttagagacttgaatcatgtctgcgtgatttcagaaactgggaaagccaaatacaaggca

SEQ ID NO: 4019 - DNA, 654 bp, Artificial Sequence
  derived and/or modified sequence
atggcaactcgttccccaggcgtggtgatatcggatgacgagccaggatacgatcttgaccttttttgcatccctaaccattacgccgaagatctggaaagagtgtttattccgcatggattgataatggatagaaccgagagactggcccgtgatgtgatgaaagagatgggtgggcaccacatcgtggcactttgtgtccttaaaggtggctacaagttctttgctgatcttctggattacattaaagcactgaatcgtaattcggaccgatcaataccaatgaccgtcgatttcattaggctcaagagctactgcaacgatcagagcaccggagatatcaaagtgatcgggggtgatgatctgtccactctcactggaaaaaacgttcttattgtggaagatatcatcgatactggaaagactatgcaaactcttttgtcgctggtgagacagtacaatcctaaaatggtcaaggttgcatcccttcttgtgaagagaaccccgagaagtgtcgggtacaagcctgatttcgtgggattcgaaatccctgacaaatttgtggtcggctacgctctcgactataatgaatactttcgggaccttaatcacgtgtgtgtgatttccgaaaccggaaaggcaaagtacaaggca

SEQ ID NO: 4020 - DNA, 654 bp, Artificial Sequence
  derived and/or modified sequence
atggcaactcgctccccaggtgtggtgatttccgatgacgaacccggttacgacttggacttgttttgtatccctaaccattacgccgaagatttggaacgcgtgtttattccacacgggctcattatggaccgtaccgaaagacttgcccgagatgtgatgaaggaaatgggagggcatcatattgtggctctgtgcgtgctgaaaggcggctacaagttttttgcagatctcttggattacatcaaggcccttaatcgcaactcggacagatctattccaatgaccgtggacttcattcgactgaagtcatactgcaacgatcagtccaccggtgacattaaggtgatcggtggagatgacctgtccacccttaccgggaaaaatgtacttattgtggaggacataatagatacgggtaagaccatgcagactcttttgagccttgtgcgccaatacaatcccaagatggtgaaggttgcgagccttctggtcaagcgcactcctagatcagtcggatacaagccggattttgtgggctttgagattcctgacaaattcgttgtgggctacgcactggactataacgaatacttccgggacctgaaccacgtgtgtgtgatatccgagactggtaaggcgaagtacaaagca

SEQ ID NO: 4021 - DNA, 654 bp, Artificial Sequence
  derived and/or modified sequence
atggccacgcgatctccaggggtggtcataagcgacgatgagcctgggtacgaccttgacctgttttgtatccccaatcactatgcagaggatttggaaagggtcttcatccctcacggcttaatcatggacaggaccgaacggctggctcgagatgtgatgaaagaaatgggtggccaccacattgtggctctttgcgtgctgaaagggggatataagttctttgccgaccttctggattacattaaggctctgaaccggaattcagaccgttccattccgatgacagtggacttcattcgccttaaaagttattgtaatgaccaatctacaggcgacataaaggtgataggcggagacgacctgtcaactctgaccgggaagaacgtcctcattgtcgaggatatcatagacactgggaagacgatgcagacactactgtccctggtccgtcagtataacccaaaaatggtgaaagtggcttctctgctggtaaaaagaaccccacgatccgtggggtataagccagactttgttggcttcgaaatacctgacaaattcgtggtcggctatgccctggactataacgagtacttccgagacctcaaccacgtgtgcgtgatcagcgaaacgggaaaagccaagtataaagct

SEQ ID NO: 4022 - DNA, 654 bp, Artificial Sequence
  derived and/or modified sequence
atggctactcgttcccctggggtagtcatctcggatgatgaacccggctacgatttagacttgttttgcatccctaaccactatgccgaagaccttgaacgcgtattcatccctcacgggcttatcatggatcggactgagaggttggcaagggacgtcatgaaggagatgggcgggcatcacattgtagcgctgtgcgttctaaagggcggatacaaattctttgcggacttgcttgactatataaaagcccttaataggaacagtgaccgaagtatccctatgactgtcgatttcattcggctgaaatcctattgcaacgatcaatccactggagacatcaaagtgattggtggagacgatctttctacattaactggtaagaatgtcttgatagttgaagacataatcgataccgggaagaccatgcagacccttctctctttggttcgacaatataaccctaagatggtaaaggtggcaagtctgctcgtgaaacgtactcccaggagtgttggttacaaacctgacttcgtgggattcgagatcccagacaagttcgtggttggctacgctctagactataacgagtacttccgcgatctaaaccatgtttgtgtaatcagtgagacagggaaggcgaagtacaaagcc

SEQ ID NO: 4023 - DNA, 654 bp, Artificial Sequence
  derived and/or modified sequence
atggcgacgcgatcgccgggtgttgtaatatcggatgatgaaccgggttatgatctagatttattttgtataccgaatcattatgcggaagatttagaacgtgtttttataccgcatggtttaataatggatcgaacggaacgtttagcgcgtgatgttatgaaagaaatgggtggtcatcatatagtagcgttatgtgtattaaaaggtggttataaattttttgcggatttattagattatataaaagcgttaaatcgtaattcggatcgatcgataccgatgacggtagattttatacgattaaaatcgtattgtaatgatcaatcgacgggtgatataaaagtaataggtggtgatgatctatcgacgttaacgggtaaaaatgtattaatagtagaagatataatagatacgggtaaaacgatgcaaacgttattatcgttagttcgtcaatataatccgaaaatggttaaagttgcgtcgctactagttaaacgaacgccgcgttcggtaggttataaaccggattttgtaggttttgaaataccggataaatttgtagtaggttatgcgctagattataatgaatattttcgtgatttaaatcatgtttgtgttatatcggaaacgggtaaagcgaaatataaagcg

SEQ ID NO: 4024 - DNA, 654 bp, Artificial Sequence
  derived and/or modified sequence
atggccactaggtcgccgggcgtggtgatttccgacgatgagccgggatatgacctggaccttttctgcatcccaaatcactacgctgaagatctcgaacgcgtgttcatccctcatggcctcatcatggacaggactgaacgcctggcccgggacgttatgaaagagatgggcgggcatcacatcgtggccctctgcgttcttaagggcggatacaagttcttcgccgatctgcttgactacataaaggcgctgaaccggaacagcgaccgctcgattccgatgactgtcgatttcatcagactgaaatcctactgcaacgaccaatcgaccggagatatcaaggtgatcggaggggacgatctctccacccttactggtaagaacgtgctgatcgtggaggacataatcgacacgggaaaaacgatgcaaaccctgctctccctggtgcgccagtataatccaaagatggttaaagtcgcaagcctcttggtgaagcgcactccaaggagcgtcggctacaaaccagatttcgtgggattcgagatccctgataagttcgtcgtgggctacgctctcgattacaacgaatactttagggacctgaatcacgtgtgcgttatctcagaaaccggcaaagccaagtacaaagca

SEQ ID NO: 4025 - DNA, 654 bp, Artificial Sequence
  derived and/or modified sequence
atggctacacgttctccaggcgtggtgatatcagacgatgaacctggctacgatctggacctcttctgtattcccaatcactacgccgaggatctggagcgggtgttcattccacacggcctaatcatggatagaacagaaagactagctcgagacgtgatgaaggagatgggcggacaccacatagtggcactttgcgtgctgaaaggtggctacaagttttttgctgatctgttagactacatcaaggccctcaacaggaacagcgacaggagcatcccaatgacagtggatttcatcagactgaaatcctattgcaacgatcagtccacaggagacattaaggtcatcggaggcgatgatctgtctacactgacagggaagaatgttctgatcgtggaggatatcatcgacaccggcaaaaccatgcagactctgttaagtttggttagacagtataaccctaagatggtaaaggtggctagtctgcttgtgaagcggacacctcgctccgtgggatataaaccagactttgtcgggtttgagataccagataagttcgtggtgggatatgcattagattataatgagtactttcgcgacctaaatcatgtctgtgtgataagtgagaccggcaaagccaagtacaaagca

SEQ ID NO: 4026 - DNA, 654 bp, Artificial Sequence
  derived and/or modified sequence
atggccactcggagccctggggtcgttatcagcgacgatgagcctggctatgatcttgatctgttctgtatacctaaccactatgccgaagatctggagcgagttttcattccccatggcctcatcatggaccggacagaaagactggcacgcgatgtgatgaaagagatggggggtcaccacattgtcgctctctgcgtccttaaaggagggtacaagttcttcgcggacctgctagactatattaaagccctaaacaggaattccgatagatccataccaatgaccgtcgactttatccgcttgaagtcatactgtaatgatcaaagtacgggcgatattaaggttatcgggggggacgatctcagcacattgactggaaaaaacgtgctgatcgtggaggatatcatcgatactggaaaaacaatgcaaacactgctctccctagtgagacagtacaatccaaagatggtcaaagtcgcgagcctgctagttaagcgcactcccagatccgtggggtacaaacctgattttgtgggcttcgaaataccagataaattcgtggtggggtacgcacttgactacaacgaatactttcgggatctcaatcacgtgtgtgtgataagtgaaaccggcaaggctaaatacaaagcc

SEQ ID NO: 4027 - DNA, 654 bp, Artificial Sequence
  derived and/or modified sequence
atggcaactaggtcaccaggggtggtgatttccgatgacgaacccgggtacgatcttgacctgttttgtatccctaaccattacgccgaggatctggaaagagtgtttatccctcacgggctcattatggaccgcaccgaacgtctcgcaagggatgtaatgaaggaaatgggaggacatcacattgtcgctctgtgtgtccttaaggggggctataagttctttgccgatctgctcgattacataaaggcacttaatagaaacagcgatcggtcgataccgatgactgtcgacttcattcgtcttaaatcctactgcaacgaccaatccactggagatatcaaggtgattgggggagatgatctgagcacccttactggaaagaatgtgcttattgtggaagatatcatagatacgggtaagaccatgcaaaccctcctttccctggtgagacagtacaaccctaagatggtgaaggttgcctcccttctggttaagaggacccctaggtcggtgggatacaagcccgactttgtgggattcgaaatcccagataagtttgtggtgggctacgcccttgattacaacgaatactttcgggaccttaatcatgtgtgcgtgatatccgagactggtaaagccaaatacaaagcg

SEQ ID NO: 4028 - DNA, 654 bp, Artificial Sequence
  derived and/or modified sequence
atggctacccggtccccaggagtggtgatctcggatgacgaaccaggctacgacctggacctgttctgcatccctaaccactacgctgaggacctcgaacgtgtgtttattccgcacggactgatcatggacaggaccgagcgcctcgcccgggatgtcatgaaggaaatgggaggtcaccatatcgtggcgctttgcgtgttgaagggagggtacaagttctttgccgacctgcttgactacataaaggctctcaacaggaatagcgatagaagcattccgatgactgtggacttcatccggctgaaaagctactgcaacgaccagagcactggcgacattaaagtcatcggaggagacgacctgtccaccctcactggaaaaaacgttctgatcgtcgaagatatcatcgacaccggaaagacgatgcagactctgctttccttggtgcgccagtataaccctaaaatggtgaaggtggcatcactgctcgtgaagagaactccgaggtcagtcggctacaaaccagacttcgtcggcttcgaaatccctgacaagttcgttgtgggttacgcccttgactataacgagtacttccgggaccttaaccacgtgtgcgtgatttcggaaaccggtaaggcaaagtacaaggcg

SEQ ID NO: 4029 - DNA, 654 bp, Artificial Sequence
  derived and/or modified sequence
atggctacacggagtccaggtgtggtgatctccgatgacgagcctggctatgatcttgacctgttctgcataccaaaccactacgctgaagacctggagagggtattcatcccccatggattaataatggacagaaccgaacgactggcccgggacgtcatgaaagagatggggggccaccacattgtggcactgtgtgtgctcaagggcggctacaagttttttgccgaccttctggactatattaaggccttaaatcgaaactctgatcgctcaatacctatgactgtagacttcattcggttgaaatcctattgtaatgaccagagcacaggggacattaaagtcattggtggggacgacctgagcacactcaccggaaaaaacgtcctgatcgtggaagacatcatcgacactggcaaaacgatgcagaccttgctgagtctggtacgacaatacaatcctaagatggtcaaggtcgctagtctgctagtcaagagaaccccccgcagcgtggggtacaaacctgatttcgtcggtttcgagattccagacaaatttgtggtcggctacgctttagattacaacgaatactttagggatctcaatcatgtctgtgtgattagcgaaacgggcaaggcgaagtacaaagct

SEQ ID NO: 4030 - DNA, 654 bp, Artificial Sequence
  derived and/or modified sequence
atggctaccaggtcaccaggcgttgtcatttctgacgacgaacccggctacgacttggatttgttctgtattcccaaccactatgccgaggacctggagagggtttttatcccccatgggctaattatggaccggaccgaacggctggcacgcgacgtgatgaaagaaatgggcggccaccatatcgtggctttgtgtgtgctgaaggggggctacaagttcttcgcagacctgctcgattacataaaagccctaaatcgcaattccgatcggtccatccccatgacagtggactttataaggcttaaaagctactgtaatgatcagagcaccggtgacatcaaggtgatcggcggagatgacctctccaccttgaccggaaagaacgtcctgatcgttgaggatataatcgatacaggaaagaccatgcagactctgttatctctcgtccggcagtacaaccctaagatggtcaaagtggcttcgttgctcgtcaaaagaacccccagaagcgtggggtataagcccgattttgtcgggtttgagatccccgataaattcgttgtcgggtacgccttagactataatgaatatttcagagacctcaaccatgtgtgcgttatctctgaaactgggaaagcgaaatataaggcc

SEQ ID NO: 4031 - DNA, 654 bp, Artificial Sequence
  derived and/or modified sequence
atggccacacgcagcccaggggtggtgatctcggatgacgaacccggctatgacttggatcttttctgcattccaaaccactacgctgaggacctagaaagggtcttcattcctcatggactcatcatggacaggactgaacggctggctcgcgatgtgatgaaagaaatgggaggccatcacattgtggccctgtgcgtgctgaagggagggtataagtttttcgccgaccttctggattacatcaaagccctgaatagaaatagcgatagaagcatccccatgaccgttgatttcatcaggctcaagtcttactgtaacgaccagtcaacgggagatatcaaggtcatcggcggggacgatctttctactctcactgggaagaacgtcctcatagtcgaagacatcattgatactggaaaaacaatgcaaacgcttctgagcctggtcaggcaatataaccccaagatggtgaaggtggcttctctcctcgtgaagcgaacaccacgcagtgtgggttacaagccggactttgtcggctttgaaatcccagataaatttgttgttggctacgccctggactacaatgagtatttcagggacctgaaccatgtttgtgtgatttctgaaaccggcaaggctaaatacaaagcc

SEQ ID NO: 4032 - DNA, 654 bp, Artificial Sequence
  derived and/or modified sequence
atggccacacggagcccaggtgtggtaatcagcgacgatgaacctggttatgacttggatttgttctgtatccctaaccactacgctgaagacttggagagggtgtttattccacatggcctgataatggataggactgagaggctggcccgtgacgtgatgaaagaaatggggggccaccatatagtggctctgtgcgtcctgaaaggagggtataagttttttgccgacctgctagactacatcaaagccctcaatcggaatagtgaccgctctatccctatgaccgtggactttatccgcctcaaatcttattgtaatgatcagtcaacaggggatattaaggtaattgggggggatgatctctcaactttgacaggtaagaacgtcctgattgtggaggacattatcgacactggaaagactatgcagaccttgctctcactggttaggcagtacaaccccaaaatggtgaaagttgctagcctgctggtgaagaggacaccgagaagtgtcgggtacaagcccgactttgtgggtttcgaaattcctgacaagttcgtagtgggatatgccttagattataacgaatattttagagatctgaatcatgtgtgtgtaatctccgagactgggaaagccaaatacaaggct

SEQ ID NO: 4033 - DNA, 654 bp, Artificial Sequence
  derived and/or modified sequence
atggcaacccggagcccaggtgtggtgatttccgacgatgagccggggtatgacctggatttgttctgcatccctaatcattacgcggaagatctcgagcgcgtctttataccgcatggtctgattatggacagaactgagagacttgcccgggacgtgatgaaagaaatgggaggccatcatatagtggcactttgtgtgttgaagggaggttacaagtttttcgctgatctgctggactacattaaggcgcttaaccgcaactccgatagatcaatacccatgactgtcgactttattcgtctgaagtcctactgcaacgatcaaagcaccggagacattaaagtcatcggcggagatgacctgtcaacgctgacggggaaaaatgtgcttatagtcgaggacataatagacaccggaaagaccatgcaaacgctcctgtcgctcgtgcggcagtacaaccctaaaatggtgaaggtcgcctcgctgctcgtgaagagaacccctagatcagttgggtataagccggatttcgtgggattcgaaattccagacaaatttgtggtgggttacgcactggattacaacgaatactttcgtgatcttaatcacgtctgcgttatctccgaaaccggtaaggcaaagtacaaggca

SEQ ID NO: 4034 - DNA, 654 bp, Artificial Sequence
  derived and/or modified sequence
atggcaaccagaagcccgggcgtggtgatctcggacgacgaaccaggttacgacctcgacctgttctgcatcccaaatcattacgctgaagatctggagcgcgtgttcatcccccacggactcattatggatcgcactgagcgcctggcccgggacgtgatgaaggagatgggagggcaccacattgtggcactctgtgtgctgaaagggggctacaagttctttgcggatcttctggattacatcaaggctttgaaccggaactcagatcgcagcatcccgatgactgtggacttcatccgccttaagagctactgcaacgaccagtcgacgggcgacattaaggtgatcggtggagacgacctgtcgacgctgaccggcaaaaatgtcctgatcgtcgaggacattatcgacaccggcaagaccatgcaaacgctgctgagcctggtgcggcaatacaacccgaagatggttaaggtggcctcccttctggtcaagagaacccctaggtcagtgggatacaagccggattttgtgggcttcgaaatcccggataagttcgttgtgggatacgccctggactacaatgagtacttccgggatctgaatcatgtgtgcgtcatctccgagactggaaaggctaaatacaaagcg

SEQ ID NO: 4035 - DNA, 654 bp, Artificial Sequence
  derived and/or modified sequence
atggccactcgttcgcctggcgtcgtgatcagcgatgacgaaccaggatacgatctggatttgttctgtattcctaaccactacgctgaggatctcgaacgagtatttatcccacacggtctgattatggacaggaccgagcgactggctagagatgtcatgaaggagatggggggccatcacatcgtcgccctttgcgtcctgaaaggaggctacaaattcttcgcagacctgttggattatattaaggctcttaaccggaattctgatcgttctatacccatgacagtcgacttcatcagactgaagagttactgtaatgaccagagcacaggggacattaaagtgataggaggggatgatctgtcaaccctcaccggaaagaacgtgctgatcgtggaggatatcatcgataccggcaaaaccatgcagaccctgctctccttagtgcgtcagtataacccgaaaatggtcaaggtggcttcactgcttgtcaaaaggacaccacgctccgtggggtacaagcctgactttgtaggctttgaaataccggataaattcgtcgtcggttatgctctagactacaacgagtactttcgtgatttgaaccatgtgtgcgtgatctcggagaccgggaaagcaaagtataaagcc

SEQ ID NO: 4036 - DNA, 654 bp, Artificial Sequence
  derived and/or modified sequence
atggctacaaggtcccctggcgtggttattagcgacgatgaaccaggatacgatcttgacttgttttgcatccccaatcattatgccgaggacctggagcgtgtattcattccacacggactgataatggacagaaccgagcggctggcacgcgacgtcatgaaagagatgggcggtcatcacattgtcgccctatgcgtgctcaaaggcgggtacaagttctttgcagacctactggactacatcaaagctttgaaccgtaactcagaccggtccatcccgatgaccgtcgacttcatccggctcaaatcttactgcaatgaccagtcaactggggacattaaagttatcgggggtgatgacctttccacactgacaggaaagaacgtattaattgtggaggacataatcgacacaggcaagaccatgcagactcttctctctctcgttcggcagtataatcccaagatggtcaaggtggcatctttgctggtcaagagaacaccccgatctgtcgggtacaagccagatttcgtgggttttgagatccccgataagtttgtggtgggatatgccctcgactacaacgaatacttcagggatctaaaccatgtctgtgtgatttccgagaccggaaaggctaaatataaagcc

SEQ ID NO: 4037 - DNA, 654 bp, Artificial Sequence
  derived and/or modified sequence
atggcaaccagatcgccgggagttgtgattagcgatgacgaaccgggttatgatttggatctgttctgcataccgaatcactacgccgaggatctcgaaagggtattcatcccacacggccttatcatggaccggactgaacggttggcgcgggacgtcatgaaggaaatgggaggacatcacatcgttgcactctgcgttttgaagggtggctacaagtttttcgctgatctgctggattacatcaaagcactgaaccggaactcagatcgctccatcccgatgaccgtggacttcatccgactcaaaagttactgcaatgatcagtcgaccggggacatcaaagtgattggcggagacgacctttcaaccctgaccggcaagaacgtcttgatcgtggaggacattatcgacactggtaagaccatgcagactctgctgagcctggtgcgtcaatacaacccaaaaatggtaaaggtggcctccctgctcgtgaagaggactccaaggtcagtcgggtacaaacccgacttcgtcggatttgagatacctgacaagtttgtggtgggctatgcgctcgattacaatgagtacttccgcgacctgaaccatgtgtgtgtgatctccgaaacgggcaaggcgaagtacaaggcc

SEQ ID NO: 4038 - DNA, 654 bp, Artificial Sequence
  derived and/or modified sequence
atggctactagaagcccaggagtggtgatctcggatgacgaaccgggatacgaccttgacctcttttgcattcctaaccattacgcggaggacctggagcgagttttcatcccgcatgggctcatcatggaccgtaccgaacggctggcacgggatgtgatgaaggagatgggaggtcatcacatcgttgcgctttgcgtgttgaagggcggctacaagtttttcgcggacctgctggattacattaaggcactgaaccgcaactcagatagatccatcccaatgaccgtggatttcatcagactgaagagctactgtaatgaccaaagcaccggagatatcaaggttatcggcggggacgacttgtcgaccctcaccggtaagaacgtgctgatcgtggaggatatcatagatactggtaagacgatgcagactctgctctcactcgtccgccagtataatcccaaaatggtcaaagtcgcctccctgctggtgaagagaaccccgcggagcgtgggttacaaacccgacttcgtcggattcgagatcccggacaagtttgtggtgggatatgcgctcgattacaacgaatacttccgggacctgaaccacgtgtgcgttatttcagaaactggaaaagccaagtacaaagcc

SEQ ID NO: 4039 - DNA, 654 bp, Artificial Sequence
  derived and/or modified sequence
atggcaacaagaagtccaggagttgtcatttccgatgatgaaccagggtatgatctggacttattttgtatcccaaatcattacgcggaggacctcgagcgggtgttcatccctcacgggctcattatggatagaaccgagcggcttgccagagatgtcatgaaagagatggggggccatcacatagtcgccttatgcgtgctcaaaggcggttacaaattcttcgcggacctcctggattatatcaaggctttgaatcgtaattcagatcgatctatccccatgacggtcgatttcatacgtttgaagtcatattgcaatgaccaatcgacgggcgacattaaagtcatcggcggtgatgacctttctacactgaccggcaaaaatgtgcttatagtggaagacatcatcgatacaggaaaaaccatgcagacccttctcagcttggtgagacagtacaaccctaagatggtgaaggttgcctccctcctggtaaaacgcaccccgcgcagtgtgggatacaagcccgactttgtgggcttcgagatcccggataagttcgttgttggctatgcgctagattacaacgagtattttagagaccttaaccatgtatgcgttataagtgaaaccggcaaagccaagtataaagca

SEQ ID NO: 4040 - DNA, 654 bp, Artificial Sequence
  derived and/or modified sequence
atggctacaagatctccaggcgttgtcatcagtgacgatgaaccgggatacgatttggatctcttctgcatccctaaccactacgctgaggacttggaaagagtttttattccccatggcctgattatggatagaacagagcgcctggctagagatgtcatgaaggaaatgggcggccaccatatagtagctctttgcgttctgaagggaggttacaagttcttcgctgaccttcttgactatattaaagctttgaacagaaactcagataggagtatccccatgactgtggatttcatcagattgaaatcatattgtaatgaccagtcaaccggcgatataaaagtgattggtggtgacgacctctcaacgctgacaggtaagaatgtcctgattgttgaggacatcattgacactggtaagactatgcaaactctgctttctctggttagacaatacaaccccaaaatggtcaaggtcgcttccttgctggtgaagaggacacccaggagtgtgggttacaagcccgacttcgtcggtttcgaaatccctgataagttcgtggtcggatacgcgctggactacaatgagtactttagggacctcaatcacgtctgtgttatatccgaaactggaaaagccaaatacaaggct

SEQ ID NO: 4041 - DNA, 654 bp, Artificial Sequence
  derived and/or modified sequence
atggctactcggtcgccaggggtggtaatttctgatgacgagcccggctacgacctagatctgttctgcatccccaaccactatgcggaagatctggagagagtattcatcccccatggactgatcatggataggaccgagcgattggcccgtgatgtaatgaaggaaatgggaggccatcatatagttgccctttgcgtgctgaaaggagggtacaaattcttcgcggacctgctggattatattaaagccctaaaccggaactctgatagatcaatcccaatgaccgtagatttcatccgtttgaagtcctattgcaatgaccagtcaacgggggacattaaggttatcggaggggatgacctaagcactctcacaggcaagaacgttttaattgtggaggacataattgacaccggaaaaactatgcagacacttttgtccctcgtgcggcagtacaaccctaagatggtaaaggtggcctccctacttgtaaagcggactccaagaagcgtggggtacaagccggactttgtgggtttcgaaattccggataagttcgttgtcggttatgccctggactacaacgagtatttccgggacctgaatcacgtgtgcgttataagcgaaacaggaaaggcgaaatataaggct

SEQ ID NO: 4042 - DNA, 654 bp, Artificial Sequence
  derived and/or modified sequence
atggcaactcgctccccgggtgtggtcatatcggatgacgagcctgggtacgatcttgacctgttctgcattcctaaccactacgcggaagatctggagagagtgtttattccacatggattgattatggatcgtactgagcgcctggcgcgtgatgtgatgaaagaaatgggcgggcaccacattgtcgcactttgcgtgctcaagggaggttacaagtttttcgcagacctgctcgattacatcaaagcgctgaaccggaattccgataggtccatccccatgaccgtcgactttatccgcctcaaatcgtattgcaatgaccagagcactggtgacattaaggtcatagggggcgatgatctttccacccttaccggcaagaacgtgctgattgtcgaggacattatcgacacggggaaaacgatgcaaactctgcttagcctcgtgaggcagtacaaccctaagatggtgaaggtggcatcgctcctggtgaagcggaccccccgatccgtgggatacaagcccgattttgtcggatttgaaattccggacaagtttgtcgtcggatacgccctggactacaacgagtactttagagatctgaatcacgtgtgcgtgattagcgaaactggtaaagcaaaatacaaggca

SEQ ID NO: 4043 - DNA, 654 bp, Artificial Sequence
  derived and/or modified sequence
atggccactcgttcaccgggggtggttatctcggacgacgaacccggatacgatttggacctcttctgcataccaaatcactacgctgaggaccttgaaagagtgttcatccctcatggactgattatggaccgtaccgagagactggcacgagatgtcatgaaggagatgggaggtcaccatatcgtggcactctgtgtgctgaaagggggttacaagttttttgcggaccttttggattacattaaggcacttaatcgcaactcggatagatccatcccaatgacggttgatttcattcggctgaagagctactgtaacgaccagtcaaccggagatatcaaagtgattggaggagatgatctgtccacgctgaccggaaagaatgtcctgatagtcgaggacattattgacacgggcaaaactatgcaaacccttctctccttggttcgacaatacaaccctaagatggtgaaggttgcatcactgctggttaagaggaccccccgatccgtcggctataagccagattttgtgggattcgaaattcctgataagttcgtcgtgggatacgccttggattacaatgagtactttagagatcttaaccatgtgtgtgtgatttcagaaaccggcaaggcgaaatacaaagcc

SEQ ID NO: 4044 - DNA, 654 bp, Artificial Sequence
  derived and/or modified sequence
atggctaccagatcgcccggagtggtgatttccgacgatgagccaggatacgatctcgatcttttttgtatccctaaccattacgccgaagatcttgaaagagtctttataccccacggcctgattatggatagaactgagcgtctcgctcgcgacgtgatgaaggaaatgggaggacaccatattgtcgcgctgtgtgtgcttaagggtggttacaaattcttcgcagatctgcttgactacatcaaagcactgaataggaactccgatcggtcgattcccatgactgtcgatttcattcgtcttaaaagctactgcaacgatcagtcaacgggggacattaaggtgattggtggagatgacctcagcaccctcaccgggaaaaatgtgttgattgtggaagatatcattgatactggaaagactatgcaaacccttctttccttggtccggcagtacaaccctaagatggtgaaagtggcatcactcctcgtgaagagaactccccgttcggtggggtacaaacccgattttgtgggcttcgagattccagacaagttcgttgttggctatgcacttgattacaatgagtactttcgcgacttgaaccacgtctgcgtaatatcggagactggaaaggcaaagtacaaggcc

SEQ ID NO: 4045 - DNA, 654 bp, Artificial Sequence
  derived and/or modified sequence
atggcgacccgtagccctggggtggtgatctccgatgatgagcctgggtacgaccttgatctgttttgcattccaaatcactacgcagaggacctggaacgcgtgttcattcctcatggactgattatggacagaaccgagcggcttgcgagagacgttatgaaagaaatgggaggacaccacattgtggccctgtgcgtgctgaaagggggatacaagtttttcgcggatctgcttgattacataaaagcacttaatcgcaactcggatagatcgattccgatgaccgtcgacttcattagattgaagtcgtactgtaatgatcaatcgaccggcgacattaaggtcattgggggagatgacctttcaactctgaccggtaagaacgtgctcattgtggaagatatcattgatactggtaagactatgcagaccctgttgtcgctggtgagacagtacaacccaaagatggtgaaggtggcgtcacttctggtcaaacgcactccgcggtccgttggatacaagccagattttgtgggatttgagattccagacaagtttgtggtcggctatgcactggattacaacgaatactttcgggaccttaatcatgtctgtgtaatcagcgaaactgggaaggcaaagtacaaggcc

SEQ ID NO: 4046 - DNA, 654 bp, Artificial Sequence
  derived and/or modified sequence
atggctaccagatccccaggagtggtgatcagcgacgacgaaccaggatacgacctggaccttttctgtatcccgaaccactacgccgaggacttggagcgggtgttcatcccgcacggactcatcatggatcggaccgagcggctggctagggacgtcatgaaagagatgggtgggcatcacatcgtggcactctgcgtgctcaaggggggctacaagttctttgccgacctcctggactacatcaaggccctgaaccgcaactcggatcgctccattccaatgaccgtggactttattcgcctcaagagctactgtaacgaccagtccaccggagatatcaaggtgatcggaggcgacgatctctcaaccctgaccggaaaaaacgtgctcattgtggaggacatcattgatactggaaagactatgcaaactctgctttcgttggtgcgccagtacaacccgaagatggtgaaagtggcctcactgctggtgaaacgcactccgcgcagcgtcggttacaaaccagatttcgtgggcttcgagatcccggacaaattcgtcgtcggatatgctctcgactacaatgagtacttcagggatctgaaccacgtgtgcgtcatctcggaaacgggcaaggcaaagtacaaggcc

SEQ ID NO: 4047 - DNA, 654 bp, Artificial Sequence
  derived and/or modified sequence
atggccaccaggagccccggggtggtaatatccgatgatgaacctggatatgatcttgatctgttctgcatcccaaatcactacgcggaggacctggagcgcgtgttcatcccccatggacttatcatggatcgaacggaaagactggcacgcgatgtgatgaaagagatgggaggtcaccatatagtcgcactgtgtgtgttgaaaggaggttacaagttctttgcggatctcttggactacattaaagcgttgaataggaactcggaccggtcaatcccgatgaccgttgacttcatccgcctcaaatcttactgcaacgaccagagtaccggcgacatcaaggtcatcggcggcgatgatctttcgactctgactggaaaaaacgtcttgattgttgaggacatcatcgacaccggcaagaccatgcaaaccctcctgtccctggtgcggcagtacaacccgaagatggtgaaggtggcctccctgctcgtgaagcggactccgagatccgtggggtacaagccagactttgtgggattcgaaatccctgacaagttcgtcgtcggatacgctctggactataacgaatactttcgggacctgaatcacgtatgcgtcatttcggaaacgggaaaggcaaagtacaaagcc

SEQ ID NO: 4048 - DNA, 654 bp, Artificial Sequence
  derived and/or modified sequence
atggctaccaggtcccctggagttgtgatttctgatgatgagccgggctacgatctggatctcttctgtatcccaaaccactatgccgaagatcttgaacgagtcttcataccacacggcctgatcatggatagaacagaacggctggccagggatgttatgaaagagatgggcggacaccacatcgtggcactgtgcgtcctcaagggaggatacaaattcttcgcagaccttctcgactacattaaggccctgaaccgcaacagcgaccgatcaattccaatgacagtggatttcatacgcttgaaatcatactgcaacgaccaaagcaccggagatatcaaggttattggaggagacgatctgtctaccctgacgggcaagaatgttctgatagttgaagacattatcgatacaggcaaaactatgcagacactactgtcccttgtcaggcaatacaaccccaagatggtcaaggtcgcctcactgctggtgaagcggacacctaggtctgtgggttataagcctgacttcgtgggattcgagatccctgataaattcgttgtgggatatgccctggattacaacgaatacttccgggacctcaaccacgtgtgtgtgattagcgagacaggtaaggccaagtataaggca

SEQ ID NO: 4049 - DNA, 654 bp, Artificial Sequence
  derived and/or modified sequence
atggcgactaggtcgccaggtgtggtgatttccgacgatgaaccgggctacgatctggacctgttctgtatcccaaaccactatgccgaggatctggaacgggtctttataccacacgggctgattatggatcgaactgagcgcctcgccagagacgtgatgaaggagatgggcggacatcacatcgtggctttgtgcgtgcttaaagggggctataagttcttcgcagacctgctggactacatcaaggcgctgaatcggaacagcgaccgctccattcctatgaccgtagactttattcgcctgaagtcctactgcaacgaccaatcaactggcgacattaaggtgattggaggagatgatctctcaaccctgactggtaaaaacgtcctgatcgtcgaggacatcatcgacaccggcaagaccatgcagaccctgctttcactcgtgaggcaatacaatccgaagatggtgaaggtcgcaagcctgctggtgaaacggaccccgagatccgtgggatacaagccggacttcgtcggttttgaaatcccagacaagttcgtggtcggttacgcccttgactacaatgaatactttcgcgatttgaaccatgtgtgcgttatctctgagactgggaaagccaagtataaggct

SEQ ID NO: 4050 - DNA, 654 bp, Artificial Sequence
  derived and/or modified sequence
atggccacccgcagccccggcgtcgtgatttcggacgatgaacccggctacgacctggatctcttctgtattcctaaccattatgctgaggatctcgaacgggtgttcataccacacgggctgattatggatcgcactgaaagactggcgagagacgtgatgaaggagatgggtggtcatcacatcgtggcactgtgtgtgctgaaaggaggttataagtttttcgcagatcttcttgactacattaaggcacttaaccgaaactcggacagatcaatcccaatgaccgttgatttcatccggctgaagtcctactgtaatgatcagtccaccggagacattaaggtcattggaggggacgacttgtcaactctgacgggcaagaacgtgcttattgtggaggatatcatagacactgggaaaactatgcagaccttgctcagcctcgtccgccaatacaatcctaaaatggtcaaggtggcgagcctcctggtgaagcgaacgccgcggtcagtcggctacaagccagacttcgtgggttttgaaattcccgataagtttgttgtgggttacgcccttgattacaatgagtacttcagagatcttaaccacgtctgtgtcatttccgagacgggaaaagcaaagtacaaggca

SEQ ID NO: 4051 - DNA, 654 bp, Artificial Sequence
  derived and/or modified sequence
atggccacaagaagtcctggagttgtcatcagcgatgacgaaccaggttatgacctagatcttttttgcatacccaatcactacgcagaggaccttgagcgcgtattcataccacacggattaattatggatagaaccgagagactggctagggacgttatgaaggagatgggtgggcatcacattgtcgccctgtgcgtgctgaagggtggctataaattttttgccgatctcctcgattacattaaggcgcttaacagaaactcggatagatctatacctatgactgtggactttatccgccttaagagctactgtaacgatcagtctacaggtgatattaaggtcatcggcggcgacgatctgtcaaccctcacaggaaagaatgtgctgatcgtggaggacattatagacaccggcaagactatgcagaccctccttagcctcgttcggcagtacaaccccaaaatggtgaaggtggcttctctccttgttaaaaggacccccagatccgtgggctataaacctgacttcgtgggctttgaaatacctgacaagtttgttgtggggtacgcattagattataacgaatacttccgcgaccttaaccacgtctgcgtcatttcggaaacaggaaaggccaagtataaagcg

SEQ ID NO: 4052 - DNA, 654 bp, Artificial Sequence
  derived and/or modified sequence
atggccactaggtctccgggggttgtgatctctgatgacgaacccgggtacgatctcgatttgttttgcattcctaatcattatgcggaagacctggaacgagtcttcatcccacacggactgattatggacaggacagaaaggttggctagagacgtcatgaaggaaatgggagggcatcatatcgtggcactttgcgtcctgaagggcgggtataagttttttgctgacctgctcgactacatcaaggccctgaatcgcaatagcgaccggtcaatacctatgaccgtggactttatcagactgaagtcttattgcaatgaccagagcaccggcgatatcaaagtgatcggtggcgatgatctgtccactctgactgggaagaacgtgctcatcgttgaagacatcattgatactgggaaaaccatgcagacgctgctgtctctggtgcgacaatataatccaaagatggttaaggtggcttctctgctggtgaagcgaactccaagaagcgtgggttacaagccggattttgtcgggttcgaaatacctgacaaattcgttgtaggctacgccctggattataatgagtacttccgagaccttaaccacgtctgcgttatttcagaaacaggcaaagcgaaatacaaggct

SEQ ID NO: 4053 - DNA, 654 bp, Artificial Sequence
  derived and/or modified sequence
atggctacgcggagcccgggcgtggtgatctcggacgatgaacctggctacgacctggatctgttctgtatcccaaaccattacgcggaagatcttgagcgtgtctttatcccgcacggccttatcatggacagaacggagcgactggccagagatgtgatgaaggaaatggggggccaccacattgtggccctgtgcgttctcaagggtggatacaaattcttcgccgatctgctcgactatatcaaagcattgaacaggaactcggacaggtccatccctatgactgtggacttcattcggctgaagtcgtactgcaatgaccagtcgaccggggacatcaaggtcattggtggagatgatctctcaactttgactgggaagaatgtgctgatagtagaggatatcatcgacaccggcaagactatgcagaccctcctgagccttgtccggcaatacaacccgaaaatggttaaggtggcttcattgctggtcaagagaactccgcggtccgttggatacaaaccagactttgtcgggttcgagatacccgataagttcgtggtgggttacgccctcgactataacgagtacttccgcgatcttaatcatgtgtgcgtgatctctgaaaccggaaaggcgaaatacaaggcc

SEQ ID NO: 4054 - DNA, 654 bp, Artificial Sequence
  derived and/or modified sequence
atggccacccgatcgcccggagtggttatttcggacgatgaaccaggttacgatctcgaccttttttgcattccgaatcattacgcagaagatcttgaaagagtgttcattccacatgggttgataatggatagaactgaacgccttgcaagagatgtcatgaaggagatggggggccatcatattgtggcactgtgtgtcctcaagggtggatacaagttctttgcagatcttctggattacataaaggcgctgaaccgaaattctgaccggagcatccctatgaccgtcgatttcataagactcaagtcgtactgtaacgatcaatcgactggagatatcaaggtaattggcggcgatgatctttcgactctcactggtaagaacgtgctgattgtggaggacattatcgatactggaaagactatgcagactcttctttcgcttgtgaggcagtacaaccctaaaatggtgaaggttgcatcactgttggtgaagagaactcctcggtccgtcggatacaaacccgactttgtgggatttgaaatccctgataagttcgtcgtgggctatgcgctggattacaatgaatactttcgcgaccttaatcatgtctgcgtgatctccgagactggcaaggccaagtacaaggcc

SEQ ID NO: 4055 - DNA, 654 bp, Artificial Sequence
  derived and/or modified sequence
atggccactcgcagccctggagtcgttatcagcgacgatgaaccgggatacgatctcgatctgttttgcattccgaatcattacgcggaggacctggagcgcgtctttatcccgcacggactcatcatggatcgcaccgaacgcctggcaagggatgtgatgaaggaaatgggtggacatcacattgtggctctgtgcgtcctcaagggcgggtacaaattcttcgccgacctcctggactacatcaaagccctgaaccgcaactcggaccggtcgataccgatgacggtggacttcatcagactgaagtcatactgcaacgaccaatcgactggcgacattaaggtgatcggaggcgacgacctgtcaacccttactggaaagaatgtcctgattgtcgaggacatcatcgataccgggaaaaccatgcagaccctgctgtcacttgtgaggcaatacaacccgaagatggtgaaggtcgcttcactgcttgtcaaacggacgccgcgctccgttggatacaagccagatttcgtgggtttcgaaatcccggacaaattcgtggtggggtacgcactggattacaacgagtacttccgcgacctgaatcatgtgtgtgtgatctcggagactggcaaagccaagtacaaggct

SEQ ID NO: 4056 - DNA, 654 bp, Artificial Sequence
  derived and/or modified sequence
atggctacaaggtcccctggagtggtgatatccgatgatgaacccggatacgacttagatctcttctgcatcccaaaccattacgcagaggatctagaacgggttttcattccacacgggcttataatggacaggacagaaaggcttgcacgggacgtaatgaaagaaatgggagggcatcacatcgtggccctgtgcgttctcaaaggagggtacaaattctttgctgacctcttagattatatcaaggctctgaataggaactctgataggagtatccccatgacagttgattttatcaggctcaaaagttattgcaatgaccagagtactggggatatcaaggtgatagggggagatgatttgtctactctgacaggaaagaacgtgctgatcgtggaagatatcattgatactgggaaaactatgcagacactactgtcgctcgtgcggcaatataacccaaagatggtgaaagtggcaagtctgctggtcaaacggacgccccggtctgtggggtacaaacctgattttgttggattcgagattccagataaattcgtggtggggtacgccttagactataatgaatatttccgagatctaaatcatgtttgcgtgattagtgaaacaggaaaagctaaatataaagct

SEQ ID NO: 4057 - DNA, 654 bp, Artificial Sequence
  derived and/or modified sequence
atggcaaccaggagtccaggagttgttattagcgacgatgagcctggctacgatcttgatctgttttgcatcccaaaccactatgccgaggatttggagagagtgttcatccctcatggtctgatcatggaccgcaccgaaaggctcgccagagatgtcatgaaagaaatgggaggccaccacattgtagctctttgcgtcctcaagggtggatacaaattttttgccgacctgctggactatatcaaagcactcaataggaattccgatcgctctattccaatgaccgttgacttcattagactgaagtcttactgcaacgaccagtctactggcgacattaaagttattggcggcgatgatctgtctactctgactggcaaaaacgttctcatcgtcgaagatattattgataccggtaaaactatgcaaacattgctgtcccttgtgcgtcaatacaaccccaagatggttaaggtagcctctttgcttgtgaagaggacacctcgtagtgtcggctacaagcccgacttcgtcggatttgagattccagataagttcgtagtcggatacgccctggattacaacgagtactttagagacttgaaccacgtatgcgtcattagcgagaccggaaaagccaaatataaggcc

SEQ ID NO: 4058 - DNA, 654 bp, Artificial Sequence
  derived and/or modified sequence
atggccacccggagtcccggagtggtcatctccgatgatgaaccgggatacgatctggacctcttttgcatacctaaccattacgccgaggacttggaaagagttttcatcccgcacggacttatcatggatagaaccgagaggcttgctcgggatgtgatgaaggaaatgggaggccaccatattgttgcactgtgtgtgttgaaagggggatacaaattttttgccgacttgctcgattacataaaggccctgaataggaattctgaccggtccattcctatgactgtggacttcattagactgaagagctactgcaacgaccagagcacaggggatatcaaggtcatcggcggggatgatctgtctactcttaccggcaagaacgtgctgatcgtcgaggatatcatcgataccggaaaaaccatgcagaccctgttgagtctcgtcagacaatacaatcctaagatggttaaagtggcgagtttgttggtgaagcgcaccccaaggagcgtgggttataaaccagatttcgttggctttgagattcctgacaaattcgtagtcggctacgccctcgactacaacgaatattttcgcgacctgaaccacgtctgtgtcatctctgagaccgggaaggccaagtacaaggcc

SEQ ID NO: 4059 - DNA, 654 bp, Artificial Sequence
  derived and/or modified sequence
atggccacccgttcccctggagtggttatatctgacgacgagcctgggtacgatttggacctcttttgcatccctaatcattatgctgaggatcttgaaagggttttcattcctcatggcttgattatggacagaacggagaggctagcgcgagatgttatgaaggagatgggagggcatcatattgtagccttgtgtgttctcaagggtgggtataagtttttcgctgatcttttagactatataaaagctttaaacaggaacagcgatcggtctattccaatgacggttgattttatccggttaaagtcctattgtaatgatcagtcaaccggggatattaaagtcatcggtggtgacgatcttagtaccttgaccggcaagaatgttcttatcgtggaggatattattgatacaggtaagacaatgcagacacttctgtctctcgtaagacaatataatccaaagatggttaaggtagccagtttattggttaaaaggactcctcgttctgttggatataaacccgactttgttgggtttgagattccagataagttcgtcgtgggatatgcccttgactacaacgaatatttcagggatctgaatcacgtttgtgtgattagtgaaactggtaaggcaaaatataaagca

SEQ ID NO: 4060 - DNA, 654 bp, Artificial Sequence
  derived and/or modified sequence
atggcgaccagatcgcctggtgtcgttatctcggacgatgagcctggatacgatctcgatcttttctgcatcccaaaccactatgccgaggacctcgagagggttttcattccgcatgggctgatcatggaccgcacggaacggctggctagggatgtaatgaaagagatgggcggacaccacatcgtggccctctgcgtcctcaaaggcgggtataagttctttgctgaccttcttgactacatcaaagcacttaacagaaacagcgaccggtccattccgatgactgtggatttcatacgactgaagagctactgtaacgaccagtcaaccggcgacatcaaggtcatcggcggcgatgacctgtccaccctcaccgggaagaatgtacttatcgtggaagatatcatcgatactggtaaaacgatgcagaccttgctgtccctggttcggcaatacaatccaaagatggtgaaagtggcctcacttctggtgaaaagaactccacgctcggtcggatacaagccggacttcgtcggatttgaaatccccgacaagtttgtggtgggatacgcattggactacaatgaatacttccgagatctgaaccacgtgtgcgtgatcagcgaaactggaaaggcgaagtacaaagcc

SEQ ID NO: 4061 - DNA, 654 bp, Artificial Sequence
  derived and/or modified sequence
atggccacccgctctcccggggtggtcattagcgacgacgagccagggtatgatctggatctcttctgcatcccgaaccattacgcggaggatctggaacgcgtttttatcccacacggcttgataatggatagaacagaacgcttggccagggacgtgatgaaggagatgggcggccatcatatcgtcgcgctgtgcgtcctcaagggagggtacaagttctttgcggaccttctggactatatcaaggcacttaaccgcaacagcgaccggagcattcctatgaccgttgactttatccgactgaagtcttactgtaatgaccagagcacgggggacattaaggtgatcgggggagacgatctttccactttgactggcaaaaatgtgctgatcgtggaagatatcattgacaccgggaagactatgcagaccctcctcagcctggtccgccagtataacccaaagatggttaaagtggcctcccttttggtgaagaggaccccccggagtgttggctacaaaccagactttgtagggttcgagattcctgataaattcgtcgtcggctatgctctggactacaacgagtattttagggatttgaatcatgtctgtgtaatctccgaaactggcaaagcgaagtataaggcc

SEQ ID NO: 4062 - DNA, 654 bp, Artificial Sequence
  derived and/or modified sequence
atggctactaggtcacctggagtggtgatcagcgacgatgagccgggatatgacctggatctgttttgcatcccaaatcattacgctgaggacttggaacgtgtctttatcccgcatggtctgatcatggaccggaccgagcggctcgcacgagacgtgatgaaggagatgggcggccaccacatcgtggcgctgtgcgtgctcaagggtggctacaagttcttcgctgatctgctggattacattaaagccctgaatagaaactcggaccgctcaataccgatgaccgtggacttcatccgcctgaagtcgtactgtaacgatcagtcgactggggacataaaagtcatcggaggcgatgatctcagcaccctcacgggaaagaacgtgcttattgtggaggacatcatcgacactggaaaaactatgcaaaccctgttgtcactggtgaggcagtacaatccgaagatggtcaaggtggcctccctgctcgtcaaaagaactccgcgcagcgtgggatacaaaccagatttcgtcggctttgaaatcccggacaaatttgtggtgggatacgcgctggactacaacgagtacttcagagacttgaaccacgtgtgtgtgatctccgagactggcaaggcaaagtataaagct

SEQ ID NO: 4063 - DNA, 654 bp, Artificial Sequence
  derived and/or modified sequence
atggcaacccgctcaccaggagtcgtgatttctgacgatgaacccgggtacgacttggaccttttttgtattcccaaccattacgccgaggacctggagcgggttttcatcccccacggtcttatcatggatagaacagaaaggctggccagggacgtgatgaaggaaatgggaggacaccacattgtggcgctctgtgtactcaagggcggctataaattcttcgccgatctgttagattatatcaaggccctgaaccggaactccgaccgatccattcctatgactgtcgattttatcagattaaaatcttactgcaatgaccagagtactggcgacataaaggtgattggaggagatgacctgtccactttaaccggcaaaaacgttctgattgttgaggacatcatcgataccgggaagactatgcagaccttgctgagccttgtcagacagtataatcccaagatggtaaaggtcgcttcccttctggtgaaacgcacgcccaggtctgtgggatacaagcctgatttcgtggggtttgagataccggacaaatttgtggtcggatatgcgctcgattacaacgagtattttagggacctgaaccatgtctgtgttatttccgagaccggcaaagcgaagtataaagcc

SEQ ID NO: 4064 - DNA, 654 bp, Artificial Sequence
  derived and/or modified sequence
atggcgaccaggagtccgggggtggtgatttccgatgatgagcctgggtacgaccttgacttgttctgtattccaaatcattatgcagaggacctcgagcgggtgtttatcccgcatggtctgataatggaccgcaccgagaggcttgctcgcgatgtcatgaaagaaatgggaggacaccacattgtggccctgtgtgttttaaaaggggggtataagttctttgcagacctattagattacataaaggccctcaacagaaatagcgacagaagcatccccatgactgttgactttatcaggttaaagagctattgtaatgatcaatctaccggcgacattaaagtcatcggcggggatgatctgagtacccttaccggtaaaaatgtgctcatcgtggaagatattattgacacgggaaaaacaatgcagaccttgctctccttagtccgtcagtacaatcccaagatggtaaaagtggcgtcgttgctcgtgaagaggaccccacggtccgtgggttacaaaccagactttgtgggttttgaaataccagacaaatttgtcgttggctacgctctggattacaatgaatattttagagacctgaaccacgtgtgcgtgatttcagaaacagggaaagccaaatacaaggcc

SEQ ID NO: 4065 - DNA, 654 bp, Artificial Sequence
  derived and/or modified sequence
atggctacgcgctctccgggggtggtcatcagcgacgacgaaccaggttacgatctggaccttttttgtatccctaaccattacgccgaggacctggagcgagtttttattcctcacggtctgattatggataggacagaaaggttggcacgtgatgttatgaaagaaatgggcggtcaccatattgtcgctctttgtgttcttaagggcggttataaattcttcgccgacttactggattatattaaagcgctgaataggaacagcgatcgctccattccaatgacagtggacttcatcaggcttaaatcctactgtaatgaccagtccaccggcgatatcaaggtgattggaggcgatgatctcagcaccttgactggcaaaaatgtgctgattgtcgaggatatcatcgataccggcaagacaatgcagacgttactctccttggtgcgccaatacaacccgaagatggtcaaggtggcatccctcttggtgaagcgcactccccgcagcgtcggctacaagccagatttcgtgggctttgaaattccggataaattcgtagtgggttacgcactggattataacgaatacttccgggacctgaaccacgtgtgcgtcatcagcgagaccggcaaggcgaagtataaggcg

SEQ ID NO: 4066 - DNA, 654 bp, Artificial Sequence
  derived and/or modified sequence
atggctacaaggtctcctggggtcgtgatctcagatgacgaacctggttacgacctggacctgttctgtataccgaatcattacgcagaagacctggagagggtgttcattcctcatggattaataatggatcgaacggagagactagcccgagatgtcatgaaggaaatggggggacatcacattgtggccctgtgtgttttgaagggcggttataagttcttcgccgacctcctcgattatatcaaagctcttaacaggaactccgaccggagcattcccatgactgtcgattttatccgtttaaagagctattgcaacgaccagagcaccggtgatatcaaggtgatcgggggtgatgacctgtctaccctgactggcaagaatgtgcttatcgtggaggatataattgacacagggaagactatgcagaccttactcagcctggttcgccagtacaatcccaaaatggtgaaggttgccagtctgctcgtgaaaagaacacctagatctgtcgggtataagccggacttcgtgggatttgagatcccggacaagttcgttgtcggttatgctctcgactataacgagtattttcgtgatctaaatcatgtttgtgttatctccgaaacaggaaaagcgaaatacaaagcc

SEQ ID NO: 4067 - DNA, 654 bp, Artificial Sequence
  derived and/or modified sequence
atggctacaaggtctccaggagtagtaattagtgatgatgaaccaggatatgatttagatttattctgtataccaaatcattatgctgaagatcttgaacgtgtatttattccacatggtttaattatggatagaacggagagacttgcaagagatgttatgaaagaaatgggtggacatcatattgttgctctttgtgtattaaaaggtggatacaaattctttgctgatttgcttgactatattaaagcattaaaccgtaattcagatagatctattccaatgactgttgatttcattagattaaaatcatactgtaatgatcaaagtacaggagatattaaagtaatcggaggagatgatttatctacattaactggaaagaatgttcttattgttgaagatattattgatactggaaaaacaatgcaaacattattgtctcttgtccgacaatataatccaaaaatggttaaagttgcttctttattagtaaaacgtacaccaagatcagttggatataagccagattttgttggatttgaaattccagataaatttgttgttggatatgcattagattataatgaatattttagagacttgaaccatgtttgtgttatttctgaaactggtaaggctaaatataaggca

SEQ ID NO: 4068 - DNA, 654 bp, Artificial Sequence
  derived and/or modified sequence
atggctactaggtcccccggagtcgtgatctccgatgatgaacccggatacgatctcgacctattctgcatccccaatcattatgccgaagacctcgagagagtgttcatccctcatggattaatcatggatcggacagaacggcttgcccgcgacgttatgaaggaaatgggagggcatcatatcgtggctctctgcgttctaaaaggggggtataaattttttgcagatctcctggattacatcaaggcacttaacagaaatagtgaccgaagtatccctatgacagtagatttcattcggttgaaatcttactgcaatgatcagtccactggagatatcaaagtgattgggggggatgatctgagtacactgactgggaaaaatgttctcatagtggaagacattatagatacaggaaaaacaatgcagactctcctatctctggtgcggcagtataatccaaaaatggtcaaagtcgcctcactgctggtcaaaaggactccccgctctgtcggatataaacccgatttcgttggattcgaaatacccgataaatttgtcgtgggatatgccctggattacaacgaatattttcgggatctcaaccacgtctgtgttatctctgagacaggaaaagccaaatataaagca

SEQ ID NO: 4069 - DNA, 654 bp, Artificial Sequence
  derived and/or modified sequence
atggccacgagatcaccgggagtggttatttcggatgacgagccagggtatgaccttgacttattttgcatcccgaatcactacgcggaagatttggaacgggttttcattccccatggtcttatcatggatagaaccgaacgtctggcgagggatgtgatgaaggaaatgggcggacaccatattgtagcactatgcgtactcaaaggtggttataaattcttcgctgatctcttagattatattaaagccttaaatcgtaactcggatagatctattccgatgacagtagattttattcgtctaaaatcctattgcaatgatcagtcaacaggagatatcaaagtaataggtggagacgaccttagtacactgacgggaaagaatgttcttatcgtagaggatatcattgatacaggcaagacaatgcaaacattattgtccttggttcgtcagtacaaccctaagatggtaaaagtcgcttctctgctggtcaaacgcacaccgcggtcggtaggttataaaccagactttgtcggatttgaaattcccgataaatttgtggttggctatgctttagattataatgaatattttcgagatttgaatcatgtctgtgttatttcagaaacagggaaagcaaaatataaagct

SEQ ID NO: 4070 - DNA, 654 bp, Artificial Sequence
  derived and/or modified sequence
atggccacgcgatcccctggagtggtgatctccgatgatgaaccaggttatgatcttgatctgttttgcatcccgaaccactatgcggaagatcttgaaagggtgttcatcccgcacggactgattatggacagaaccgaaagactggcgagagacgtcatgaaggagatgggaggacaccatatagtggcactgtgcgtgctgaaaggaggatacaagttcttcgcagatctgctggattacatcaaggcgctcaacaggaactcggaccggtccattcccatgactgtcgactttattcgcctgaagagttactgtaacgaccaatcaactggcgacattaaggtaatcggcggcgacgacctgtcaactttgaccggaaagaatgtgctgatcgtcgaggacattatcgacaccggcaagactatgcagaccctgctgagcctggtgcgccagtacaatccgaagatggtgaaggtcgcatccttgctggttaagagaaccccccgctcagtggggtacaaacctgacttcgtcggattcgagatcccagacaaattcgtcgtcggttacgccctcgactataacgagtattttcgcgatctcaaccacgtgtgcgtgatctcggagacgggaaaagcaaaatacaaggct

SEQ ID NO: 4071 - DNA, 654 bp, Artificial Sequence
  derived and/or modified sequence
atggccacgcgctcccccggtgtggtgatcagcgacgatgagcccggctatgatctggatctgttctgcattcccaaccactacgcggaggatttggagcgcgtgtttataccccatggtttaattatggaccggacggagcgtctggcccgagatgtaatgaaggagatgggaggccaccatatcgtggctttgtgtgttctaaagggaggctataagtttttcgccgatctcctcgattatatcaaagccctgaatcgcaacagtgatcgctcaattcccatgactgtggatttcattcgtctgaagtcatactgcaacgaccagagcacgggagacatcaaagttatcggaggcgatgatctatcgaccctgactggaaagaatgtcctaatagtggaagacattattgataccggcaagactatgcagacattgttgagtctggtccgccaatataaccccaagatggttaaggttgcctcgctgttggtgaagaggacgccgagaagcgttggatacaagccagacttcgtcggttttgagatacctgacaagtttgtcgtcggatacgcattggactataatgagtacttccgcgatctgaaccacgtatgcgttatttcagaaactggcaaggcaaagtacaaggcg

SEQ ID NO: 4072 - DNA, 654 bp, Artificial Sequence
  derived and/or modified sequence
atggctacgcgatctccgggtgtcgtcatttcggacgacgagccaggctacgacctagacttattctgcattccgaaccactatgctgaggatctggagcgcgttttcatcccgcacggactcattatggaccgtacagagcgcttagctagagacgtaatgaaggagatgggggggcatcacatcgtcgcactctgtgtgctgaagggaggctataaattcttcgccgacttgctcgattacattaaggcgctgaacaggaacagcgatcgctccatcccaatgactgtggatttcatccgccttaagtcctactgcaatgatcaatccacgggagacattaaagtcatcggaggcgacgacctctccaccctcacgggaaagaacgtgctaatcgtcgaggacataattgacaccggtaagacgatgcaaacgctgctaagccttgttcgtcagtataaccccaagatggtcaaggtggcgagtcttcttgtgaagcgtactccccgcagcgtgggatataagcccgatttcgttggtttcgagattcctgataagttcgtggtcggatacgcactcgattataacgaatatttccgtgatctgaatcacgtgtgcgtcatctctgagaccggcaaggccaagtacaaggcg

SEQ ID NO: 4073 - DNA, 654 bp, Artificial Sequence
  derived and/or modified sequence
atggccacgcgttcccccggagtcgttattagcgacgatgaacctggatacgatctcgatctgttttgtatacctaaccattacgcagaggacctcgaacgagtctttattccacacggtcttatcatggacagaactgaaagacttgcacgcgatgtcatgaaggagatgggtggacatcacatagtggcactgtgtgtgcttaagggtggttacaagttttttgcagatttgctggattacatcaaggcactgaatagaaattccgacagatccatcccgatgaccgtcgatttcatccgactgaaatcgtactgtaacgatcagtcgaccggggatatcaaagtgatcggaggggacgatctctcgacccttactggaaagaatgtcctgatagtggaggacataatcgataccggcaaaactatgcaaacgcttttgtcactggtgagacaatacaatcctaagatggtgaaagtggccagccttctggtcaaacgcacgccccgtagcgtcggatacaagcccgatttcgtcggtttcgagatccctgacaaatttgtggtgggatacgcactcgattacaacgagtacttccgtgatctcaaccatgtgtgtgtgatcagcgaaactggtaaggcaaagtacaaggcg

SEQ ID NO: 4074 - DNA, 654 bp, Artificial Sequence
  derived and/or modified sequence
atggcaactagatcgcctggagtcgtcatctcggatgatgaacccggatacgaccttgatcttttttgcattcctaatcattacgcagaagatcttgaacgtgtctttattccccacggcctcattatggaccgcaccgagcgactcgcacgggacgttatgaaggagatggggggccatcacatcgtggccctgtgtgtcctgaagggtggttacaagtttttcgcagatctgctggattacattaaagcactcaatcgaaacagcgataggtcgatcccaatgactgtggactttatacgtcttaagtcgtactgtaacgaccaatcaacgggagatatcaaagtaattggtggagacgacctctccactctcaccggtaagaacgtgctcatcgtggaggacatcatagatacgggtaagactatgcaaacgcttctctcgttggtgagacaatacaatcccaagatggtgaaggtggcgtccctgcttgtcaagaggaccccgcgtagcgtgggatacaaaccagattttgtgggattcgagatccctgataagtttgtggtgggttacgctcttgactacaatgaatacttccgcgatctgaatcatgtgtgcgtcattagcgagactgggaaggcaaagtacaaagcg

SEQ ID NO: 4075 - DNA, 654 bp, Artificial Sequence
  derived and/or modified sequence
atggcgacaaggagtccaggcgttgtaatctctgatgacgagccaggctacgacctggaccttttctgtatcccaaatcattatgccgaggatttggaacgcgtctttattccccacgggctgataatggataggactgagcgactggcgcgagacgttatgaaggagatgggcggccatcacatcgttgcactgtgcgttcttaaaggaggctacaaattttttgccgacctgctggactatattaaggcactgaacaggaattcagacagatctattccgatgaccgtcgacttcatccggctgaagagttattgcaacgatcagtcaaccggtgacattaaagttattggtggagacgacctgtccacgttgaccggaaaaaacgtcctgatcgtggaagatattattgatacaggcaaaacaatgcaaacccttctgtcactcgtgcggcagtataatccaaagatggtgaaagtggcctccctgctggtgaaaagaactccccgcagtgtcgggtacaaacccgattttgttggcttcgagatcccggacaaattcgttgttggctatgccctcgactacaacgagtatttcagggacctcaaccatgtgtgcgttattagtgagacgggcaaagccaaatataaggca

SEQ ID NO: 4076 - DNA, 654 bp, Artificial Sequence
  derived and/or modified sequence
atggccactagatcgccaggcgtggtgatctcggatgatgaaccagggtacgacctggatcttttttgtatcccaaatcattatgcagaagatctcgaaagagtgtttattcctcatggcctgattatggatagaactgagagactggctcgggatgtgatgaaagagatggggggacatcatattgtggcgctgtgcgtgctgaaggggggctacaaattctttgcagatcttcttgactacataaaggcacttaaccgcaactcagatagatcgattcctatgaccgtggatttcatacgattgaagtcgtactgtaacgaccagtccaccggagacattaaggtcataggaggcgatgatctttccactcttactggaaagaatgtgctcatagtggaggacattattgataccggtaagactatgcaaacccttctctcactggtgcggcagtacaaccccaaaatggtgaaggtcgcatccctcctggtcaagaggactcctcgctccgtgggctacaaaccagactttgtggggtttgagattccggacaagtttgtggtgggatacgccctggactacaatgaatacttcagagacttgaaccacgtgtgcgtgatctcagaaaccggtaaagcaaagtataaggca

SEQ ID NO: 4077 - DNA, 654 bp, Artificial Sequence
  derived and/or modified sequence
atggccactcgctctccaggtgttgtgatcagcgatgatgaacctggttatgacctggatctgttttgtattcccaaccactacgcagaagacctggagagagtcttcatcccccatgggctcattatggatcgcaccgagagacttgctcgggacgtgatgaaggaaatggggggccaccacattgtcgctctctgcgttctaaaagggggctacaaattctttgcagatctgctcgattatattaaggctttgaatcgcaactcagatcgtagcatcccaatgactgtagacttcatccgcctaaagtcatattgcaatgaccaatcgaccggtgacataaaagtaatcggaggggacgacctcagcactctgacaggaaagaatgtgttgatcgtggaggacatcatcgacacagggaaaacaatgcagaccctcctgagcttggtacgccagtataacccaaaaatggtgaaggtagcctctcttctggtcaaacgcacacctcggagtgtgggctataaacccgattttgtgggattcgagatccccgacaaattcgtagtcggatacgccctcgactataacgaatattttcgggacttgaaccatgtgtgcgtcatttccgaaaccggaaaagccaagtacaaggct

SEQ ID NO: 4078 - DNA, 654 bp, Artificial Sequence
  derived and/or modified sequence
atggccaccaggagtccgggcgtggtaattagcgacgatgagcctggttatgacttagacctcttttgcatccccaatcactatgccgaggaccttgagcgggtgttcatcccccacggcctgattatggatagaaccgagagattagcgagggatgtgatgaaggagatgggaggccaccacattgttgcgctgtgtgtgctgaaaggtgggtacaagtttttcgcagacctgctggactacatcaaagcactcaatcgaaactcagatcgctctattccaatgacagtggatttcatccgcctgaagagttattgtaacgaccaaagtacaggggacatcaaagtcatcggcggagacgatctatcgactctgaccgggaaaaacgtgctgatcgttgaggacattattgacactggcaagactatgcagactctgctgtcgttagtccggcagtacaatccaaagatggtcaaggttgccagcctgctcgtgaaaagaactccccggagcgttgggtataaacctgattttgtgggcttcgaaattccggacaagtttgtcgttggttacgctcttgattacaatgagtactttcgggacctaaatcacgtgtgtgtgatcagtgaaaccggaaaggccaagtacaaagca

SEQ ID NO: 4079 - DNA, 654 bp, Artificial Sequence
  derived and/or modified sequence
atggccactcgttcacccggggtagtgatctctgatgacgagcctgggtacgatctagatctattttgcattccaaaccactacgcggaagacctcgaacgagttttcattccacacggactgatcatggaccggaccgagaggttggccagagatgtcatgaaggagatgggtggccaccacattgttgccttgtgcgttctaaagggaggatataaattcttcgctgacttgcttgattacatcaaggctctcaaccggaactcagaccgatctatccccatgaccgtcgattttattagacttaagtcttactgtaatgaccagtccaccggggatatcaaggtaattggcggtgatgatttgagcaccctgacagggaaaaacgtcttgatcgtggaggacattatcgatacaggtaaaacaatgcagacactgctttctctcgttcgacaatataacccaaaaatggtgaaggtggcctccctactggtaaaaaggacaccgagatccgtcgggtacaagccagactttgtaggctttgagatcccagataaattcgtggtgggctacgcgttggactacaacgaatactttagggatctgaaccatgtctgcgtgattagcgaaacagggaaagcaaaatacaaggct

SEQ ID NO: 4080 - DNA, 654 bp, Artificial Sequence
  derived and/or modified sequence
atggccacccgatcccctggggtggttattagtgacgacgagcctggttacgatttggacctgttctgcatcccaaaccactatgcagaagatctcgagagggttttcataccgcacggcctcattatggacagaacagaacgattagcccgggacgtcatgaaggagatgggaggccatcatatcgtggctctgtgcgtgctgaaagggggttacaagttttttgcagacctgcttgactatatcaaggcactcaaccgcaatagcgacaggagtatcccaatgaccgtggatttcatacgcctcaaaagctactgtaatgaccagagcaccggcgacatcaaagtgatcggcggagacgatctgagcacgctaaccggaaagaacgtcctgatcgtagaggacataattgacacagggaagacgatgcagacccttctgagccttgtacgacagtataatccaaaaatggtcaaggtggctagcctattagtgaagcgcaccccgcgttcggtcgggtacaagcccgattttgtaggattcgaaatacctgataaatttgtggtaggttatgccttggactacaacgagtactttcgggatttgaaccatgtttgcgtaattagtgagaccggtaaagcaaaatataaggcc

SEQ ID NO: 4081 - DNA, 654 bp, Artificial Sequence
  derived and/or modified sequence
atggccactcggtctcctggggtggtgatctcagacgacgagccaggatacgacctagacctgttttgtatacctaatcattacgccgaggacttggaacgagtgtttattccgcacggtcttattatggataggacggaacgactggcgcgcgatgttatgaaagagatgggagggcatcacatcgttgcgttgtgtgtgctcaagggcggatacaagtttttcgctgaccttctggattatatcaaggcgctgaataggaactccgacaggtctatccctatgactgttgattttatcagacttaagagctactgcaatgaccagagcacgggggatattaaagttatcgggggagatgacctgtctacactaactggcaagaatgttctaatcgtagaagacataattgacacagggaagacaatgcagacactgctcagtttggtgcgacagtacaatcctaagatggtgaaggttgcatctctcctagtgaagcgcacccctcgttccgtgggttacaaacccgacttcgttggatttgaaatacccgataagtttgtggttggttacgccctggattacaacgaatattttagggatctgaaccacgtctgtgtcatctccgaaactggaaaggccaaatataaagct

SEQ ID NO: 4082 - DNA, 654 bp, Artificial Sequence
  derived and/or modified sequence
atggccactaggagccctggggttgtcatttcggatgatgaacccggatacgaccttgacctgttttgcatcccgaaccattacgccgaggatctggaaagagtattcataccacatggattgatcatggatcggaccgagcggttggcacgggatgtaatgaaggagatggggggacatcacatcgtggctctctgcgtgctaaaaggcggctacaaattctttgcagacttactggactacataaaggctctgaacagaaacagtgatagatctatacccatgacggtggacttcatcagactcaagagttactgcaatgatcagagcacaggcgatattaaagtcattggcggtgacgatttatcaaccctcaccggcaagaatgtacttatagttgaagacatcatagacacgggcaagactatgcagaccctgctgtctctcgtgaggcagtataaccctaaaatggtcaaagtggcctcccttctcgttaagcgaacccctagatctgtcggttataagccagacttcgttggattcgaaattccagacaagttcgtagtcggctatgcactggactacaacgagtattttagggacctgaaccatgtatgcgtgatttccgaaactggaaaagcgaagtataaggct

SEQ ID NO: 4083 - DNA, 654 bp, Artificial Sequence
  derived and/or modified sequence
atggccaccaggagccctggtgtggtcatttccgatgatgaacccggctatgacttggacctgttctgcatccctaaccattatgccgaggacctggagcgtgtgttcattccccacggcctgataatggacagaaccgagaggctggcacgcgacgtgatgaaggaaatgggcggacaccacatagtggccttgtgcgtgctgaagggcggctataaattttttgcagacctgctggattacatcaaggcactgaacaggaactctgatagatccattcctatgaccgttgactttattcgactcaagtcctattgcaatgaccaaagcactggcgatatcaaggtgatagggggagatgatctttctactcttactggcaaaaacgtgctaatcgtggaagacataattgacactggcaagactatgcagaccctgctgagcctcgtgcgacaatataatcccaagatggtaaaagtagccagcctgcttgtcaagagaactcctcgatctgttggctacaagcccgatttcgtagggttcgaaattccagacaagttcgtggtgggttatgctctcgattacaatgaatatttcagggaccttaaccatgtatgcgtgataagcgagaccggaaaggcgaagtataaggct

SEQ ID NO: 4084 - DNA, 654 bp, Artificial Sequence
  derived and/or modified sequence
atggcaaccagatcgccgggagtagtgatcagcgacgacgaaccgggatatgaccttgacctgttctgcatcccaaatcattacgcagaggacctggaaagggtgttcatccctcacgggctcatcatggaccgcactgagcggttggcacgggacgtgatgaaagagatgggaggccaccacatcgtggccctctgcgtgctcaaagggggctacaagttcttcgccgacctgcttgactacattaaggcgctgaatcggaactccgaccgctcgatccctatgaccgtcgactttattcgcctcaagagttactgcaacgatcagtccacgggcgacatcaaggtgatcggaggtgatgatctgagcactctcacggggaagaatgtgctgattgtagaagatatcatcgacactggaaagactatgcaaacccttctctcgcttgtccgacagtacaacccaaagatggtgaaggtggcctcgctcttggtcaaacggaccccaagatcagtgggatacaagccggactttgtcggatttgaaatcccggacaagttcgtggtgggctatgctttggattacaacgagtacttccgcgatctgaaccatgtgtgtgtcatttctgaaactggaaaggccaagtacaaagcg

SEQ ID NO: 4085 - DNA, 654 bp, Artificial Sequence
  derived and/or modified sequence
atggctaccagatcaccgggagtcgtgattagcgatgacgagcctggttacgatctcgacctgttttgcatcccgaaccactacgctgaggatctcgaacgggtgttcatcccccacgggttgatcatggatcgcaccgaacggcttgctagagacgtcatgaaggagatgggcggccatcatatcgtggccctctgcgtcctcaagggaggatacaagtttttcgcagacctcctggactatatcaaagccctgaaccgaaactccgaccgcagcatcccgatgaccgtcgatttcatccgcctcaagtcctactgcaacgatcaatcgactggtgacatcaaggtgattggaggcgatgatctctcgaccctgaccggaaaaaacgtgctgattgtggaagatatcatcgatactggaaagaccatgcagactctgctgagcctggtacggcagtacaacccaaagatggtgaaggtcgcgtcattgctggtcaaaagaacgcctagatcggtgggatacaagccggacttcgttggatttgagatcccggacaagttcgtggtgggatacgcgctggactataatgagtatttccgagacttgaaccacgtgtgtgtgatctccgagactggtaaggctaagtacaaggcc

SEQ ID NO: 4086 - DNA, 654 bp, Artificial Sequence
  derived and/or modified sequence
atggcaacgcggagccccggtgtggtcatttctgacgacgagccaggttacgatctggaccttttctgcatccccaatcactacgctgaagatttagaaagggtgtttatcccgcacggtctgatcatggaccgtacggagcgcctcgcgcgagacgtgatgaaggaaatgggggggcaccatatcgttgccctctgcgttctgaagggaggatataagttttttgctgacctgcttgactacatcaaagcgcttaatcgaaactcggaccgctccattccaatgacagtggacttcataagacttaaatcgtactgtaatgaccaatccacaggagatattaaggttattggaggagacgatctgtcaacactaacagggaagaacgtcctgatagtggaggatataatagataccggcaagacgatgcagactcttctctccctcgtgcgacagtacaaccccaagatggtcaaggtggctagcctgctcgtgaagcggactcctcggtcagtcggttacaagccagatttcgtcggttttgagataccggataagttcgtggtgggatacgctctagattacaacgagtactttcgggacctaaaccatgtgtgtgtgatctccgagactgggaaggccaagtataaggca

SEQ ID NO: 4087 - DNA, 654 bp, Artificial Sequence
  derived and/or modified sequence
atggccaccagatcccctggcgtggtaatttccgacgatgaacctggatatgatctcgatctcttttgtataccaaaccattacgcagaagatctcgagagagtgttcattccccacggcctgattatggaccgaaccgagagactcgcccgtgatgtaatgaaggaaatgggtggacatcatatcgtggcgctttgcgtactgaaaggagggtacaaattctttgcagacctgctggattacatcaaagcattgaaccgcaactcagaccggtcgattcctatgactgtggactttatcaggcttaaatcgtactgtaatgatcagagcaccggtgacataaaggtcataggtggagatgatctctcgactctgaccgggaagaatgtgcttattgtcgaggacatcatcgacactggaaagacgatgcaaactcttctctctcttgttcgccaatacaacccaaaaatggtgaaggttgcatcgcttcttgtgaagagaaccccacggagcgtcggatacaagcctgatttcgttggctttgaaattcccgataagtttgtggtgggttacgcattggactataatgaatactttagggatctgaaccacgtgtgcgtcataagtgaaactggcaaggccaagtacaaggcg

SEQ ID NO: 4088 - DNA, 654 bp, Artificial Sequence
  derived and/or modified sequence
atggcaactcgctctcctggagtggtgatctcggacgatgaacccggctacgatctcgatttgttctgcatcccaaaccattacgcagaagatctggagcgggtgtttatcccacacggactgatcatggatcgcactgaacgcctcgcccgcgacgtcatgaaggagatgggaggccatcacattgtggctctctgtgtcctcaagggaggctacaaattctttgcggatctgctggactacattaaagctctgaatagaaattccgaccgatccattccgatgaccgtggacttcatcagactcaagagctactgcaacgaccagtcaaccggtgatatcaaggtgatcgggggtgacgacctgtccactttgaccgggaagaacgtcttgatcgtggaggacatcatagatacgggcaagactatgcaaaccctgctgtcgcttgtcaggcagtacaatcctaagatggtgaaagtcgcctcactgctggtgaaaaggaccccgcggtcggtaggatacaaaccggacttcgtgggatttgagatcccggacaagttcgtcgttgggtacgcccttgactataacgaatacttccgggacctcaaccacgtgtgcgtgatcagcgaaactggaaaggcgaagtacaaggcc

SEQ ID NO: 4089 - DNA, 654 bp, Artificial Sequence
  derived and/or modified sequence
atggccactaggtcacccggggttgtgatcagcgacgatgaaccggggtatgatcttgacttgttctgtatccctaatcactacgctgaggatctcgagcgcgtgttcattccgcacggccttatcatggatagaacggaaagactcgcccgggatgtcatgaaggagatgggcgggcaccatatcgtggccctgtgcgtccttaagggcggatacaagttctttgctgacttgttggactacatcaaggccctgaatcgcaactccgacagatcgattccaatgactgttgacttcatacgcctgaaaagctactgcaatgaccagtccaccggcgacatcaaagtgatcggaggggacgacctgtcgacgctgaccggaaaaaacgtactgatcgtcgaggacatcattgataccggcaagaccatgcaaaccctcctgtccttggtgcgtcagtacaaccctaagatggtcaaggtcgcgagcctcctcgtgaagcggactccgcgctcagttggatataagccagattttgtcggcttcgaaatcccggataagtttgtggtgggatacgcgctggattacaacgaatacttccgggacctcaaccatgtgtgcgttatatcggaaactggaaaggcaaaatacaaagca

SEQ ID NO: 4090 - DNA, 654 bp, Artificial Sequence
  derived and/or modified sequence
atggccacccggagtcccggggtcgtgattagtgatgatgagccaggatatgacctcgatctcttttgtattccgaatcattatgctgaggatttggagagagtgttcatccctcatggacttattatggacagaacagagagattggccagggacgtaatgaaggagatgggcggtcaccacatcgtggctctgtgtgtgctgaaaggcggatacaagttctttgccgatctgttagactatatcaaggcacttaaccggaactccgaccggtccatccctatgaccgtggatttcatcaggcttaagtcttactgcaacgatcagagcacgggggacattaaggtcatcggaggggatgacttatcaaccctgacagggaaaaatgtcctgatcgttgaggatattatagacactggcaagactatgcaaaccctgctgtccctggtgcgccaatacaatccgaagatggtgaaggttgcctctctgctggtgaagcgtacaccaaggtccgtgggttacaagcccgatttcgttgggttcgagatacctgacaaattcgtggttggctacgctctggactacaatgagtatttccgagatttgaatcatgtatgtgtgatatctgagacaggcaaggccaaatataaggca

SEQ ID NO: 4091 - DNA, 654 bp, Artificial Sequence
  derived and/or modified sequence
atggccactcggtcacctggagtcgtgatttcagacgatgagccaggatacgacctggacctgttctgcatacccaatcactacgcagaggacctggaacgcgtctttatcccgcatggacttatcatggacagaactgagcgtctggctcgtgatgtcatgaaggaaatgggtggtcatcacattgtggcactgtgtgtgttgaaaggggggtacaagtttttcgccgatttgctcgattacataaaggcacttaatagaaatagcgatcgctccatccctatgactgtcgacttcatcagactgaagtcctattgtaacgatcagtcgactggcgacatcaaggtcattggaggagatgacttgtccacgctgaccgggaagaacgtgcttatagtggaggacattattgataccggaaagactatgcaaacgctgctgtcccttgtgcggcaatacaaccccaagatggtgaaggtggcatcgctcctcgtcaaacgaactccgcgcagcgtgggctataaaccagattttgttggatttgaaatacccgacaaattcgtcgtcggctacgcactcgactataacgaatacttccgagatcttaaccacgtgtgcgtgatttcggaaaccggaaaggcaaagtacaaagcg

SEQ ID NO: 4092 - DNA, 654 bp, Artificial Sequence
  derived and/or modified sequence
atggctacacgcagcccaggggtggtgatctcagatgatgagccggggtacgacctggacttattttgcattccaaaccactacgccgaggacctagaaagagtcttcataccacatggcctgattatggaccggacggaaaggctggctagggacgtcatgaaagaaatgggagggcaccatatcgtcgctttgtgcgtgctgaaagggggatataagtttttcgccgacctgcttgattatatcaaagctttaaacagaaattccgatagatctattcctatgaccgtggatttcatccgcctgaaaagttattgcaacgatcaatccaccggagacataaaggtcatcgggggggacgacctctcaacattgacaggaaagaacgtcctgatcgttgaagatatcatagacacgggaaagaccatgcagactctactctcacttgtaagacagtataatccaaagatggtaaaggttgcaagtcttttggtgaaaagaacccccaggtcagttggctacaaacctgactttgtaggctttgagatccctgataaattcgtggtcggatacgctctcgactacaacgagtacttcagggatctcaatcacgtgtgcgtgattagtgaaacggggaaagctaaatacaaggca

SEQ ID NO: 4093 - DNA, 654 bp, Artificial Sequence
  derived and/or modified sequence
atggctactaggtccccaggtgtcgtaataagtgacgacgaacctgggtatgatctggatctgttctgcattcctaaccattacgctgaggacctcgagagggtctttatcccgcatggcctgattatggacagaactgagcgtctggcccgcgatgtgatgaaagaaatggggggccatcatattgtggccctctgtgtcctaaaaggcggctataagtttttcgccgaccttttagattatatcaaggccctcaaccggaactctgacaggtccatccctatgaccgtggactttatcaggctgaaaagttattgtaatgatcagagtactggcgacatcaaagtgataggaggcgatgatctgtcgacactcaccggcaagaacgtgctgatcgtcgaagacatcatcgatacagggaagactatgcagaccctcctttccctggttcgccagtacaaccccaagatggtcaaggtcgcctcactgctcgtaaaacgcacacccaggtcagtgggctacaagcctgacttcgtgggattcgaaatccctgacaagtttgtggtcgggtatgccctcgactacaatgaatatttccgagaccttaaccacgtgtgtgttatttcagaaactgggaaagccaagtataaggca

SEQ ID NO: 4094 - DNA, 654 bp, Artificial Sequence
  derived and/or modified sequence
atggctactcgctcccctggagttgttatcagcgacgatgagcccggatacgacctggacctgttttgtataccgaatcactatgccgaggatttggaacgggttttcatacctcacgggctgatcatggatagaaccgaaagactggcaagagatgtaatgaaggaaatggggggacaccacattgtggcactgtgcgtactgaagggtgggtacaagttcttcgccgatttgctggattacattaaagcgctcaaccgcaacagcgataggagcataccaatgacagtcgatttcattaggcttaagagttattgtaatgaccagtccaccggggacatcaaagtcattggaggagatgatctctctacactgacagggaaaaacgtgctgatcgtcgaggacataatcgataccggtaagacaatgcaaacattgctctctctggttagacagtacaatcctaaaatggtaaaagtggcttcactccttgtgaagcggactccccgctctgtcggctataagcctgatttcgttggcttcgaaatcccagataaatttgtagtggggtacgccctcgactataacgaatatttccgtgatttgaatcacgtttgtgtcatttccgaaaccggaaaggctaagtataaggcc

SEQ ID NO: 4095 - DNA, 654 bp, Artificial Sequence
  derived and/or modified sequence
atggccacccgcagccccggggtggtgattagcgacgacgagccaggatacgacctggacctgttctgtatccccaatcactacgctgaagatctcgagcgggtgttcataccacatggcctcatcatggaccggactgaaagattggcgcgcgatgtgatgaaggagatgggcggccatcacattgtcgccctctgtgtccttaaagggggttacaagttctttgctgatctccttgactatattaaagcgctgaataggaatagcgacaggtcgatcccaatgaccgtggactttatccgtctcaaatcctattgcaacgaccagagcaccggagacatcaaggtaataggaggcgacgacctgtctacgcttactggaaagaatgtcctgattgtcgaagatatcattgacaccggaaaaaccatgcagactttactctcactcgtccggcaatacaaccccaagatggtcaaggtcgcatctctgctcgtgaagagaacaccacgttcggtgggttacaagcccgacttcgtgggctttgaaattccggacaaatttgttgtggggtacgccctggattataatgaatatttcagggatctgaatcatgtctgtgtcatttccgagaccggcaaagcgaagtataaagcc

SEQ ID NO: 4096 - DNA, 654 bp, Artificial Sequence
  derived and/or modified sequence
atggcgacaagatctcccggggtggtgatttccgatgatgagcccggctatgaccttgatctcttttgcattcctaatcactatgcagaggacctggagcgagtctttattcctcacggcctgatcatggaccgaacagagagattggccagagatgtaatgaaagaaatgggaggccaccacatcgtggccttatgtgttcttaagggcggctacaaatttttcgctgaccttcttgactacatcaaggctcttaacagaaactccgacagaagcatccctatgactgttgatttcattcgactgaagtcgtactgcaacgaccagagtacaggtgacattaaggtgattggtggtgacgacctgtccaccctgacagggaaaaacgtgctgattgttgaagacattatcgacacggggaaaactatgcagaccctgctgtcactcgtgcgccagtataatccgaaaatggtgaaggtcgcaagcctgcttgttaagagaacgccgcgaagtgtgggctacaagccagatttcgtgggtttcgaaattccggacaaatttgtggttggctacgccttggactacaatgagtatttcagggacctgaatcacgtgtgtgtaattagcgagacggggaaggcgaaatacaaagca

SEQ ID NO: 4097 - DNA, 654 bp, Artificial Sequence
  derived and/or modified sequence
atggcgactcgctcccctggcgtggtcatctcggacgatgagccgggatacgacctggacctgttttgcatcccgaatcattacgcagaggatctcgaaagggtgttcatcccgcacggcctcattatggatcgcaccgaaagactggcccgggacgtgatgaaagaaatgggcggccatcacatcgtggcactgtgcgtgctgaagggaggatacaagttcttcgctgacctcctcgattacatcaaggcactgaacagaaactcggacagatcgatcccgatgaccgttgacttcatccggctgaagtcctattgcaacgatcagtcgactggagatatcaaggtgattggcggcgacgatctgtccactcttactggcaagaacgtgttgatcgtcgaggatatcatcgacactggcaaaaccatgcagactttgctctcgctggtccgccagtacaatcctaagatggtgaaagtcgcctctctgctggtgaaaagaacccctcggtcagtgggctacaaaccggattttgtgggattcgaaattcccgacaaatttgtggtcggatacgcccttgactataatgaatactttcgcgacctgaaccatgtgtgcgtgattagcgaaaccggaaaagctaagtacaaggca

SEQ ID NO: 4098 - DNA, 654 bp, Artificial Sequence
  derived and/or modified sequence
atggcgacgcgtagtccaggcgttgtaatatccgacgacgaacctggatacgatctcgatttattttgcatcccaaatcattacgctgaggatctggaaagagtattcattcctcacggacttatcatggaccgcactgagagactggcccgagacgttatgaaggaaatgggcggccaccacatcgtggcactgtgtgttctcaaggggggctataaatttttcgcagacctacttgattatattaaagcactgaatagaaactccgacaggagcatccccatgacagtggatttcattcgactgaaatcatattgtaacgaccagtccactggagacatcaaggttattggcggcgatgatctgtcaactctgaccggaaaaaacgtgttgattgtggaggacatcattgacaccggcaagaccatgcaaaccctactgtccctggtacgccaatacaaccccaaaatggtcaaagtcgcgtccctgctggtgaaacgcacaccacggagcgtcggatacaagcctgatttcgttggatttgaaatccctgacaagttcgtcgtgggctatgctctggattacaacgaatatttcagagacctgaaccatgtgtgcgtcataagcgagaccggcaaagccaagtacaaagcc

SEQ ID NO: 4099 - DNA, 654 bp, Artificial Sequence
  derived and/or modified sequence
atggcaactcggagtcctggcgtggtcatatcggacgacgagcccggatacgatcttgaccttttttgtattccgaatcattacgcagaggatctggaaagagtattcattcctcacgggctcataatggataggaccgaacgtctggccagagatgtgatgaaagagatgggcggacatcatattgtggccctttgtgtgctgaagggtggttataagttctttgcagatctcctggattacattaaagccctgaacagaaacagcgatcgatcaattcctatgaccgtcgacttcatcaggctgaagtcctattgcaatgatcaatccacgggcgatatcaaggtgatcggtggagatgacttgtcaaccctgaccggaaagaatgtgctcattgtggaggacattattgacactggtaagactatgcagacccttctctcgcttgtgcggcaatacaacccaaagatggtaaaagtcgcgtcgttgctcgtgaagcggacgcctcgcagcgttggctacaagccggattttgtcggattcgaaatcccagacaagtttgtcgtcggatacgcactggattacaacgaatactttcgagatttgaaccacgtgtgcgtgatttccgaaactggcaaggccaagtacaaagca

SEQ ID NO: 4100 - DNA, 654 bp, Artificial Sequence
  derived and/or modified sequence
atggccacccgcagccccggcgtggtgatcagcgacgacgagcccggctacgacctggacctgttctgcatccccaaccactacgccgaggacctggagcgcgtgttcatcccccacggcctgatcatggaccgcaccgagcgcctggcccgcgacgtgatgaaggagatgggcggccaccacatcgtggccctgtgcgtgctgaagggcggctacaagttcttcgccgacctgctggactacatcaaggccctgaaccgcaacagcgaccgcagcatccccatgaccgtggacttcatccgcctgaagagctactgcaacgaccagagcaccggcgacatcaaggtgatcggcggcgacgacctgagcaccctgaccggcaagaacgtgctgatcgtggaggacatcatcgacaccggcaagaccatgcagaccctgctgagcctggtgcgccagtacaaccccaagatggtgaaggtggccagcctgctggtgaagcgcaccccccgcagcgtgggctacaagcccgacttcgtgggcttcgagatccccgacaagttcgtggtgggctacgccctggactacaacgagtacttccgcgacctgaaccacgtgtgcgtgatcagcgagaccggcaaggccaagtacaaggcc

SEQ ID NO: 4101 - DNA, 800 bp, Artificial Sequence
  derived and/or modified sequence
gggaaataagagagaaaagaagagtaagaagaaatataagagccaccatggcaacacggtcaccaggcgtggtcatcagcgacgacgagcccggttatgatcttgatcttttctgtatccccaatcactatgcggaagatttggagagagtgtttatccctcacggattgatcatggatagaaccgaaagacttgctcgcgatgtcatgaaggaaatgggtggacatcacatcgtggcgctctgcgtactcaagggcgggtataagttctttgcagacttgcttgattacatcaaagccctgaaccgcaactcggataggtccattccgatgactgtagactttatccgcctcaagtcgtactgtaacgaccaaagcacaggggacattaaagtcatcgggggtgacgacctgtcaacgctgactggaaagaatgtactcatcgtggaggacatcattgatacgggaaagacgatgcagaccctgctctcattggtccggcagtacaatcctaaaatggtgaaagtagcctccctgcttgtcaagaggacgccgcgatcggtggggtacaaacccgattttgtcgggttcgagattcccgacaagttcgtagtgggatatgcgctcgactacaatgagtatttccgagatttgaaccatgtgtgcgtcatttcggaaacaggaaaagccaagtacaaagcgtaatgagctgccttctgcggggcttgccttctggccatgcccttcttctctcccttgcacctgtacctcttggtctttgaataaagcctgagtaggaag

SEQ ID NO: 4102 - DNA, 657 bp, Artificial Sequence
  derived and/or modified sequence
atggccaccagaagccccggcgtggtgatcagcgacgacgagcccggctacgacctggacctgttctgcatccccaaccactacgccgaggacctggagagagtgttcatcccccacggcctgatcatggacagaaccgagagactggccagagacgtgatgaaggagatgggcggccaccacatcgtggccctgtgcgtgctgaagggcggctacaagttcttcgccgacctgctggactacatcaaggccctgaacagaaacagcgacagaagcatccccatgaccgtggacttcatcagactgaagagctactgcaacgaccagagcaccggcgacatcaaggtgatcggcggcgacgacctgagcaccctgaccggcaagaacgtgctgatcgtggaggacatcatcgacaccggcaagaccatgcagaccctgctgagcctggtgagacagtacaaccccaagatggtgaaggtggccagcctgctggtgaagagaacccccagaagcgtgggctacaagcccgacttcgtgggcttcgagatccccgacaagttcgtggtgggctacgccctggactacaacgagtacttcagagacctgaaccacgtgtgcgtgatcagcgagaccggcaaggccaagtacaaggcctag

SEQ ID NO: 4103 - DNA, 657 bp, Artificial Sequence
  derived and/or modified sequence
atggccaccagaagccccggcgtggtgatcagcgacgacgagcccggctacgacctggacctgttctgcatccccaaccactacgccgaggacctggagagagtgttcatcccccacggcctgatcatggacagaaccgagagactggccagagacgtgatgaaggagatgggcggccaccacatcgtggccctgtgcgtgctgaagggcggctacaagttcttcgccgacctgctggactacatcaaggccctgaacagaaacagcgacagaagcatccccatgaccgtggacttcatcagactgaagagctactgcaacgaccagagcaccggcgacatcaaggtgatcggcggcgacgacctgagcaccctgaccggcaagagcagactgctggccgaggacatcatcgacaccggcaagaccatgcagaccctgctgagcctggtgagacagtacaaccccaagatggtgaaggtggccagcctgctggtgaagagaacccccagaagcgtgggctacaagcccgacttcgtgggcttcgagatccccgacaagttcgtggtgggctacgccctggactacaacgagtacttcagagacctgaaccacgtgtgcgtgatcagcgagaccggcaaggccaagtacaaggcctag

SEQ ID NO: 4104 - DNA, 657 bp, Artificial Sequence
  derived and/or modified sequence
atggccaccaggtctcccggcgtcgtcatcagcgatgatgaacccgggtatgatcttgacctgttttgtattccgaaccactacgcagaggatctagagagagtcttcatccctcacgggcttattatggacagaaccgaacggctcgcgagagacgttatgaaggagatgggaggtcatcacatagtggccctgtgcgtattgaagggcggctataaattttttgccgaccttctcgactatatcaaggcactaaacagaaacagcgacagatcaatcccaatgaccgtcgacttcatccgcctgaagtcatattgtaacgatcagagcactggagatatcaaggtgattgggggcgatgatctttctaccttgaccggcaagaatgtcttaatcgtcgaggacatcatcgataccgggaagactatgcagaccctactcagcctcgtgcggcaatacaaccctaagatggtgaaggttgcctcactgttagtgaagcggacacccagatcggtcggatacaaaccagatttcgtcggatttgaaattcccgataagtttgtcgttggctatgcacttgattataacgagtatttcagggatctgaaccatgtgtgcgtaattagtgagactggtaaggccaagtataaggcatag

SEQ ID NO: 4105 - DNA, 657 bp, Artificial Sequence
  derived and/or modified sequence
atggcgacgcgatcgcctggtgtggttatttccgatgatgagccagggtatgacctggatttattctgcattcccaaccattacgctgaagacctcgagcgcgtctttattcctcacggtctcataatggataggaccgaacggctcgcccgggacgtgatgaaggagatgggcgggcaccacattgtagctctatgtgtgttaaaggggggttacaaatttttcgctgacctcttagattatataaaagccctgaacaggaacagcgatcgaagtatccctatgacagtagacttcatccggctcaagtcttattgcaatgaccagtcaacaggtgacattaaggtgatcggcggagacgacctctcaactctgacaggcaaatctcgcctcctcgctgaagacataatcgatacgggtaagactatgcaaaccttgctctctcttgtgcgacaatacaatcctaagatggtcaaggtcgccagcctgctggtgaagcgaactccaagatctgtcggatacaagcccgactttgtgggcttcgagatccctgacaaattcgtggtgggatacgcgctcgattataatgagtactttcgggatctcaaccatgtgtgtgtgatcagtgaaaccggaaaagccaaatataaggcttag

SEQ ID NO: 4106 - DNA, 657 bp, Artificial Sequence
  derived and/or modified sequence
atggccaccaggagccctggggtggtgatcagtgatgatgagcccggctatgacctggacctcttctgcatccccaaccactatgcagaggacctggagagggtcttcatcccccacggcctcatcatggacagaacagagcggctggccagagatgtgatgaaggagatgggcggccaccacatcgtggccctgtgtgtgctgaagggcggctacaagttctttgctgacctgctggactacatcaaggccctgaacagaaacagcgacaggagcatccccatgacagtggacttcatccggctgaagagctactgcaatgaccagagcactggagacatcaaggtgattggaggagatgacctgagcaccctgaccgggaagaatgtgctgattgtggaggacatcatcgacaccgggaagaccatgcagaccctgctgagcctggtgcggcagtacaaccccaagatggtgaaggtggccagcctgctggtgaagaggacccccaggtctgtgggctacaagccagactttgtgggctttgagatcccagacaagtttgtggtgggctacgccctggactacaatgagtacttccgggacctgaaccacgtgtgtgtgatcagcgagaccgggaaggccaagtacaaggcctag

SEQ ID NO: 4107 - DNA, 657 bp, Artificial Sequence
  derived and/or modified sequence
atggccaccaggagccctggggtggtgatcagtgatgatgagcccggctatgacctggacctcttctgcatccccaaccactatgcagaggacctggagagggtcttcatcccccacggcctcatcatggacagaacagagcggctggccagagatgtgatgaaggagatgggcggccaccacatcgtggccctgtgtgtgctgaagggcggctacaagttctttgctgacctgctggactacatcaaggccctgaacagaaacagcgacaggagcatccccatgacagtggacttcatccggctgaagagctactgcaatgaccagagcactggagacatcaaggtgattggaggagatgacctgagcaccctgaccgggaagagccggctgctggccgaggacatcatcgacaccgggaagaccatgcagaccctgctgagcctggtgcggcagtacaaccccaagatggtgaaggtggccagcctgctggtgaagaggacccccaggtctgtgggctacaagccagactttgtgggctttgagatcccagacaagtttgtggtgggctacgccctggactacaatgagtacttccgggacctgaaccacgtgtgtgtgatcagcgagaccgggaaggccaagtacaaggcctag

SEQ ID NO: 4108 - DNA, 657 bp, Artificial Sequence
  derived and/or modified sequence
atggccacccggagccccggcgtggtgatcagcgacgacgagcccggttatgacttggacctgttctgcattcctaatcactacgccgaagacctggagcgggtctttatcccgcatggacttatcatggaccgaacggagaggctggccagggacgtgatgaaggagatgggcgggcaccatattgttgccctttgtgtgctgaagggggggtacaaattcttcgccgatttgttggactatatcaaggcgctcaataggaactccgaccgtagcatcccgatgactgtggatttcatccgcctgaagagctattgcaacgaccagtctaccggcgacattaaagtgatagggggtgacgacctgagcaccttgaccggaaagaacgttctcattgtcgaggacatcatcgataccgggaagacgatgcaaaccctcctcagtctagtgcgtcagtataatccgaagatggtgaaggtggcttcactcctggtgaaacgcactcccagatccgtcggctataagcctgacttcgttggattcgagattccagataaattcgttgttgggtacgccttagattataacgaatacttccgcgacctgaaccacgtgtgcgtcatttcagaaactgggaaggctaagtataaagcatag

SEQ ID NO: 4109 - DNA, 657 bp, Artificial Sequence
  derived and/or modified sequence
atggccacccggagccccggcgtggtgatcagcgacgacgagcccggttacgatctggatttgttctgtatcccgaaccactatgcggaggacttggagcgcgtgtttattccgcatggcctaataatggataggacagagagacttgcaagagatgtgatgaaggaaatgggtgggcatcatatcgtggccctctgcgttctgaaaggcggctataaattctttgcggatctgttggattacattaaagccctaaatcggaacagcgacagatcaattccaatgacagtagactttattcgtttgaagtcatactgtaacgaccagtctacaggcgatatcaaagttattggtggagacgatttaagtaccctgacgggcaaatcaaggttgctggccgaggacatcattgacacaggaaaaaccatgcaaaccctgctgtcactagtccgacagtataaccctaaaatggtaaaagtggcttcactcctggttaagagaaccccccgatctgtgggatataagccagacttcgtgggctttgagatccccgacaaattcgtcgttggttatgctctggattacaacgagtatttcagagatctgaatcacgtgtgcgttataagtgaaacaggcaaggccaaatacaaggcctag

SEQ ID NO: 4110 - DNA, 657 bp, Artificial Sequence
  derived and/or modified sequence
atggccactcggtctcccggtgtagtgatatctgacgatgagcctgggtatgaccttgacttgttttgcatccccaaccattacgccgaggacctagagagggtcttcatccctcatgggttaatcatggatcgcacagagcgactagcgagggacgtcatgaaggaaatgggcggtcaccacatagttgcactgtgtgttctaaaagggggatacaagttttttgctgatctgctggactacatcaaagctttgaatagaaactcagatcggtccatcccgatgactgtggacttcatccgacttaagagttattgtaacgatcagtctaccggcgatattaaagtgatcgggggagatgatttgagtacacttaccggcaaaaacgtactgattgtggaagacattatcgacaccggtaagactatgcagaccctgctgtcccttgttcggcaatacaacccgaaaatggtgaaagtagctagcctcctggtcaagcggactcccagatcagtggggtacaaaccagactttgtagggttcgaaatccctgataaattcgtggtgggttacgcactggattacaacgaatattttcgggacctgaatcatgtctgcgtgatatctgagactgggaaggctaagtacaaagcctag

SEQ ID NO: 4111 - DNA, 657 bp, Artificial Sequence
  derived and/or modified sequence
atggcaacaagaagtcctggggtggttataagtgatgacgagcccggatacgacctggacttgttttgcatcccaaatcactatgctgaggatttagagcgagtgttcattccacacggattgatcatggacaggacagagaggttagctcgtgatgtgatgaaagaaatgggcggacaccacatcgtcgcactctgcgtgttgaagggcggttataagttctttgcagacctactcgattatattaaggccctgaatcggaattctgatagaagcattcccatgaccgtagattttatcaggctgaagtcctactgtaacgaccagtccactggtgatattaaggtgattgggggtgacgacctctctaccctcaccggcaagtcccgtctgctagccgaggacattattgacacaggcaagaccatgcagacactgctgagcctcgtgcgccagtataaccctaagatggtgaaggtggcctccctcttagtgaaacgtacaccaagatctgtcgggtataagccggatttcgtgggctttgagattccggacaagtttgtcgtgggctacgcgttggattataacgagtactttagagatctaaaccacgtgtgtgttatctctgaaactggcaaggccaagtataaggcgtag

SEQ ID NO: 4112 - DNA, 1407 bp, Artificial Sequence
  derived and/or modified sequence
ctgcttctcctcagcttcaggcggctgcgacgagccctcaggcgaacctctcggctttcccgcgcggcgccgcctcttgctgcgcctccgcctcctcctctgctccgccaccggcttcctcctcctgagcagtcagcccgcgcgccggccggctccgttatggcgacccgcagccctggcgtcgtgattagtgatgatgaaccaggttatgaccttgatttattttgcatacctaatcattatgctgaggatttggaaagggtgtttattcctcatggactaattatggacaggactgaacgtcttgctcgagatgtgatgaaggagatgggaggccatcacattgtagccctctgtgtgctcaaggggggctataaattctttgctgacctgctggattacatcaaagcactgaatagaaatagtgatagatccattcctatgactgtagattttatcagactgaagagctattgtaatgaccagtcaacaggggacataaaagtaattggtggagatgatctctcaactttaactggaaagaatgtcttgattgtggaagatataattgacactggcaaaacaatgcagactttgctttccttggtcaggcagtataatccaaagatggtcaaggtcgcaagcttgctggtgaaaaggaccccacgaagtgttggatataagccagactttgttggatttgaaattccagacaagtttgttgtaggatatgcccttgactataatgaatacttcagggatttgaatcatgtttgtgtcattagtgaaactggaaaagcaaaatacaaagcctaagatgagagttcaagttgagtttggaaacatctggagtcctattgacatcgccagtaaaattatcaatgttctagttctgtggccatctgcttagtagagctttttgcatgtatcttctaagaattttatctgttttgtactttagaaatgtcagttgctgcattcctaaactgtttatttgcactatgagcctatagactatcagttccctttgggcggattgttgtttaacttgtaaatgaaaaaattctcttaaaccacagcactattgagtgaaacattgaactcatatctgtaagaaataaagagaagatatattagttttttaattggtattttaatttttatatatgcaggaaagaatagaagtgattgaatattgttaattataccaccgtgtgttagaaaagtaagaagcagtcaattttcacatcaaagacagcatctaagaagttttgttctgtcctggaattattttagtagtgtttcagtaatgttgactgtattttccaacttgttcaaattattaccagtgaatctttgtcagcagttcccttttaaatgcaaatcaataaattcccaaaaatttaa

SEQ ID NO: 4113 - DNA, 804 bp, Artificial Sequence
  derived and/or modified sequence
agcttcaggcggctgcgacgagccctcaggcgaacctctcggctttcccgcgcggcgccgcctcttgctgcgcctccgcctcctcctctgctccgccaccggcttcctcctcctgagcagtcagcccgcgcgccggccggctccgttatggcgacccgcagccctggcgtcgtgattagtgatgatgaaccaggttatgaccttgatttattttgcatacctaatcattatgctgaggatttggaaagggtgtttattcctcatggactaattatggacaggactgaacgtcttgctcgagatgtgatgaaggagatgggaggccatcacattgtagccctctgtgtgctcaaggggggctataaattctttgctgacctgctggattacatcaaagcactgaatagaaatagtgatagatccattcctatgactgtagattttatcagactgaagagctattgtaatgaccagtcaacaggggacataaaagtaattggtggagatgatctctcaactttaactggaaagtctaggttgttggcagaagatataattgacactggcaaaacaatgcagactttgctttccttggtcaggcagtataatccaaagatggtcaaggtcgcaagcttgctggtgaaaaggaccccacgaagtgttggatataagccagactttgttggatttgaaattccagacaagtttgttgtaggatatgcccttgactataatgaatacttcagggatttgaatcatgtttgtgtcattagtgaaactggaaaagcaaaatacaaagcctaa

SEQ ID NO: 4114 - DNA, 657 bp, Artificial Sequence
  derived and/or modified sequence
atggcaaccaggtccccaggcgtagtcatcagcgacgacgagcctggatacgatttagacttattttgcattcctaatcattatgctgaagatttggagcgggtgttcatcccccatgggcttataatggatcggactgagcgtctggcacgcgatgtaatgaaggagatgggcggacaccacattgtggcactgtgtgttttgaagggtggatacaagtttttcgccgacttacttgattatataaaggccttaaatcggaacagcgatcggtctatacccatgacagtggatttcattcgcctcaagagttactgtaacgaccagagtacaggtgatataaaggttattggaggtgatgatctgtccaccctgacaggcaagaacgtgttgatcgtcgaagacataatcgataccggcaaaaccatgcagacactgttatcactcgtacggcaatacaaccccaaaatggtgaaagtcgcttccctattagtgaaaaggacacctagaagcgtagggtacaagccggacttcgtaggatttgaaattccagacaaattcgtggttgggtatgccttggattacaatgaatactttcgcgacctgaaccatgtctgtgtgataagtgaaactggtaaggcaaagtacaaagcctag

SEQ ID NO: 4115 - DNA, 657 bp, Artificial Sequence
  derived and/or modified sequence
atggctacccgtagccccggagtagtcatcagtgatgatgaacctggctacgacttagatctcttttgcatccccaaccattacgccgaagatctggaacgggtgttcatcccacatggacttatcatggaccgcacagagagacttgcacgagatgtgatgaaggagatgggcgggcatcacatagtagccctatgtgtacttaaaggcggctacaaatttttcgccgacttattagattacatcaaggctctgaacagaaactctgaccgtagtatcccgatgacagtagacttcatacggctcaagtcgtactgcaatgatcaatcaactggggacataaaagtgataggcggagacgacctgtctaccttaactggaaaatcaagactgctggcagaggacattatagacacagggaagacaatgcagacgttactgagcctcgtacggcagtacaaccccaaaatggttaaggtggcctccctgctggtgaaacggaccccccggagtgtcggatacaaacctgacttcgtaggctttgagattcccgataagtttgtggttggatacgcactggattacaatgaatactttagagacttaaaccacgtctgcgtcatatccgagactggcaaggccaagtacaaagcctag

SEQ ID NO: 4116 - DNA, 657 bp, Artificial Sequence
  derived and/or modified sequence
atggccacaagatccccaggcgtagtaatctctgacgatgaacccggatatgatctggaccttttctgtataccaaaccactatgcagaagacctggagagagtttttataccacatggactgatcatggatcgaacagaaaggctggctcgagacgtgatgaaagagatgggagggcaccacatagttgctctctgtgtgttaaaaggaggttataagttctttgctgacctgctcgattacatcaaggcgttaaatcgcaactctgaccgcagcatcccgatgactgtcgactttatccggctcaaatcctattgtaacgaccagagtacaggagatatcaaagtgatcggcggtgacgatctctctacacttaccggcaagaacgtgctcattgttgaggacattattgacaccggaaaaactatgcagacattacttagtcttgtgaggcagtacaatccgaagatggtgaaagtagcttccttacttgtcaagagaacacccagatccgtaggctacaaaccagattttgttggctttgaaattccggacaaatttgtggtcggctacgctctggactataatgaatatttcagagacctgaatcatgtgtgtgtaatctctgaaactggcaaagcaaaatataaggcatag

SEQ ID NO: 4117 - DNA, 657 bp, Artificial Sequence
  derived and/or modified sequence
atggctactcggtcacccggtgtggttatctcagacgatgagcctggatacgatcttgatctgttctgcataccaaatcactacgcggaggacctggagagagtgtttattccacatggtttgattatggacagaactgagcggctggcccgggacgttatgaaagaaatgggcggccatcacatagtggcactttgtgtccttaaaggcggctataagttcttcgccgatctgctagattatatcaaagccttaaatagaaacagcgaccgttcgatacccatgactgttgatttcattcgcctgaagtcctattgcaatgatcagagtacgggcgacatcaaggtcatcggcggagatgatctgtctacactgaccggaaaatcaaggctgctggcagaagatattattgatacgggtaagactatgcaaacactcctctctttagtgcgacaatacaaccctaaaatggtgaaggttgctagtctcctggtgaaacgtacgcctcggagcgtaggttataaacctgatttcgttggcttcgaaattcctgataagtttgtggttgggtacgcgttagattataacgagtatttccgggacttaaaccacgtatgtgtaattagtgagactgggaaagcgaaatataaggcatag

SEQ ID NO: 4118 - RNA, 800 nt, Artificial Sequence
  derived and/or modified sequence
gggaaauaagagagaaaagaagaguaagaagaaauauaagagccaccauggcaacacggucaccaggcguggucaucagcgacgacgagcccgguuaugaucuugaucuuuucuguauccccaaucacuaugcggaagauuuggagagaguguuuaucccucacggauugaucauggauagaaccgaaagacuugcucgcgaugucaugaaggaaauggguggacaucacaucguggcgcucugcguacucaagggcggguauaaguucuuugcagacuugcuugauuacaucaaagcccugaaccgcaacucggauagguccauuccgaugacuguagacuuuauccgccucaagucguacuguaacgaccaaagcacaggggacauuaaagucaucgggggugacgaccugucaacgcugacuggaaagaauguacucaucguggaggacaucauugauacgggaaagacgaugcagacccugcucucauugguccggcaguacaauccuaaaauggugaaaguagccucccugcuugucaagaggacgccgcgaucggugggguacaaacccgauuuugucggguucgagauucccgacaaguucguagugggauaugcgcucgacuacaaugaguauuuccgagauuugaaccaugugugcgucauuucggaaacaggaaaagccaaguacaaagcguaaugagcugccuucugcggggcuugccuucuggccaugcccuucuucucucccuugcaccuguaccucuuggucuuugaauaaagccugaguaggaag

SEQ ID NO: 4119 - RNA, 657 nt, Artificial Sequence
  derived and/or modified sequence
auggcaaccagguccccaggcguagucaucagcgacgacgagccuggauacgauuuagacuuauuuugcauuccuaaucauuaugcugaagauuuggagcggguguucaucccccaugggcuuauaauggaucggacugagcgucuggcacgcgauguaaugaaggagaugggcggacaccacauuguggcacuguguguuuugaaggguggauacaaguuuuucgccgacuuacuugauuauauaaaggccuuaaaucggaacagcgaucggucuauacccaugacaguggauuucauucgccucaagaguuacuguaacgaccagaguacaggugauauaaagguuauuggaggugaugaucuguccacccugacaggcaagaacguguugaucgucgaagacauaaucgauaccggcaaaaccaugcagacacuguuaucacucguacggcaauacaaccccaaaauggugaaagucgcuucccuauuagugaaaaggacaccuagaagcguaggguacaagccggacuucguaggauuugaaauuccagacaaauucgugguuggguaugccuuggauuacaaugaauacuuucgcgaccugaaccaugucugugugauaagugaaacugguaaggcaaaguacaaagccuag

SEQ ID NO: 4120 - RNA, 657 nt, Artificial Sequence
  derived and/or modified sequence
auggcuacccguagccccggaguagucaucagugaugaugaaccuggcuacgacuuagaucucuuuugcauccccaaccauuacgccgaagaucuggaacggguguucaucccacauggacuuaucauggaccgcacagagagacuugcacgagaugugaugaaggagaugggcgggcaucacauaguagcccuauguguacuuaaaggcggcuacaaauuuuucgccgacuuauuagauuacaucaaggcucugaacagaaacucugaccguaguaucccgaugacaguagacuucauacggcucaagucguacugcaaugaucaaucaacuggggacauaaaagugauaggcggagacgaccugucuaccuuaacuggaaaaucaagacugcuggcagaggacauuauagacacagggaagacaaugcagacguuacugagccucguacggcaguacaaccccaaaaugguuaagguggccucccugcuggugaaacggaccccccggagugucggauacaaaccugacuucguaggcuuugagauucccgauaaguuugugguuggauacgcacuggauuacaaugaauacuuuagagacuuaaaccacgucugcgucauauccgagacuggcaaggccaaguacaaagccuag

SEQ ID NO: 4121 - RNA, 657 nt, Artificial Sequence
  derived and/or modified sequence
auggccacaagauccccaggcguaguaaucucugacgaugaacccggauaugaucuggaccuuuucuguauaccaaaccacuaugcagaagaccuggagagaguuuuuauaccacauggacugaucauggaucgaacagaaaggcuggcucgagacgugaugaaagagaugggagggcaccacauaguugcucucuguguguuaaaaggagguuauaaguucuuugcugaccugcucgauuacaucaaggcguuaaaucgcaacucugaccgcagcaucccgaugacugucgacuuuauccggcucaaauccuauuguaacgaccagaguacaggagauaucaaagugaucggcggugacgaucucucuacacuuaccggcaagaacgugcucauuguugaggacauuauugacaccggaaaaacuaugcagacauuacuuagucuugugaggcaguacaauccgaagauggugaaaguagcuuccuuacuugucaagagaacacccagauccguaggcuacaaaccagauuuuguuggcuuugaaauuccggacaaauuuguggucggcuacgcucuggacuauaaugaauauuucagagaccugaaucauguguguguaaucucugaaacuggcaaagcaaaauauaaggcauag

SEQ ID NO: 4122 - RNA, 657 nt, Artificial Sequence
  derived and/or modified sequence
auggcuacucggucacccggugugguuaucucagacgaugagccuggauacgaucuugaucuguucugcauaccaaaucacuacgcggaggaccuggagagaguguuuauuccacaugguuugauuauggacagaacugagcggcuggcccgggacguuaugaaagaaaugggcggccaucacauaguggcacuuuguguccuuaaaggcggcuauaaguucuucgccgaucugcuagauuauaucaaagccuuaaauagaaacagcgaccguucgauacccaugacuguugauuucauucgccugaaguccuauugcaaugaucagaguacgggcgacaucaaggucaucggcggagaugaucugucuacacugaccggaaaaucaaggcugcuggcagaagauauuauugauacggguaagacuaugcaaacacuccucucuuuagugcgacaauacaacccuaaaauggugaagguugcuagucuccuggugaaacguacgccucggagcguagguuauaaaccugauuucguuggcuucgaaauuccugauaaguuugugguuggguacgcguuagauuauaacgaguauuuccgggacuuaaaccacguauguguaauuagugagacugggaaagcgaaauauaaggcauag

SEQ ID NO: 4123 - protein, 700 aa, Artificial Sequence [sequence omitted]

SEQ ID NO: 4124 - DNA, 2103 bp, Artificial Sequence
  derived and/or modified sequence
atgaaatgcgtcctggtcgcaaccgagggggctgaagtgctgttttactggaccgaccaggagttcgaggagtccttacggttgaagttcggtcagtctgaaaacgaagaggaggagctaccggcgctcgaggatcagctgtcaacactcctcgcgccagtgatcatcagcagtatgacaatgttagagaagctgagtgacacatacacttgttttagcaccgagaatggtaacttcctgtatgtgcttcatctgtttggggagtgtctgttcatcgccatcaacggcgatcacaccgagagcgagggcgacctgagaaggaagttgtatgtactaaaatatctctttgaggttcatttcggattagtgacagtggatggccacctgatccggaaggagttacgcccccccgatctggcccagagagtgcagctgtgggaacattttcagagcctgctatggacgtatagcagattgcgagaacaggaacaatgctttgcagtcgaggcactcgaacgattgatccatcctcagctctgcgagctctgtatcgaggccctggaacgccacgtgatccaagcggtgaacacaagtccggagcgggggggcgaggaagcgctacacgcgtttttactcgtgcactccaagcttctggctttttattcttctcatagtgcgtcctcgctgcgtccagcggacctcttagcgcttattcttctggttcaggatttgtaccccagcgagtctacagcagaagacgatatacagcctagcccccggcgggcccgctccagtcaaaatattcccgtacagcaggcctggtctccacacagcaccgggcctacgggtgggagtagcgccgaaaccgagaccgactcttttagtctgccagaggagtacttcaccccggctccatcgcccggagaccagagtagcggctccactatatggctcgagggaggaacccctccaatggacgcactgcaaattgcagaagatacgcttcagaccctggtccctcactgccccgtgcccagtgggcctaggagaatctttttagatgctaatgtcaaggagtcatactgccccctggtgcctcataccatgtattgtctgcctctctggcagggaataaatctggtgctcttaacacgcagcccttccgctcccttagctctcgtgttgtcccagttaatggacggtttcagcatgctggagaagaaactcaaggaggggccagagcccggagcgagtttgcgatcccagcctttagtaggcgatttgcgacagagaatggataagtttgtgaagaatcggggcgctcaggagatccagtctacctggctggagtttaaggcgaaagccttcagtaagtccgagccagggagtagctgggaactcctgcaggcatgcggaaagttgaagcgtcaattgtgtgccatctaccggctgaattttctcacgaccgccccttcccgcggagggcctcacctgccgcagcaccttcaggaccaagtgcagagactgatgcgcgaaaagctaactgattggaaggatttcctgcttgtcaagagccgacgcaatattacaatggtgagctatctcgaagactttccagggctggtgcattttatttacgtggacaggaccactggccaaatggtggcaccatcgttaaactgtagccagaagacatcgagcgagctgggcaaggggcctctcgccgcattcgtcaaaacaaaggtgtggagcctcatacagctggcacgccgctatttgcaaaaaggctatacaacgctcttatttcaggagggggacttctactgctcctattttctgtggtttgaaaacgacatgggatacaagctacagatgatcgaggtgccggtgctgtctgacgactcagtgcccatcggcatgctaggcggcgattactatagaaagctcctgcgctattattctaagaaccgacctaccgaagctgtgcgttgttatgaactgttggctctgcatcttagtgtgattccaactgatttattagttcagcaggcagggcagcttgccagacgcttgtgggaagcgtcccgaatccctctcttatag

SEQ ID NO: 4125 - DNA, 2103 bp, Artificial Sequence
  derived and/or modified sequence
atgaaatgcgtgttggtggcaactgagggcgccgaagtgctcttctactggacagatcaggagtttgaggagagtctgcgattgaaatttggccagagcgaaaacgaggaagaggaattgcccgctctcgaagaccagctaagcactctcctcgctcccgtgataatctcatccatgacaatgcttgagaagctatctgacacttacacttgtttttctaccgaaaatggaaatttcctgtacgttcttcacctgttcggagaatgcctctttattgccatcaacggcgaccacacggaaagcgagggcgacctccgccgcaagctttatgtcctgaaatatctgttcgaggtgcattttggactggtcaccgtcgacggtcatttgattcggaaggagctgcgccctcccgaccttgcccagagggtccagctgtgggaacacttccagtcactcctgtggacttacagccgcttacgagagcaggaacagtgcttcgccgtagaggccttggaaagattgatccatcctcagctctgtgaactctgcatcgaagcgctcgaaagacacgtaatccaggccgtgaacacctcccccgagagaggaggagaggaggcgttgcacgccttcttgctggtgcactcaaaactacttgcattttacagcagccattctgcaagttcgctccggcccgctgacctcctagccctgatcctcctcgttcaggatttatacccaagtgagtccaccgcagaggatgatatccaaccctctcctcgaagagcaaggtcatctcagaatattccagtccaacaggcttggtcacctcatagcacaggccctacgggcggtagctccgcagaaaccgaaacggatagcttttctctacccgaggaatatttcacccctgcccccagcccaggcgatcagtccagcggcagcactatctggctggagggagggaccccacccatggatgcactacagatcgccgaagacaccctccagactcttgtcccacactgccccgttcccagtgggccaagacgtatattcctggacgccaatgtgaaggaatcttattgtccccttgtgccccataccatgtactgcctgcccctctggcaggggataaacctggtgctgctgacacgctctccaagcgctcctctcgctctggtcctttcccagcttatggatgggttctcaatgctggaaaaaaagcttaaggagggccccgagcctggcgcctctctgcgctcccagcccttggtcggggacctccggcagcggatggataagtttgtgaagaatcgaggtgcccaagagatccagagcacatggctcgagtttaaagccaaagccttctcaaagtcagagccaggtagcagctgggagctcttgcaggcttgcggtaagctgaagcggcagctctgcgcaatttataggctgaacttcttgaccaccgctccaagcaggggcggtccccatctgccgcagcatttgcaggatcaggtgcagcgtctcatgagagagaagctcaccgattggaaagactttctgctcgtgaagtccagacgtaatattacaatggtgtcatacttagaggacttccctgggctagtccacttcatctatgtagatcgaacaaccggtcaaatggttgccccatcactgaactgttcccaaaaaacctcctcagagctcgggaagggcccccttgccgccttcgtgaagacaaaagtgtggtccctgatccaactggcacgcaggtatctacaaaaaggatataccacactgcttttccaggaaggagatttctattgtagctattttctttggtttgagaacgacatgggctataagctgcaaatgattgaagtacccgtgctgagtgacgacagtgtacctatcggcatgctgggaggagattactacagaaagctgctgaggtattactccaagaacagacccaccgaagctgtccgctgctacgagctcctggctctgcacttatccgtgattcccaccgaccttttagtgcagcaggccgggcagctcgctcgccggctctgggaagctagccgaatccctctgctatag

SEQ ID NO: 4126 - DNA, 3703 bp, Artificial Sequence
  derived and/or modified sequence
cgggctcctgcaggcggggcgctgtgcgcgccgcgatccggtacgtgggcctccgggctgtcccctctgggggcggcgatcctccctccggagccccccttcaaccctcccggaagtgagcatttgcaggaccagggatgctgtgctgctctcccatgagccagtcaccgagtcggtctgctgcagccctttctgaacctctggccgtctggatgctccactgtgcttgccaagatgaagtgcgtcttggtggccactgagggcgcagaggtcctcttctactggacagatcaggagtttgaagagagtctccggctgaagttcgggcagtcagagaatgaggaagaagagctccctgccctggaggaccagctcagcaccctcctagccccggtcatcatctcctccatgacgatgctggagaagctctcggacacctacacctgcttctccacggaaaatggcaacttcctgtatgtccttcacctgtttggagaatgcctgttcattgccatcaatggtgaccacaccgagagcgagggggacctgcggcggaagctgtatgtgctcaagtacctgtttgaagtgcactttgggctggtgactgtggacggtcatcttatccgaaaggagctgcggcccccagacctggcgcagcgtgtccagctgtgggagcacttccagagcctgctgtggacctacagccgcctgcgggagcaggagcagtgcttcgccgtggaggccctggagcgactgattcacccccagctctgtgagctgtgcatagaggcgctggagcggcacgtcatccaggctgtcaacaccagccccgagcggggaggcgaggaggccctgcatgccttcctgctcgtgcactccaagctgctggcattctactctagccacagtgccagctccctgcgcccggccgacctgcttgccctcatcctcctggttcaggacctctaccccagcgagagcacagcagaggacgacattcagccttccccgcggagggcccggagcagccagaacatccccgtgcagcaggcctggagccctcactccacgggcccaactggggggagctctgcagagacggagacagacagcttctccctccctgaggagtacttcacaccagctccttcccctggcgatcagagctcaggtagcaccatctggctggaggggggcaccccccccatggatgcccttcagatagcagaggacaccctccaaacactggttccccactgccctgtgccttccggccccagaaggatcttcctggatgccaacgtgaaggaaagctactgccccctagtgccccacaccatgtactgcctgcccctgtggcagggcatcaacctggtgctcctgaccaggagccccagcgcgcccctggccctggttctgtcccagctgatggatggcttctccatgctggagaagaagctgaaggaagggccggagcccggggcctccctgcgctcccagcccctcgtgggagacctgcgccagaggatggacaagtttgtcaagaatcgaggggcacaggagattcagagcacctggctggagtttaaggccaaggctttctccaaaagtgagcccggatcctcctgggagctgctccaggcatgtgggaagctgaagcggcagctctgcgccatctaccggctgaactttctgaccacagcccccagcaggggaggcccacacctgccccagcacctgcaggaccaagtgcagaggctcatgcgggagaagctgacggactggaaggacttcttgctggtgaagagcaggaggaacatcaccatggtgtcctacctagaagacttcccaggcttggtgcacttcatctatgtggaccgcaccactgggcagatggtggcgccttccctcaactgcagtcaaaagacctcgtcggagttgggcaaggggccgctggctgcctttgtcaaaactaaggtctggtctctgatccagctggcgcgcagatacctgcagaagggctacaccacgctgctgttccaggagggggatttctactgctcctacttcctgtggttcgagaatgacatggggtacaaactccagatgatcgaggtgcccgtcctctccgacgactcagtgcctatcggcatgctgggaggagactactacaggaagctcctgcgctactacagcaagaaccgcccaaccgaggctgtcaggtgctacgagctgctggccctgcacctgtctgtcatccccactgacctgctggtgcagcaggccggccagctggcccggcgcctctgggaggcctcccgtatccccctgctctaggccaaggtggccgcagtctgcctttgcatcctgtcctccagccacccttgcttgccactgttccccatgacgagagcctcctgtctgcagtggccatcctgaggatagggcagagtgcccagggtggccccagggcttctaaaaccccacctagaccaccctccatgtcaggtactgagcaaggccccagatccttctctctggaggaagagggaagcccaggggtcctgtttgtaaaacaacggtggcaacagctcctcttccagagctgcctctgcctttatcctgggagatggggaggaagccccatctctgctgttccctgcgtggaggaagcccacccagcaagctctctcctaccccaggtaaaaggtgctcctttgcctgggtttgaattccagcgctgccacttcctctctgcacctcctggcaagtttcttctattccccacgtttaaagcgatggcacctccgtcccagggtggtgtgaggattacccagtgtggtaggtgctcaataaatgttggtcattgttatcactgaagcccaacatgctagtgcttctagacccttctgtcagtgctgataagcccttgctaagtcccagccccttcatgcttggctggcgtctgccctagggctggggttctcaagcccctggccctggcccagagatttggattcccttggcggccgtggagcccagcctttgatgtctttcaaagcttctgtggtgcgccctggattgagaaccaccacccgaggggtacagcccctctcttccaaccgagaagttcctgtcccagaatggacccagggacaagagaccctgagagccctgggactgggagtgtctgctcctctgaggccaggaggccggtgctgggccagagaggacggcgtggcgaaagtcagcgtccactgcagcacaggatcagatggccgtgtgctgtgcatgcaggagcctcgccttctgtgtctttagtcttgagccaaaatttgctcaaagactgatctcttccttgcagggaacagctttggggctgggggaactagaacccacatgttggtctaaaccctgagaaggtggcagtgaggaagtatcccctcaggtgactggatctgtgttcctccttaacatcatctgatggaatggcaatgaaaagcgtggattgtggaaaatacagaaaaacataaaggaaaaaactccaatcccctgagcccaccactgttcaggacccctgcttttgtcacctactatttccctttagtttttagcagcggctggatgtgatatgtctagtttaaccagtccccttgatctttctatataataaataacacaggagtgaacatcctgaatcaga

SEQ ID NO: 4127 - DNA, 3678 bp, Artificial Sequence
  derived and/or modified sequence
gggcgctgtgcgcgccgcgatccggtacgtgggcctccgggctgtcccctctgggggcggcgatcctccctccggagccccccttcaaccctcccggaagtgaggaccagggatgctgtgctgctctcccatgagccagtcaccgagtcggtctgctgcagccctttctgaacctctggccgtctggatgctccactgtgcttgccaagatgaagtgcgtcttggtggccactgagggcgcagaggtcctcttctactggacagatcaggagtttgaagagagtctccggctgaagttcgggcagtcagagaatgaggaagaagagctccctgccctggaggaccagctcagcaccctcctagccccggtcatcatctcctccatgacgatgctggagaagctctcggacacctacacctgcttctccacggaaaatggcaacttcctgtatgtccttcacctgtttggagaatgcctgttcattgccatcaatggtgaccacaccgagagcgagggggacctgcggcggaagctgtatgtgctcaagtacctgtttgaagtgcactttgggctggtgactgtggacggtcatcttatccgaaaggagctgcggcccccagacctggcgcagcgtgtccagctgtgggagcacttccagagcctgctgtggacctacagccgcctgcgggagcaggagcagtgcttcgccgtggaggccctggagcgactgattcacccccagctctgtgagctgtgcatagaggcgctggagcggcacgtcatccaggctgtcaacaccagccccgagcggggaggcgaggaggccctgcatgccttcctgctcgtgcactccaagctgctggcattctactctagccacagtgccagctccctgcgcccggccgacctgcttgccctcatcctcctggttcaggacctctaccccagcgagagcacagcagaggacgacattcagccttccccgcggagggcccggagcagccagaacatccccgtgcagcaggcctggagccctcactccacgggcccaactggggggagctctgcagagacggagacagacagcttctccctccctgaggagtacttcacaccagctccttcccctggcgatcagagctcaggtagcaccatctggctggaggggggcaccccccccatggatgcccttcagatagcagaggacaccctccaaacactggttccccactgccctgtgccttccggccccagaaggatcttcctggatgccaacgtgaaggaaagctactgccccctagtgccccacaccatgtactgcctgcccctgtggcagggcatcaacctggtgctcctgaccaggagccccagcgcgcccctggccctggttctgtcccagctgatggatggcttctccatgctggagaagaagctgaaggaagggccggagcccggggcctccctgcgctcccagcccctcgtgggagacctgcgccagaggatggacaagtttgtcaagaatcgaggggcacaggagattcagagcacctggctggagtttaaggccaaggctttctccaaaagtgagcccggatcctcctgggagctgctccaggcatgtgggaagctgaagcggcagctctgcgccatctaccggctgaactttctgaccacagcccccagcaggggaggcccacacctgccccagcacctgcaggaccaagtgcagaggctcatgcgggagaagctgacggactggaaggacttcttgctggtgaagagcaggaggaacatcaccatggtgtcctacctagaagacttcccaggcttggtgcacttcatctatgtggaccgcaccactgggcagatggtggcgccttccctcaactgcagtcaaaagacctcgtcggagttgggcaaggggccgctggctgcctttgtcaaaactaaggtctggtctctgatccagctggcgcgcagatacctgcagaagggctacaccacgctgctgttccaggagggggatttctactgctcctacttcctgtggttcgagaatgacatggggtacaaactccagatgatcgaggtgcccgtcctctccgacgactcagtgcctatcggcatgctgggaggagactactacaggaagctcctgcgctactacagcaagaaccgcccaaccgaggctgtcaggtgctacgagctgctggccctgcacctgtctgtcatccccactgacctgctggtgcagcaggccggccagctggcccggcgcctctgggaggcctcccgtatccccctgctctaggccaaggtggccgcagtctgcctttgcatcctgtcctccagccacccttgcttgccactgttccccatgacgagagcctcctgtctgcagtggccatcctgaggatagggcagagtgcccagggtggccccagggcttctaaaaccccacctagaccaccctccatgtcaggtactgagcaaggccccagatccttctctctggaggaagagggaagcccaggggtcctgtttgtaaaacaacggtggcaacagctcctcttccagagctgcctctgcctttatcctgggagatggggaggaagccccatctctgctgttccctgcgtggaggaagcccacccagcaagctctctcctaccccaggtaaaaggtgctcctttgcctgggtttgaattccagcgctgccacttcctctctgcacctcctggcaagtttcttctattccccacgtttaaagcgatggcacctccgtcccagggtggtgtgaggattacccagtgtggtaggtgctcaataaatgttggtcattgttatcactgaagcccaacatgctagtgcttctagacccttctgtcagtgctgataagcccttgctaagtcccagccccttcatgcttggctggcgtctgccctagggctggggttctcaagcccctggccctggcccagagatttggattcccttggcggccgtggagcccagcctttgatgtctttcaaagcttctgtggtgcgccctggattgagaaccaccacccgaggggtacagcccctctcttccaaccgagaagttcctgtcccagaatggacccagggacaagagaccctgagagccctgggactgggagtgtctgctcctctgaggccaggaggccggtgctgggccagagaggacggcgtggcgaaagtcagcgtccactgcagcacaggatcagatggccgtgtgctgtgcatgcaggagcctcgccttctgtgtctttagtcttgagccaaaatttgctcaaagactgatctcttccttgcagggaacagctttggggctgggggaactagaacccacatgttggtctaaaccctgagaaggtggcagtgaggaagtatcccctcaggtgactggatctgtgttcctccttaacatcatctgatggaatggcaatgaaaagcgtggattgtggaaaatacagaaaaacataaaggaaaaaactccaatcccctgagcccaccactgttcaggacccctgcttttgtcacctactatttccctttagtttttagcagcggctggatgtgatatgtctagtttaaccagtccccttgatctttctatataataaataacacaggagtgaacatcctgaatcaga

SEQ ID NO: 4128 - DNA, 2103 bp, Artificial Sequence
  derived and/or modified sequence
atgaagtgtgtgctggtggccacagagggcgctgaggtgctcttctactggacagaccaggagtttgaggagagcctgcggctgaagtttggccagagtgaaaatgaggaggaggagctgcctgccctggaggaccagctgagcaccctgctggcccctgtgatcatcagctccatgaccatgctggagaagctgagtgacacctacacctgcttcagcacagaaaatggaaacttcctgtatgtgctgcacctgtttggagagtgcctcttcatcgccatcaatggagaccacacagaaagtgaaggagacctgcggaggaagctgtatgtgctgaagtacctgtttgaggtgcacttcggcctggtgacagtggatggccacctgatcaggaaggagctgcggcccccagacctggcccagagggtgcagctgtgggagcacttccagagcctgctgtggacctacagccggctgcgggagcaggagcagtgctttgctgtggaggccctggagcggctcatccacccccagctgtgtgagctgtgcatcgaggccctggagcggcacgtgatccaggccgtgaacaccagccctgagcggggcggggaggaggccctgcacgccttcctgctggtgcacagcaagctgctggccttctacagcagccacagcgccagcagcctgcggcctgctgacctgctggccctgatcctgctggtgcaggacctgtaccccagcgagagcacagcagaagatgacatccagcccagcccccggcgggcccggagcagccagaacatccctgtgcagcaggcctggagcccccacagcacaggccccaccggcggcagcagcgctgagacagaaacagacagcttcagcctgcctgaggagtacttcaccccagcccccagccctggggaccagagcagcggcagcaccatctggctggagggcggcaccccacccatggatgccctgcagattgctgaggacaccctgcagaccctggtgccccactgccctgtgcccagcggcccccggcgcatcttcctggatgccaacgtgaaggagagctactgccccctggtgccccacaccatgtactgcctgcccctgtggcagggcatcaacctggtgctgctgaccaggagccccagcgcccccctggccctggtgctgagccagctgatggatggcttctccatgctggagaagaagctgaaggagggccctgagcccggggccagcctgcggagccagcccctggtgggggacctgcggcagaggatggacaagtttgtgaagaacagaggagcccaggagatccagagcacctggctggagttcaaggccaaggccttcagcaagtctgagcccggcagctcctgggagctgctgcaggcctgtgggaagctgaagaggcagctgtgtgccatctaccgcctgaacttcctgaccacagcccccagccggggcggcccccacctgccccagcacctgcaggaccaggtgcagaggctgatgagggagaagctgacagactggaaggacttcctgctggtgaagagcagaagaaacatcaccatggtgtcctacctggaggacttccctggcctggtgcacttcatctacgtggacaggaccaccggccagatggtggcccccagcctgaactgcagccagaagaccagcagcgagctgggcaagggccccctggccgcctttgtgaagaccaaggtgtggagcctcatccagctggcccggcgctacctgcagaagggctacaccaccctgctcttccaggagggggacttctactgcagctacttcctgtggtttgaaaatgacatgggctacaagctgcagatgattgaggtgcctgtgctgagtgatgattctgtgcccatcggcatgctgggcggggactactacaggaagctgctgcgctactacagcaagaaccggcccacagaagctgtgcgctgctatgagctgctggccctgcacctgagcgtcatccccacagacctgctggtgcagcaggccggccagctggcccggcggctgtgggaggccagccgcatccccctgctgtag

SEQ ID NO: 4129 - DNA, 2103 bp, Artificial Sequence
  derived and/or modified sequence
atgaagtgcgtgctggtggccaccgagggcgccgaggtgctgttctattggactgaccaggaattcgaagaatccctcagactcaaattcggacagagcgaaaacgaggaggaagaacttcccgcactggaggaccaactaagcacgttattggcgccagtaattatcagcagtatgactatgctagaaaaactgtctgatacgtacacctgtttctccactgagaatggcaacttcctgtatgtgctgcacctgtttggcgaatgtttattcattgccatcaacggggaccacaccgaaagtgaaggagacttgcggcgaaaattgtacgtcctgaagtacctgttcgaagtgcactttggccttgtaaccgtcgatgggcacctgatcagaaaagagctcaggccgcccgacctggcacagagggtacagctctgggaacacttccagagtctcctctggacttacagtcggttacgagagcaggagcagtgtttcgccgtcgaagctctggagcgcctgatccacccgcagttgtgcgagctatgcattgaagcactcgaaagacacgtgatccaggccgtgaatacaagccccgagcgcggcggcgaggaggcgctgcacgcatttctgctagtgcatagtaaactactagctttctactcaagccactccgccagctctctgcgaccagctgatctactggccttgattttgctggtccaggatctgtaccctagcgagagtacggccgaggacgacatccagccctcccctcgacgcgcccggtcttcccaaaatattccagtacagcaagcgtggtcgccccacagcactggacctactggagggtcaagtgcggagaccgaaacagattccttctctctaccagaagagtacttcacaccagccccttcccctggcgatcagtctagtggtagcacaatctggctggagggcgggaccccacccatggatgcattacagattgcagaagacacactccagaccctcgtgccgcattgtcctgttccctcaggcccgcgtaggatcttcctcgatgccaatgtgaaagagagctactgccccctagtgccccacactatgtactgcctcccattgtggcaaggcattaatctggtcctgttgacacgttcaccttctgcgcctctggctctcgttttatcgcagctgatggacggattcagcatgcttgagaagaagctaaaagagggacccgaacctggggcatccctccgatcacagccactcgtgggcgacctccgacaaaggatggacaagttcgtgaagaatcgaggagctcaggagatccagagcacctggttggagttcaaagctaaggcgttttccaaatcggaacctggaagctcttgggagctcttgcaagcatgtggcaaactcaagcgacagctgtgtgcaatctatcgacttaactttttgactacggcccccagccgggggggtcctcacttaccccagcacctgcaggatcaggtgcaacgcctgatgcgggagaaattgacggattggaaagatttcctgctggttaagagccgacgaaatatcacgatggtgtcctacttagaagatttcccaggcctcgtacacttcatctacgtggatcgtacgacagggcagatggtagccccctccctgaactgtagccagaaaaccagttccgagttggggaagggaccattggcagctttcgtgaaaacaaaggtgtggagtcttattcagctggcccgaagatacctgcagaaagggtacacaacactcctatttcaagagggggacttctattgtagttactttttgtggttcgaaaacgatatgggctacaaactgcagatgattgaagttcctgttttgagcgacgactctgtgcccattgggatgttaggaggagactactatcggaagcttctgaggtactactctaagaaccggcccactgaggcggttaggtgctacgagttactggccctacatcttagcgtgatcccaacggacctgttggtgcagcaagccggtcagctggctaggcggctgtgggaggccagccgcatcccactcctatag

SEQ ID NO: 4130 - DNA, 2103 bp, Artificial Sequence
  derived and/or modified sequence
atgaagtgcgtgctggtggccaccgagggcgccgaggtgctgttctactggaccgaccaagagttcgaagaaagtctacggctgaagtttgggcagtccgagaatgaagaggaagagctacccgcactcgaggaccagttgtcaaccctcctggccccggtgattatatccagcatgacaatgctggagaagttgagcgatacatacacctgctttagtaccgagaatgggaattttctgtacgtcctacacctcttcggggaatgcctgttcatcgccatcaacggggaccacacagagagcgaaggtgaccttaggaggaaactttacgtactcaaatacctgttcgaggtccacttcggcctggtaaccgtggatggccacctgattcgaaaggagctccgaccgccggatctggctcagcgtgttcaactgtgggagcactttcagagcctcctgtggacgtactcccgattaagagagcaggagcaatgttttgcagtggaagctctggaacgactgattcatccccaattgtgcgaactctgtatcgaggccctggagcggcacgtgattcaggcagtgaacacctcaccagaacgcggtggggaggaggcacttcatgcctttctactagtacactccaaacttttagctttctactcaagccatagtgcttcttctctgcggcccgcagatctgctcgctttaattcttctggtccaggatctgtaccctagtgaaagtaccgctgaagatgacatccaaccgtcacctcgcagagcccgctcatctcagaatatacctgtccagcaggcgtggagtcctcattccacgggccctacagggggcagtagcgctgagaccgagaccgactcctttagtctgccagaagagtactttacccctgcgccatcacccggagaccagtcttccgggtcgacaatctggcttgaaggggggacaccacctatggatgccctgcagatcgctgaggataccctgcagaccctggtaccacattgccccgtccctagcggtcctcgcagaatcttcttggatgccaatgtcaaggagagctattgcccactcgtcccccacactatgtactgcttaccgttgtggcagggcatcaacctggtgctgctcaccaggagtcctagtgcccctctggctctggtgctctcccaactgatggacggattcagcatgcttgagaaaaagctgaaagagggccctgaacccggcgccagtctgcgtagccagcccctagttggtgacctgcgccagaggatggataaatttgtaaaaaacagaggcgcccaagaaatccagtccacatggctcgaattcaaagctaaggctttcagtaaatcagaacccggaagttcctgggagctcttgcaagcttgtgggaaactcaagaggcagctgtgtgcaatctatcggctgaacttcctcaccaccgccccctcacggggcggtccccatctgccccagcatctgcaggaccaggttcagaggctgatgcgggaaaagttaaccgactggaaggatttcctcctggtaaaaagccgaaggaacatcacaatggttagttatctagaggacttccccgggcttgtacattttatctacgtcgatcgaacaacgggtcagatggtggccccgtcattgaattgttcccagaaaactagcagcgagttgggtaagggacctttagccgcgttcgtgaagaccaaagtctggtccctcatccagctggctagaagatacctgcagaaaggatacaccaccttgctgttccaggagggcgatttctactgcagttactttctgtggttcgagaatgacatgggatacaagctccagatgattgaagtgcccgtgctgtctgatgactctgtccccattggaatgctggggggcgactactataggaagctactgcggtactattcgaaaaaccgccctaccgaagctgttagatgctacgaactgctggccctgcacctgtccgttatccccacagacttgttggttcaacaggctggccagttagctcgccgtctttgggaagccagcagaatccccctgctttag

SEQ ID NO: 4131 - DNA, 2103 bp, Artificial Sequence
  derived and/or modified sequence
atgaaatgcgtgctcgtagctacagagggagcagaggttctgttctactggaccgatcaggaattcgaagaaagtctccgactgaaatttgggcagagtgagaacgaagaggaagaattacctgccctcgaggaccagctgtccaccctattggcacctgtaatcatttcgtctatgactatgctggagaagctctctgacacctatacatgcttctcaaccgaaaacgggaatttcctatatgtcctgcacctgtttggggagtgcctgttcatagcaatcaacggcgaccatactgaaagcgagggtgatctccgaaggaaactgtacgtcttaaagtatctgtttgaagtgcacttcggtcttgtcacagtggacggccatctgatcagaaaagaactcaggcccccagacctcgcccagagagtgcaactgtgggagcactttcaatcgctgttgtggacatatagccggctccgcgaacaggaacagtgctttgcggtggaggccttggagcggctgatacatcctcagttatgcgaactgtgtatagaagcgttggagaggcatgttattcaggccgtcaatacatcccccgaacgcggtggcgaagaagccttacacgcattccttttggtccattccaaacttctagctttttacagcagtcatagcgcgagcagcctgagacctgccgatctgctcgccctcatccttctggtccaggacctctaccctagcgagtcaactgccgaggacgacattcagccttccccaagacgagccaggtcctctcaaaacattcccgttcaacaggcgtggagccctcatagcaccggtcccacaggagggtcatcagctgagacagagacagacagtttttctctccccgaagaatactttacaccagcaccgtcacccggtgatcaaagctcagggagcaccatttggctcgaggggggaactcctccgatggatgcattgcagatcgccgaagacactctgcagacattggtgccccattgtcctgtgccctccggcccacggaggatctttctggatgccaatgtgaaggagtcctactgtccattagtgccccatacaatgtattgcctgcctctgtggcaaggaattaacctagtgctgctaactcggagccctagcgcgccactggcgctggtgctctcccaattaatggacggcttttccatgctcgaaaagaagcttaaggagggcccagagcccggtgctagcctcagatctcagccattagtgggggaccttaggcaacgtatggacaaattcgtgaagaataggggcgcacaagaaattcagagcacgtggttagagttcaaagccaaagctttctctaaaagcgagcccggatcctcttgggaactgctacaggcatgcgggaaactcaaacggcagctttgcgctatctacagacttaattttctgaccactgccccatcccgcggagggcctcatctcccccaacacctccaggaccaggtgcaaagactgatgcgtgaaaagctcaccgactggaaggactttttgctggttaagagcagaaggaatataacgatggtatcatacttggaagactttcccggacttgtacactttatctacgtggaccgcacaactggtcagatggtcgcaccgagcttgaactgctcacaaaagacatctagcgagctgggaaagggaccactggctgccttcgtcaaaacgaaagtctggtcactcatccagctggccagaaggtacttgcagaaaggctacaccactctgcttttccaagagggggatttctattgttcctactttctgtggtttgagaacgacatgggatacaagttgcagatgatcgaggtgcctgtgctcagcgacgattcggtgcccattggtatgctgggcggtgattactataggaagctgctccgctactactctaagaaccggcctacggaagctgtaagatgttacgagctcctagccctgcacctgtccgtgattcccaccgaccttctggtacaacaggccggtcagctggctagacgcttgtgggaagcctctcgaattcctctactgtag

SEQ ID NO: 4132 - DNA, 2103 bp, Artificial Sequence
  derived and/or modified sequence
atgaagtgtgtgctcgtggcaaccgagggcgcagaggtccttttctactggaccgaccaggagttcgaagagagtctgcgtctcaagtttggacagtctgagaacgaggaagaggaactgcccgctctggaggatcaactctctacactgctggctcctgtgatcatatccagtatgacaatgctggaaaagctatctgacacgtatacctgttttagcactgaaaatggcaatttcttgtatgtgttgcacctgtttggagagtgcctgttcatcgctatcaacggtgatcacactgagtccgaaggggacctgagaaggaaattatacgtccttaaatatctgtttgaggtgcattttggactcgtgactgtagatggccacctgattcgcaaggaactgcgacctcctgacctggcccagcgggtgcagctgtgggaacactttcagtcgttgttgtggacctattccagattgagagagcaggagcagtgctttgcggtggaagcgttagagcgcctcatccacccccagctctgtgaactgtgtatagaagcacttgaaagacacgtaattcaagccgtgaataccagccctgaacgtgggggtgaagaggccctgcacgccttcttgttggtccacagcaaactcttggctttttattctagtcattccgcatcatccctaaggcctgctgacttattggcattaatcctgctggtgcaggatctctatcccagcgagagcacagccgaggacgatattcaacccagccctcgcagggctcgttccagtcagaacattcctgttcaacaagcatggtctccacattcaacgggtcctactggcggatcatcagccgaaaccgaaacagactcgttctctctgcccgaggagtattttacacctgccccatcccccggagatcagtcctccgggagcaccatttggttggaaggcggaactcctccgatggatgctcttcaaatcgcagaggatactcttcaaaccctcgtccctcactgcccagtcccttctggcccacgaagaattttcctcgacgctaatgtcaaagagagttactgccctctagtaccgcacaccatgtactgcctccctctatggcagggcatcaatctcgtcctcctgacacgctcaccctccgctcctctcgccttggtcttgtcgcagctgatggacggcttctccatgctggaaaaaaaacttaaggaggggcctgagccaggggcttctctcagaagtcagccactggtgggagacctccgacagcggatggacaagttcgtaaagaaccgcggagctcaggaaatacagagtacctggcttgaatttaaggcaaaggcgttctccaaatcagagcctgggagcagctgggagttactgcaggcttgcggaaaactcaagcgccaattgtgtgctatatatcgcctgaattttctgactacagcacctagtcgcggagggcctcacctaccacagcacctccaggaccaggtccagcgcctcatgcgagagaagctgaccgactggaaggactttctcctggtgaaatctagacgcaatattactatggtgtcttatctggaggacttccctggcctcgtgcatttcatttacgtcgacaggaccacaggacagatggttgcgcctagtttgaactgcagccagaagacatcaagcgagctgggtaagggcccattggcagcttttgtgaaaacaaaagtgtggagtctgatccagttggcaagacggtatctgcagaaagggtacacaaccctcttgttccaggagggtgacttctattgctcttacttcctgtggtttgagaatgacatggggtataagttgcagatgatagaggtaccagttctgtccgacgattcggtgccaattgggatgctagggggagactattaccggaaactcctgcgctactactccaagaacagacctaccgaggcagtcagatgttatgagctcctggcattgcatcttagcgtgatcccaactgatctgcttgtgcaacaggcaggacagctggctcgtcggctgtgggaggcctcccggataccacttctgtag

SEQ ID NO: 4133 - DNA, 2103 bp, Artificial Sequence
  derived and/or modified sequence
atgaagtgcgtgctggtggccaccgagggcgccgaggtgctgttctactggaccgaccaggagttcgaggagagcctgagactgaagttcggccagagcgagaacgaggaggaggagctgcccgccctggaggaccagctgagcaccctgctggcccccgtgatcatcagcagcatgaccatgctggagaagctgagcgacacctacacctgcttcagcaccgagaacggcaacttcctgtacgtgctgcacctgttcggcgagtgcctgttcatcgccatcaacggcgaccacaccgagagcgagggcgacctgagaagaaagctgtacgtgctgaagtacctgttcgaggtgcacttcggcctggtgaccgtggacggccacctgatcagaaaggagctgagaccccccgacctggcccagagagtgcagctgtgggagcacttccagagcctgctgtggacctacagcagactgagagagcaggagcagtgcttcgccgtggaggccctggagagactgatccacccccagctgtgcgagctgtgcatcgaggccctggagagacacgtgatccaggccgtgaacaccagccccgagagaggcggcgaggaggccctgcacgccttcctgctggtgcacagcaagctgctggccttctacagcagccacagcgccagcagcctgagacccgccgacctgctggccctgatcctgctggtgcaggacctgtaccccagcgagagcaccgccgaggacgacatccagcccagccccagaagagccagaagcagccagaacatccccgtgcagcaggcctggagcccccacagcaccggccccaccggcggcagcagcgccgagaccgagaccgacagcttcagcctgcccgaggagtacttcacccccgcccccagccccggcgaccagagcagcggcagcaccatctggctggagggcggcaccccccccatggacgccctgcagatcgccgaggacaccctgcagaccctggtgccccactgccccgtgcccagcggccccagaagaatcttcctggacgccaacgtgaaggagagctactgccccctggtgccccacaccatgtactgcctgcccctgtggcagggcatcaacctggtgctgctgaccagaagccccagcgcccccctggccctggtgctgagccagctgatggacggcttcagcatgctggagaagaagctgaaggagggccccgagcccggcgccagcctgagaagccagcccctggtgggcgacctgagacagagaatggacaagttcgtgaagaacagaggcgcccaggagatccagagcacctggctggagttcaaggccaaggccttcagcaagagcgagcccggcagcagctgggagctgctgcaggcctgcggcaagctgaagagacagctgtgcgccatctacagactgaacttcctgaccaccgcccccagcagaggcggcccccacctgccccagcacctgcaggaccaggtgcagagactgatgagagagaagctgaccgactggaaggacttcctgctggtgaagagcagaagaaacatcaccatggtgagctacctggaggacttccccggcctggtgcacttcatctacgtggacagaaccaccggccagatggtggcccccagcctgaactgcagccagaagaccagcagcgagctgggcaagggccccctggccgccttcgtgaagaccaaggtgtggagcctgatccagctggccagaagatacctgcagaagggctacaccaccctgctgttccaggagggcgacttctactgcagctacttcctgtggttcgagaacgacatgggctacaagctgcagatgatcgaggtgcccgtgctgagcgacgacagcgtgcccatcggcatgctgggcggcgactactacagaaagctgctgagatactacagcaagaacagacccaccgaggccgtgagatgctacgagctgctggccctgcacctgagcgtgatccccaccgacctgctggtgcagcaggccggccagctggccagaagactgtgggaggccagcagaatccccctgctgtag

SEQ ID NO: 4134 - protein, 405 aa, Artificial Sequence
  derived and/or modified sequence
MERWPWPSGGAWLLVAARALLQLLRSDLRLGRPLLAALALLAALDWLCQRLLPPPAALAVLAAAGWIALSRLARPQRLPVATRAVLITGCDSGFGKETAKKLDSMGFTVLATVLELNSPGAIELRTCCSPRLRLLQMDLTKPGDISRVLEFTKAHTTSTGLWGLVNNAGHNEVVADAELSPVATFRSCMEVNFFGALELTKGLLPLLRSSRGRIVTVGSPAGDMPYPCLGAYGTSKAAVALLMDTFSCELLPWGVKVSIIQPGCFKTESVRNVGQWEKRKQLLLANLPQELLQAYGKDYIEHLHGQFLHSLRLAMSDLTPVVDAITDALLAARPRRRYYPGQGLGLMYFIHYYLPEGLRRRFLQAFFISHCLPRALQPGQPGTTPPQDAAQDPNLSPGPSPAVAR

SEQ ID NO: 4135 - DNA, 1218 bp, Artificial Sequence
  derived and/or modified sequence
atggaaagatggccctggccctctgggggcgcatggctgctcgtcgctgccagggccctcctccagcttttaaggtcagatctaagattgggacgccccctcctggccgcgctggcactgctggctgctctggactggctgtgtcaacgtcttttgccacctccagccgctctcgccgtactcgctgccgcgggctggatagcactgtcacgactcgcgagaccccaaaggctccctgtggccacccgtgcagtgctgattacgggctgtgattcgggcttcgggaaagagaccgccaagaaactcgacagtatggggttcacagtgctcgctactgtgctggagcttaatagcccgggcgcgatagaactgaggacttgttgctccccaagactgcgcttgctccagatggacctcactaaacccggagacatctctcgggtcctcgaatttaccaaagcacacaccacgagcacaggtctctggggcttggttaataacgccgggcataacgaggtggtggccgacgcagagctgtccccagtggccacttttcggagttgtatggaagtgaatttcttcggggccctcgagctgacgaaggggttgttaccactgctcagaagtagtcgtggccgcatcgtcaccgtgggatccccagcaggcgacatgccttatccttgtttaggggcgtacgggactagtaaggccgccgtggccttgctgatggataccttctcttgcgagttgctgccgtggggtgttaaggtcagcattatccaacctggctgtttcaaaactgagtctgtgcggaacgtcggacagtgggagaagaggaagcaactgctactcgccaatctcccgcaggagctgttacaggcatatggaaaagactacattgaacacctgcacggtcagtttctccactcccttagactagcaatgtccgatctgactcccgtagtcgacgctatcactgacgctctcctcgctgcgcgtccacgaagaaggtactaccccggccagggcctgggactgatgtattttatccactactacctgcctgagggtcttagacgccgcttcctgcaggctttctttattagtcattgtctgccaagggctttgcagcccggccaacccggaaccaccccaccgcaggacgccgcgcaggatccaaatcttagcccaggcccttcccctgctgtggcgcgttag

SEQ ID NO: 4136 - DNA, 1879 bp, Artificial Sequence
  derived and/or modified sequence
tcgcgccccaggccggtgtacccccgcactccgcgccccggcctagaagctctctctccccgctccccggcccggcccccgccccgccccgccccagcccgctgggccgccatggagcgctggccttggccgtcgggcggcgcctggctgctcgtggctgcccgcgcgctgctgcagctgctgcgctcagacctgcgtctgggccgcccgctgctggcggcgctggcgctgctggccgcgctcgactggctgtgccagcgcctgctgcccccgccggccgcactcgccgtgctggccgccgccggctggatcgcgttgtcccgcctggcgcgcccgcagcgcctgccggtggccactcgcgcggtgctcatcaccggctgtgactctggttttggcaaggagacggccaagaaactggactccatgggcttcacggtgctggccaccgtattggagttgaacagccccggtgccatcgagctgcgtacctgctgctcccctcgcctaaggctgctgcagatggacctgaccaaaccaggagacattagccgcgtgctagagttcaccaaggcccacaccaccagcaccggcctgtggggcctcgtcaacaacgcaggccacaatgaagtagttgctgatgcggagctgtctccagtggccactttccgtagctgcatggaggtgaatttctttggcgcgctcgagctgaccaagggcctcctgcccctgctgcgcagctcaaggggccgcatcgtgactgtggggagcccagcgggggacatgccatatccgtgcttgggggcctatggaacctccaaagcggccgtggcgctactcatggacacattcagctgtgaactccttccctggggggtcaaggtcagcatcatccagcctggctgcttcaagacagagtcagtgagaaacgtgggtcagtgggaaaagcgcaagcaattgctgctggccaacctgcctcaagagctgctgcaggcctacggcaaggactacatcgagcacttgcatgggcagttcctgcactcgctacgcctggccatgtccgacctcaccccagttgtagatgccatcacagatgcgctgctggcagctcggccccgccgccgctattaccccggccagggcctggggctcatgtacttcatccactactacctgcctgaaggcctgcggcgccgcttcctgcaggccttcttcatcagtcactgtctgcctcgagcactgcagcctggccagcctggcactaccccaccacaggacgcagcccaggacccaaacctgagccccggcccttccccagcagtggctcggtgagccatgtgcacctatggcccagccactgcagcacaggaggctccgtgagcccttggttcctccccgaaaacccccagcattacgatcccccaagtgtcctggaccctggcctaaagaatcccacccccacttcatgcccactgccgatgcccaatccaggcccggtgaggccaaggtttcccagtgagcctctgcgcctctccactgtttcatgagcccaaacaccctcctggcacaacgctctaccctgcagcttggagaactccgctggatggggagtctcatgcaagacttcactgcagcctttcacaggactctgcagatagtgcctctgcaaactaaggagtgactaggtgggttggggaccccctcaggattgtttctcggcaccagtgcctcagtgctgcaattgagggctaaatcccaagtgtctcttgactggctcaagaattagggccccaactacacacccccaagccacagggaagcatgtactgtacttcccaattgccacattttaaataaagacaaatttttatttcttctaaaa

SEQ ID NO: 4137 - DNA, 1218 bp, Artificial Sequence
  derived and/or modified sequence
atggagcgctggccctggcccagcggcggggcctggctgctggtggccgcccgggccctgctgcagctgctgcggagtgacctgcggctgggccggcccctgctggccgccctggccctgctggccgccctggactggctgtgccagaggctgctgcccccacctgctgccctggccgtgctggccgccgccggctggatcgccctgagccggctggcccggccccagaggctgcctgtggccaccagggctgtgctgatcaccggctgtgacagcggctttgggaaggagacagccaagaagctggacagcatgggcttcaccgtgctggccaccgtgctggagctgaacagccctggggccatcgagctgcggacctgctgcagcccccggctgcggctgctgcagatggacctgaccaagccaggggacatcagccgggtgctggagttcaccaaggcccacaccaccagcacaggcctgtggggcctggtgaacaatgccggccacaatgaggtggtggctgatgctgagctgagccctgtggccaccttccgcagctgcatggaggtgaacttcttcggggccctggagctgaccaagggcctgctgcccctgctgcggagcagccggggccgcatcgtgacagtgggcagccctgctggggacatgccctacccctgcctgggcgcctacggcaccagcaaggctgctgtggccctgctgatggacaccttcagctgtgagctgctgccctggggcgtgaaggtgtccatcatccagcccggctgcttcaagacagaatctgtgagaaatgtgggccagtgggagaagaggaagcagctgctgctggccaacctgccccaggagctgctgcaggcctacggcaaggactacatcgagcacctgcacggccagttcctgcacagcctgcggctggccatgtctgacctgacccctgtggtggatgccatcacagatgccctgctggccgcccggccccggcggcgctactacccaggccagggcctgggcctgatgtacttcatccactactacctgcctgagggcctgcggcggcgcttcctgcaggccttcttcatcagccactgcctgccccgggccctgcagcccggccagcccggcaccaccccaccccaggatgctgcccaggaccccaacctgagccctggccccagccctgctgtggccaggtag

SEQ ID NO: 4138 - DNA, 1218 bp, Artificial Sequence
  derived and/or modified sequence
atggagcggtggccctggcccagcggcggcgcctggctgctggtggccgcaagggctctgctgcagctgctcaggtccgatcttaggctcggcaggccactcctggctgcactggctctgctggctgcgctcgattggctctgccagcgcctgctgccccctcctgccgcgctcgcagtgctggccgccgcaggatggatcgccctgtcaaggctggcccgtccacagagactgccagttgcgacccgagctgtccttatcacagggtgcgactctggtttcggtaaagagaccgccaaaaagcttgattccatgggctttactgttctcgccaccgtcctggaactcaattctcctggcgcaatcgagctccgtacatgttgcagcccccgacttcgcctcctccagatggatctcactaaacccggagacatttctagagtgctggaattcactaaagcccacacaacctctacaggcctttgggggctggtcaacaatgcgggccataatgaggttgtagccgatgcggagctgtctccagtcgcgacctttagatcatgcatggaagtcaatttttttggggcgctcgaactgacgaaaggccttctccctcttttacgctcttcacgggggcgaattgtgaccgtgggctctccagccggagacatgccctacccctgtctgggcgcatatgggacttctaaagctgccgtagcgctgttaatggacaccttttcttgtgagctactcccctggggagttaaagtgagcattatccagcctggatgctttaagactgagagcgtccgtaacgttggtcaatgggagaaacggaaacagctgctgttggcaaatttgccacaggagcttcttcaagcttacggcaaggactacatcgagcacctccatgggcagtttctacacagcctacgacttgctatgtctgaccttactccagtcgtggacgctataacagacgccttgctggcagccagacccagaagacgttattatccaggccaggggcttggacttatgtatttcatccactattaccttcctgaaggtctgcgacggcggtttttacaagcttttttcatttctcactgcttgccccgggctctccagccagggcagcccggcactacaccgccccaggatgctgctcaggatccaaacctgagtccaggaccttctccggccgtggccagatag

SEQ ID NO: 4139 - DNA, 1218 bp, Artificial Sequence
  derived and/or modified sequence
atggagcggtggccttggccttcaggcggtgcttggttgcttgtggcagcgcgtgcactgctacagctacttaggagcgatctacggttgggtagacccttattagcggctctcgccctgttggcagcactagactggttgtgtcaacgccttcttccgcctcctgccgcactagccgtgctagctgcagcagggtggattgcattatcacggctagctagaccacagaggcttcctgtcgccactcgagccgtgctcatcacggggtgcgactccgggttcggtaaagaaacagctaagaagctggattctatgggttttaccgtgctcgcgacagttctggagttaaattctcctggcgcaatagagctgcgcacttgctgcagccctagattgcgactcctccagatggacctgactaaacccggagacattagccgcgtcctagagtttactaaggcccatactactagtaccggcctttggggcctggtaaataatgctggccacaatgaggtggtcgcggatgcggaactgtctccggtggcaacgttccgatcatgcatggaggtgaatttttttggcgcactggagcttaccaagggcctcttaccactgctgcggtctagtcggggacgcatagtcaccgtaggaagtcccgctggtgacatgccttatccctgcctgggcgcttacgggacgagtaaggccgcagtggcattattgatggatactttttcttgcgagctcctcccgtggggagtgaaagtcagcatcatccagcccggttgcttcaagacagaatccgtgcgcaatgtggggcagtgggagaagagaaagcaactgcttctggcaaatctccctcaagaactcctgcaggcatacggaaaggactatatagaacaccttcacggccagtttctgcacagtcttcgccttgccatgtccgacctcacccccgtggtggacgcgattaccgacgcactccttgccgctcggcctcgcaggaggtactaccccggtcagggtctgggcctgatgtattttattcactactatcttcccgagggcctcagaagacgctttctccaagcgtttttcatttcccactgtctgcctcgcgctctccagccaggccagcctggaactaccccccctcaggatgccgctcaggaccctaatctgtctcccggtccaagccccgctgtcgcgagatag

SEQ ID NO: 4140 - DNA, 1218 bp, Artificial Sequence
  derived and/or modified sequence
atggagagatggccctggcccagcggcggcgcctggctgctggtggccgccagagccctgctgcagctgctgagaagcgacctgagactgggcagacccctgctggccgccctggccctgctggccgccctggactggctgtgccagagactgctgcccccccccgccgccctggccgtgctggccgccgccggctggatcgccctgagcagactggccagaccccagagactgcccgtggccaccagagccgtgctgatcaccggctgcgacagcggcttcggcaaggagaccgccaagaagctggacagcatgggcttcaccgtgctggccaccgtgctggagctgaacagccccggcgccatcgagctgagaacctgctgcagccccagactgagactgctgcagatggacctgaccaagcccggcgacatcagcagagtgctggagttcaccaaggcccacaccaccagcaccggcctgtggggcctggtgaacaacgccggccacaacgaggtggtggccgacgccgagctgagccccgtggccaccttcagaagctgcatggaggtgaacttcttcggcgccctggagctgaccaagggcctgctgcccctgctgagaagcagcagaggcagaatcgtgaccgtgggcagccccgccggcgacatgccctacccctgcctgggcgcctacggcaccagcaaggccgccgtggccctgctgatggacaccttcagctgcgagctgctgccctggggcgtgaaggtgagcatcatccagcccggctgcttcaagaccgagagcgtgagaaacgtgggccagtgggagaagagaaagcagctgctgctggccaacctgccccaggagctgctgcaggcctacggcaaggactacatcgagcacctgcacggccagttcctgcacagcctgagactggccatgagcgacctgacccccgtggtggacgccatcaccgacgccctgctggccgccagacccagaagaagatactaccccggccagggcctgggcctgatgtacttcatccactactacctgcccgagggcctgagaagaagattcctgcaggccttcttcatcagccactgcctgcccagagccctgcagcccggccagcccggcaccacccccccccaggacgccgcccaggaccccaacctgagccccggccccagccccgccgtggccagatag

SEQ ID NO: 4141 - protein, 260 aa, Artificial Sequence
  derived and/or modified sequence
MGDVLEQFFILTGLLVCLACLAKCVRFSRCVLLNYWKVLPKSFLRSMGQWAVITGAGDGIGKAYSFELAKRGLNVVLISRTLEKLEAIATEIERTTGRSVKIIQADFTKDDIYEHIKEKLAGLEIGILVNNVGMLPNLLPSHFLNAPDEIQSLIHCNITSVVKMTQLILKHMESRQKGLILNISSGIALFPWPLYSMYSASKAFVCAFSKALQEEYKAKEVIIQAGFLSLIPAWAFYSGAFQRLLLTHYVAYLKLNTKVR

SEQ ID NO: 4142 - protein, 310 aa, Artificial Sequence
  derived and/or modified sequence
MGDVLEQFFILTGLLVCLACLAKCVRFSRCVLLNYWKVLPKSFLRSMGQWAVITGAGDGIGKAYSFELAKRGLNVVLISRTLEKLEAIATEIERTTGRSVKIIQADFTKDDIYEHIKEKLAGLEIGILVNNVGMLPNLLPSHFLNAPDEIQSLIHCNITSVVKMTQLILKHMESRQKGLILNISSGIALFPWPLYSMYSASKAFVCAFSKALQEEYKAKEVIIQVLTPYAVSTAMTKYLNTNVITKTADEFVKESLNYVTIGGETCGCLAHEILAGFLSLIPAWAFYSGAFQRLLLTHYVAYLKLNTKVR

SEQ ID NO: 4143 - DNA, 783 bp, Artificial Sequence
  derived and/or modified sequence
atgggagatgtcctggagcagttttttatccttacagggcttctggtctgcctggcgtgtttggctaagtgcgtacgatttagccggtgcgtgctgcttaattactggaaagtcctgcctaaatccttcctccgttccatggggcagtgggccgtgatcacaggggcaggggatgggataggcaaagcctacagtttcgagctagccaaacgtggcctcaatgtcgtgctgatttcgcggacccttgagaagctcgaggccatcgcgacagagatagagcggacaactgggaggtccgtcaaaataatccaggcagatttcactaaggatgacatttacgagcatataaaggagaaacttgctggcctggaaatcggtatacttgtcaataatgtgggaatgttgccaaacctgcttccctctcattttttaaatgcacccgacgaaatccagtcactcatccactgcaatatcacttcggtggtgaaaatgacacaactcatcttgaagcatatggagagtaggcaaaagggccttattctcaacatctcgagtgggatagcccttttcccatggcccctctacagtatgtacagcgcctcaaaagcttttgtctgtgcctttagcaaagctcttcaggaggagtacaaagcgaaggaggtgatcatccaggccggcttcttgtccctgatccctgcgtgggccttctattcgggtgcatttcagcgcctcctgttgactcactacgtggcctacttaaagctgaataccaaggtaagatag

SEQ ID NO: 4144 - DNA, 933 bp, Artificial Sequence
  derived and/or modified sequence
atgggtgacgtcctcgaacagttctttatacttaccggcctcctcgtgtgcttagcttgtttggccaaatgcgtccgtttctctaggtgcgtccttcttaactactggaaagtcctccctaagtccttcctacgatcaatgggccagtgggctgtcatcaccggcgccggcgatgggatcggcaaggcatacagctttgagttagccaagcgaggcctgaacgtggtcctgattagtcgtaccctcgaaaaattagaggccattgcaacagaaatcgaacgcacgacaggccggagcgttaagattatccaggctgactttacaaaggatgacatatatgagcacattaaggagaaactggcaggcttggagatcgggattttagtcaacaatgtcggcatgctccccaacctgcttccaagccacttcctaaacgctcctgacgagatccaaagcctcatacactgtaacataacctctgttgtgaagatgacccagctgatcttaaagcatatggaatctcgacagaaggggttgatcctgaatattagcagtggcatcgctttgttcccatggcccctatattccatgtatagcgcctccaaagcgttcgtttgcgccttttccaaggcactgcaggaggagtacaaggctaaggaggtgatcatccaggtgctgactccatatgctgtgtctactgctatgacaaagtaccttaacacaaacgttatcacaaaaactgctgacgaattcgtcaaggaaagcttgaactacgtcactatcggcggcgagacttgtggatgcctcgcccacgaaatcctggcgggtttcctgtcccttatccctgcttgggccttttacagcggggctttccagcgcctcttactgactcactacgtggcttatctcaaactgaacacgaaggtccgctag

SEQ ID NO: 4145 - DNA, 783 bp, Artificial Sequence
  derived and/or modified sequence
atgggggacgtcctggaacagttcttcatcctcacagggctgctggtgtgcctggcctgcctggcgaagtgcgtgagattctccagatgtgttttactgaactactggaaagttttgccaaagtctttcttgcggtcaatgggacagtgggcagtgatcactggagcaggcgatggaattgggaaagcgtactcgttcgagctagcaaaacgtggactcaatgttgtccttattagccggacgctggaaaaactagaggccattgccacagagatcgagcggactacagggaggagtgtgaagattatacaagcagattttacaaaagatgacatctacgagcatattaaagaaaaacttgcaggcttagaaattggaattttagtcaacaatgtcggaatgcttccaaaccttctcccaagccatttcctgaacgcaccggatgaaatccagagcctcatccattgtaacatcacctccgtagtcaagatgacacagctaattctgaaacatatggaatcaaggcagaaaggtctcatcctgaacatttcttctgggatagccctgtttccttggcctctctactccatgtactcagcttccaaggcgtttgtgtgcgcattttccaaggccctgcaagaggaatataaagcaaaagaagtcatcatccaggcgggctttctgagcctgatcccggcctgggccttctacagcggtgccttccaaaggctgctcctgacacactatgtggcatacctgaagctcaacaccaaggtcaggtag

SEQ ID NO: 4146 - DNA, 1135 bp, Artificial Sequence
  derived and/or modified sequence
tacacagagagccacggccagggctgaaacagtctgttgagtgcagccatgggggacgtcctggaacagttcttcatcctcacagggctgctggtgtgcctggcctgcctggcgaagtgcgtgagattctccagatgtgttttactgaactactggaaagttttgccaaagtctttcttgcggtcaatgggacagtgggcagtgatcactggagcaggcgatggaattgggaaagcgtactcgttcgagctagcaaaacgtggactcaatgttgtccttattagccggacgctggaaaaactagaggccattgccacagagatcgagcggactacagggaggagtgtgaagattatacaagcagattttacaaaagatgacatctacgagcatattaaagaaaaacttgcaggcttagaaattggaattttagtcaacaatgtcggaatgcttccaaaccttctcccaagccatttcctgaacgcaccggatgaaatccagagcctcatccattgtaacatcacctccgtagtcaagatgacacagctaattctgaaacatatggaatcaaggcagaaaggtctcatcctgaacatttcttctgggatagccctgtttccttggcctctctactccatgtactcagcttccaaggcgtttgtgtgcgcattttccaaggccctgcaagaggaatataaagcaaaagaagtcatcatccaggtgctgaccccatatgctgtctcgactgcaatgacaaagtatctaaatacaaatgtgataaccaagactgctgatgagtttgtcaaagagtcattgaattatgtcacaattggaggtgaaacctgtggctgccttgcccatgaaatcttggcgggctttctgagcctgatcccggcctgggccttctacagcggtgccttccaaaggctgctcctgacacactatgtggcatacctgaagctcaacaccaaggtcaggtagccaggcggtgaggagtccagcacaaccttttcctcaccagtcccatgctggctgaagaggaccagaggagcagaccagcacttcaacctagtccgctgaagatggagggggctggggtcacagaggcatagaatacacattttttgccacttta

SEQ ID NO: 4147 - DNA, 783 bp, Artificial Sequence
  derived and/or modified sequence
atgggagatgtgctggagcagttcttcatcctgaccggcctgctggtgtgcctggcctgcctggccaagtgtgtgcgcttcagccgctgtgtgctgctgaactactggaaggtgctgcccaagagcttcctgcgctccatgggccagtgggccgtcatcaccggggctggagatggcatcggcaaggcctacagctttgagctggccaagaggggcctgaatgtggtgctgatcagcaggaccctggagaagctggaggccatcgccacagaaattgaaagaaccaccggccgctctgtgaagatcatccaggccgacttcaccaaggatgacatctatgagcacatcaaggagaagctggccggcctggagatcggcatcctggtgaacaacgtgggcatgctgcccaacctgctgcccagccacttcctgaatgccccagatgagatccagagcctcatccactgcaacatcacctctgtggtgaagatgacccagctgatcctgaagcacatggagagccggcagaagggcctcatcctgaacatcagcagcggcatcgccctcttcccctggcccctgtacagcatgtacagcgccagcaaggcctttgtgtgtgccttcagcaaggccctgcaggaggagtacaaggccaaggaggtgatcatccaggccggcttcctgagcctcatcccagcctgggccttctacagcggggccttccagaggctgctgctgacccactacgtggcctacctgaagctgaacaccaaggtgaggtag

SEQ ID NO: 4148 - DNA, 933 bp, Artificial Sequence
  derived and/or modified sequence
atgggagatgtgctggagcagttcttcatcctgaccggcctgctggtgtgcctggcctgcctggccaagtgtgtgcgcttcagccgctgtgtgctgctgaactactggaaggtgctgcccaagagcttcctgcgctccatgggccagtgggccgtcatcaccggggctggagatggcatcggcaaggcctacagctttgagctggccaagaggggcctgaatgtggtgctgatcagcaggaccctggagaagctggaggccatcgccacagaaattgaaagaaccaccggccgctctgtgaagatcatccaggccgacttcaccaaggatgacatctatgagcacatcaaggagaagctggccggcctggagatcggcatcctggtgaacaacgtgggcatgctgcccaacctgctgcccagccacttcctgaatgccccagatgagatccagagcctcatccactgcaacatcacctctgtggtgaagatgacccagctgatcctgaagcacatggagagccggcagaagggcctcatcctgaacatcagcagcggcatcgccctcttcccctggcccctgtacagcatgtacagcgccagcaaggcctttgtgtgtgccttcagcaaggccctgcaggaggagtacaaggccaaggaggtgatcatccaggtgctgaccccctatgctgtgtccacagccatgaccaagtacctgaacaccaacgtcatcaccaagacagcagatgaatttgtgaaggagagcctgaactacgtgaccatcggcggggagacctgtggctgcctggcccacgagatcctggccggcttcctgagcctcatcccagcctgggccttctacagcggggccttccagaggctgctgctgacccactacgtggcctacctgaagctgaacaccaaggtgaggtag

SEQ ID NO: 4149 - DNA, 783 bp, Artificial Sequence
  derived and/or modified sequence
atgggcgacgtgctggagcagttcttcatcctgaccggcctgctggtgtgcctcgcctgcctggctaagtgtgtgagattctcccgctgcgtgcttttaaactactggaaggttctgcctaagtcatttctgagaagtatgggacagtgggccgtgataactggggctggtgatgggatcgggaaagcctatagctttgaacttgctaagcggggtctgaatgtggtgctgattagccgcacactggagaagcttgaggccattgccaccgagatagagcggactacaggtcgtagcgttaagatcattcaagctgatttcactaaggatgacatttacgagcacatcaaagagaaattggcaggcctggagatcggtattttggtgaacaatgttggcatgttgccaaatctgctgccatcacactttctgaatgcccctgatgaaatccagagcctcatccattgtaatatcacaagtgtggtcaagatgactcagctaatactaaagcacatggaatccaggcaaaaaggactgattctcaacatctcttctgggatagcccttttcccttggcctctctactctatgtattctgcctcaaaggccttcgtatgtgctttttcaaaggcacttcaagaggagtataaagctaaggaagtgatcatccaagcaggatttttgtctctgattcctgcctgggccttctacagtggggcctttcagaggctactcttgacgcattacgtggcttacctgaagctaaacactaaggtgcgctag

SEQ ID NO: 4150 - DNA, 933 bp, Artificial Sequence
  derived and/or modified sequence
atgggcgacgtgctggagcagttcttcatcctgaccggcctgctggtatgcctcgcatgccttgctaaatgtgtgagattcagcagatgtgtcctgctgaactactggaaagtgctgcctaagagcttcctgcgatctatgggccagtgggctgtgattactggggcgggtgacggaatcggaaaggcgtatagcttcgaactcgccaagagaggactcaatgtggtgctaattagcaggacactcgaaaagttggaagcaattgctaccgagattgaaagaactaccggcagaagcgtgaagattatccaggctgatttcaccaaagacgatatctacgaacacatcaaagagaagttagctggactggagataggcatcctggtgaataacgtgggcatgctgccaaatctactgccgtcccactttctgaatgcccccgacgagatccagtctctgattcactgcaacataacgtccgtggtgaaaatgactcagctgatcctgaagcatatggaaagtcggcagaagggcctgatactgaacatctcatccggcatcgccctttttccatggccactttactccatgtattcagcctcgaaggcctttgtgtgtgcgttttcgaaggctttacaggaagaatacaaagccaaagaagttattattcaagtgctgactccttatgccgtgtctaccgctatgacaaagtacctcaatacgaatgtgatcacgaaaaccgcggatgaatttgtgaaagaatctttgaactacgttactatcgggggggaaacatgcggctgcctggctcatgaaattctggcaggattcttgtcactcatccccgcctgggcgttctattcgggtgctttccagcgcctgttactgacccactacgtcgcttatctaaagcttaacacaaaggtgaggtag

SEQ ID NO: 4151 - DNA, 783 bp, Artificial Sequence
  derived and/or modified sequence
atgggggacgtgctcgagcagttttttattttaactgggctgttggtgtgcctggcttgtcttgccaagtgcgtgagattcagtaggtgtgtactgttgaactactggaaggtgcttccaaaaagcttcctgcgatctatgggacaatgggcagttattaccggggcaggcgacggcattgggaaggcctactctttcgaactggctaagcgagggctcaatgtcgtgcttatttcccgcacgctggagaagcttgaagccatagccactgagatcgagcgcacaacaggaaggtcggttaagatcatacaggctgacttcacgaaggatgatatttacgagcacataaaggagaagcttgctggccttgagatcgggattttagtgaacaacgtcgggatgctgccgaatctgctgccaagccattttttgaacgcacctgacgagatccagtctcttatccattgtaacattaccagcgtagttaaaatgactcagctgattctcaagcatatggagtcacggcagaaaggtctgatcctcaatatctcttcagggatcgctctgttcccctggcccctttacagtatgtatagcgcttctaaggctttcgtatgtgctttttccaaagccctgcaggaggaatataaggctaaggaagtgataattcaagccggatttctgtccctgatacccgcttgggcgttctacagcggtgcctttcagagacttcttttgacgcactatgtggcctatctgaagctcaacaccaaggtgaggtag

SEQ ID NO: 4152 - DNA, 933 bp, Artificial Sequence
  derived and/or modified sequence
atgggcgatgtgctggaacagtttttcattcttacaggattgctcgtctgcctagcttgcctagctaagtgcgtccgattctcacgctgcgtcctcctgaactactggaaggtattgccaaagtcattcctgaggagcatggggcaatgggcagtgatcacaggtgccggagatggaatcggcaaggcctactctttcgaacttgcaaagagaggactgaatgtggtcttgatctccaggacgttggagaaactcgaagcaattgcaacagagattgagaggacaaccggcagaagcgtcaagattattcaggccgacttcacaaaggacgacatctatgagcatatcaaggagaaattagcgggactggagatcgggattctggtcaacaatgtgggtatgctccccaacctcctgccatcacactttcttaacgccccagatgagatccagtcactgatccattgtaacatcaccagcgtcgtgaagatgacgcagctgatcctgaagcacatggaaagtcgccaaaaggggcttattttaaatatatcctcaggcatagcgctgttcccgtggcccctctactctatgtactctgcaagcaaggccttcgtgtgcgcctttagtaaagccttacaggaagagtacaaggccaaagaggttatcatacaagtgcttactccctacgcggtgtccacagctatgaccaagtacctaaacaccaatgtgatcacaaaaacagcggatgaatttgtgaaggaatctttgaattacgtgacaatcggcggtgagacgtgcggatgcctggctcatgaaatccttgctggctttctaagtctcattccagcctgggccttctactctggggctttccaacgcctgctgctgactcactacgtcgcctatctgaagctcaacaccaaagtaaggtag

SEQ ID NO: 4153 - DNA, 783 bp, Artificial Sequence
  derived and/or modified sequence
atgggcgacgtgctggagcagttcttcatcctgaccggcctgctggtgtgcctggcctgcctggccaagtgcgtgagattcagcagatgcgtgctgctgaactactggaaggtgctgcccaagagcttcctgagaagcatgggccagtgggccgtgatcaccggcgccggcgacggcatcggcaaggcctacagcttcgagctggccaagagaggcctgaacgtggtgctgatcagcagaaccctggagaagctggaggccatcgccaccgagatcgagagaaccaccggcagaagcgtgaagatcatccaggccgacttcaccaaggacgacatctacgagcacatcaaggagaagctggccggcctggagatcggcatcctggtgaacaacgtgggcatgctgcccaacctgctgcccagccacttcctgaacgcccccgacgagatccagagcctgatccactgcaacatcaccagcgtggtgaagatgacccagctgatcctgaagcacatggagagcagacagaagggcctgatcctgaacatcagcagcggcatcgccctgttcccctggcccctgtacagcatgtacagcgccagcaaggccttcgtgtgcgccttcagcaaggccctgcaggaggagtacaaggccaaggaggtgatcatccaggccggcttcctgagcctgatccccgcctgggccttctacagcggcgccttccagagactgctgctgacccactacgtggcctacctgaagctgaacaccaaggtgagatag

SEQ ID NO: 4154 - DNA, 933 bp, Artificial Sequence
  derived and/or modified sequence
atgggcgacgtgctggagcagttcttcatcctgaccggcctgctggtgtgcctggcctgcctggccaagtgcgtgagattcagcagatgcgtgctgctgaactactggaaggtgctgcccaagagcttcctgagaagcatgggccagtgggccgtgatcaccggcgccggcgacggcatcggcaaggcctacagcttcgagctggccaagagaggcctgaacgtggtgctgatcagcagaaccctggagaagctggaggccatcgccaccgagatcgagagaaccaccggcagaagcgtgaagatcatccaggccgacttcaccaaggacgacatctacgagcacatcaaggagaagctggccggcctggagatcggcatcctggtgaacaacgtgggcatgctgcccaacctgctgcccagccacttcctgaacgcccccgacgagatccagagcctgatccactgcaacatcaccagcgtggtgaagatgacccagctgatcctgaagcacatggagagcagacagaagggcctgatcctgaacatcagcagcggcatcgccctgttcccctggcccctgtacagcatgtacagcgccagcaaggccttcgtgtgcgccttcagcaaggccctgcaggaggagtacaaggccaaggaggtgatcatccaggtgctgaccccctacgccgtgagcaccgccatgaccaagtacctgaacaccaacgtgatcaccaagaccgccgacgagttcgtgaaggagagcctgaactacgtgaccatcggcggcgagacctgcggctgcctggcccacgagatcctggccggcttcctgagcctgatccccgcctgggccttctacagcggcgccttccagagactgctgctgacccactacgtggcctacctgaagctgaacaccaaggtgagatag

SEQ ID NO: 4155 - protein, 502 aa, Artificial Sequence
  derived and/or modified sequence
MSCPVPACCALLLVLGLCRARPRNALLLLADDGGFESGAYNNSAIATPHLDALARRSLLFRNAFTSVSSCSPSRASLLTGLPQHQNGMYGLHQDVHHFNSFDKVRSLPLLLSQAGVRTGIIGKKHVGPETVYPFDFAYTEENGSVLQVGRNITRIKLLVRKFLQTQDDRPFFLYVAFHDPHRCGHSQPQYGTFCEKFGNGESGMGRIPDWTPQAYDPLDVLVPYFVPNTPAARADLAAQYTTVGRMDQGVGLVLQELRDAGVLNDTLVIFTSDNGIPFPSGRTNLYWPGTAEPLLVSSPEHPKRWGQVSEAYVSLLDLTPTILDWFSIPYPSYAIFGSKTIHLTGRSLLPALEAEPLWATVFGSQSHHEVTMSYPMRSVQHRHFRLVHNLNFKMPFPIDQDFYVSPTFQDLLNRTTAGQPTGWYKDLRHYYYRARWELYDRSRDPHETQNLATDPRFAQLLEMLRDQLAKWQWETHDPWVCAPDGVLEEKLSPQCQPLHNEL

SEQ ID NO: 4156 - protein, 299 aa, Artificial Sequence
  derived and/or modified sequence
MGRIPDWTPQAYDPLDVLVPYFVPNTPAARADLAAQYTTVGRMDQGVGLVLQELRDAGVLNDTLVIFTSDNGIPFPSGRTNLYWPGTAEPLLVSSPEHPKRWGQVSEAYVSLLDLTPTILDWFSIPYPSYAIFGSKTIHLTGRSLLPALEAEPLWATVFGSQSHHEVTMSYPMRSVQHRHFRLVHNLNFKMPFPIDQDFYVSPTFQDLLNRTTAGQPTGWYKDLRHYYYRARWELYDRSRDPHETQNLATDPRFAQLLEMLRDQLAKWQWETHDPWVCAPDGVLEEKLSPQCQPLHNEL

SEQ ID NO: 4157 - DNA, 1509 bp, Artificial Sequence
  derived and/or modified sequence
atgagctgtccagtgccagcctgctgcgccctgctcttagttctcggcctgtgccgggccagaccaaggaacgctctgttgctgttggccgacgacgggggtttcgagtctggcgcttataacaattcagccatagcaaccccgcatctggacgctctggccagaaggagtctgctattcaggaacgcttttacctctgtctcctcatgcagcccctctcgggctagtctgcttacaggtctgccccaacaccaaaatgggatgtatggcttgcaccaggatgtgcaccattttaactcctttgataaggtgcggtcccttcctctgcttctgtcccaggctggcgtgagaacaggcatcattggaaagaagcacgtcggcccggaaacggtttaccccttcgactttgcgtacacagaggagaatggttcagtcctgcaggtaggccgtaacatcactcgcatcaaactcctggtaaggaagttcttgcaaacgcaggatgatcgccccttctttctgtacgtggccttccatgatccacacaggtgtggtcactctcaacctcagtacgggaccttttgcgaaaaatttgggaacggagagtccggtatgggtaggatcccagactggacgccacaggcatatgatccactggatgtcctcgtgccatatttcgtgccaaacacccccgccgcccgcgctgacttggcagctcagtataccaccgtagggcgcatggatcagggtgtggggctggtccttcaagagctcagagacgcaggagttctgaatgacactctggttatttttacttcagataacgggatccccttcccttccggccgcacaaacctgtattggccaggtacggctgagccgctgcttgtatcttcccctgaacatccaaagcggtggggacaggtctcggaggcttatgtatctcttctcgacttaacaccgacaattcttgattggtttagtattccgtatcctagttacgccatcttcggcagcaaaacaatacacctgactggtaggtccttgttaccagcattagaagccgagcccttatgggcgacagtattcgggtcgcagtcccatcacgaagtgaccatgtcttatccgatgcgtagcgtacagcatcgccactttcgtttagtgcataatttgaactttaaaatgccattccccattgatcaagacttttacgtctccccaacattccaagatctgcttaacaggacaacagcaggacaacccactggatggtacaaggatttgcggcattattattaccgagcgcggtgggagctttacgaccgctccagagacccacatgagacacaaaacctggccaccgacccgcggttcgctcagcttctggagatgctccgggaccagctcgccaagtggcagtgggagactcacgatccctgggtatgcgctcccgatggcgtactggaagaaaagctgtctccccagtgccagcctctgcacaatgaactgtag

SEQ ID NO: 4158 - DNA, 900 bp, Artificial Sequence
  derived and/or modified sequence
atgggccggattccggactggacaccacaggcgtacgatcccctcgatgtgcttgtgccatacttcgtgccaaacacgcccgctgctagggctgacctggcagctcagtataccaccgtcggtagaatggaccagggggtgggcctggtgttgcaagaacttagagatgccggtgtactgaacgacaccctggtaatattcacctcagacaatggaataccttttcctagcggccgcactaacttgtattggcctggtaccgccgaacccctgttggtttcttcaccggagcaccccaaacgctgggggcaggtgtctgaagcttatgtatctctgttggacctgacacctacaatcctagattggttctccatcccttacccttcatacgcaatctttgggagtaaaacgatccacctgactgggcggagcttgctgcctgctttggaagccgagcccttatgggcaactgtctttggaagtcagagccaccatgaggtgactatgagttaccccatgcgaagtgtacagcacagacattttcggctggtgcacaacctaaatttcaagatgcctttccctatcgatcaggacttctacgtgtcacctacttttcaggatctgcttaatcgcacaaccgccgggcaaccgaccggttggtataaggatctacgccattattattatagggctcgatgggagctttacgaccggagtagggatccgcacgagacccagaacctagcaaccgacccacggttcgctcagctgctggaaatgctgcgtgaccagcttgcaaaatggcagtgggaaacgcatgatccctgggtctgcgcccccgacggagttctcgaggagaaactgtcccctcagtgccagcccctgcacaacgaactgtag

SEQ ID NO: 4159 - DNA, 1509 bp, Artificial Sequence
  derived and/or modified sequence
atgagctgccctgtgcctgcctgctgtgccctgctgctggtgctgggcctgtgccgggcccggcccagaaatgccctgctgctgctggctgatgatggcggctttgaaagtggggcctacaacaacagcgccatcgccaccccccacctggatgccctggcccggcgcagcctgctcttcagaaatgccttcacctctgtgagcagctgcagccccagccgggccagcctgctgaccggcctgccccagcaccagaatggcatgtatggcctgcaccaggatgtgcaccacttcaacagctttgacaaggtgcgcagcctgcccctgctgctgagccaggccggcgtgaggacaggcatcatcggcaagaagcacgtgggccctgagaccgtgtacccctttgattttgcctacacagaagaaaatggatctgtgctgcaggtgggcaggaacatcacccgcatcaagctgctggtgaggaagttcctgcagacccaggatgaccggcccttcttcctgtatgtggccttccatgacccccaccgctgtggccacagccagccccagtatggcaccttctgtgagaagtttggaaatggagagagcggcatgggccgcatcccagactggaccccccaggcctatgaccccctggatgtgctggtgccctactttgtgcccaacaccccagctgcccgggctgacctggccgcccagtacaccaccgtgggccgcatggaccagggcgtgggcctggtgctgcaggagctgagagatgctggggtgctgaatgacaccctggtgatcttcaccagtgacaatggcatccccttccccagcggccgcaccaacctgtactggccaggcacagctgagcccctgctggtgagcagccctgagcaccccaagcgctggggccaggtgtctgaggcctacgtgtccctgctggacctgacccccaccatcctggactggttcagcatcccctaccccagctatgccatcttcggcagcaagaccatccacctgaccggccgcagcctgctgcctgccctggaggccgagcccctgtgggccaccgtgtttggcagccagagccaccacgaggtgaccatgagctaccccatgaggtctgtgcagcaccgccacttccggctggtgcacaacctgaacttcaagatgcccttccccatcgaccaggacttctacgtgagccccaccttccaggacctgctgaacagaaccacagctggccagcccaccggctggtacaaggacctgcggcactactactaccgggcccgctgggagctgtatgacaggagccgggacccccatgagacccagaacctggccacagaccccaggtttgcccagctgctggagatgctgcgggaccagctggccaagtggcagtgggagacccatgacccctgggtgtgtgccccagatggagtgctggaggagaagctgagcccccagtgccagcccctgcacaatgagctgtag

SEQ ID NO: 4160 - DNA, 900 bp, Artificial Sequence
  derived and/or modified sequence
atgggccgcatcccagactggaccccccaggcctatgaccccctggatgtgctggtgccctactttgtgcccaacaccccagctgcccgggctgacctggccgcccagtacaccaccgtgggccgcatggaccagggcgtgggcctggtgctgcaggagctgagagatgctggggtgctgaatgacaccctggtgatcttcaccagtgacaatggcatccccttccccagcggccgcaccaacctgtactggccaggcacagctgagcccctgctggtgagcagccctgagcaccccaagcgctggggccaggtgtctgaggcctacgtgtccctgctggacctgacccccaccatcctggactggttcagcatcccctaccccagctatgccatcttcggcagcaagaccatccacctgaccggccgcagcctgctgcctgccctggaggccgagcccctgtgggccaccgtgtttggcagccagagccaccacgaggtgaccatgagctaccccatgaggtctgtgcagcaccgccacttccggctggtgcacaacctgaacttcaagatgcccttccccatcgaccaggacttctacgtgagccccaccttccaggacctgctgaacagaaccacagctggccagcccaccggctggtacaaggacctgcggcactactactaccgggcccgctgggagctgtatgacaggagccgggacccccatgagacccagaacctggccacagaccccaggtttgcccagctgctggagatgctgcgggaccagctggccaagtggcagtgggagacccatgacccctgggtgtgtgccccagatggagtgctggaggagaagctgagcccccagtgccagcccctgcacaatgagctgtag

SEQ ID NO: 4161 - DNA, 1509 bp, Artificial Sequence
  derived and/or modified sequence
atgagctgccccgtgcccgcctgctgcgccctgctgctggtgctgggcctctgccgggcgcggccaaggaacgctctcctgctgctagcagacgatggaggatttgaatccggcgcatacaacaactctgccatcgcaacacctcatctggacgctctggcccgccggagcctgctttttaggaatgccttcacctccgtatccagttgttctcccagtcgggctagtttactcaccgggctgccccagcatcagaacggtatgtatggtctgcaccaggacgttcatcattttaacagcttcgacaaagtgcggtctcttccattgttgttgagccaggccggggtgagaaccggcattataggcaaaaaacatgtcggccctgaaacggtttatccatttgacttcgcatatacggaagagaacggaagtgtacttcaggtgggacggaacatcactcggatcaagctgcttgttaggaaattcctccaaactcaggacgataggccatttttcctatatgtcgcttttcacgacccccacaggtgcggacattcccagccccagtatggaactttctgtgagaagtttggcaacggagagtctggaatgggccgcatccccgactggactccccaggcctacgatcctctggacgtgttggttccttacttcgtgcccaacactccagctgcgcgggccgatttggctgcgcagtatacaactgtgggcaggatggatcaaggcgtggggctggttctacaagaactgagagatgccggcgttctcaacgacactctggttattttcacttccgacaatggcatccccttcccaagcgggcggaccaatctatactggcctggtacagcagaacctttgctcgtctctagcccagaacatccgaaaaggtggggccaagtcagtgaagcatacgtctcactgctcgatcttactcccaccattttggactggttttctatcccatatcccagctacgctatattcggtagcaaaacaattcatctcacgggcaggagcctgttgcctgctttagaggcagaacccctgtgggccactgttttcggtagccagagccatcacgaagtcactatgagctatcctatgagaagtgttcagcatcgacattttcgcctcgtgcacaatctcaattttaaaatgcccttcccaattgaccaggacttttatgtgagccctacgttccaggacctcctgaatcgaactaccgcagggcagcctaccgggtggtataaggacctccgccactactattaccgtgcaagatgggaactatacgatcggtcaagggacccccatgagactcaaaatctggccactgacccgaggttcgcacagcttctcgaaatgcttcgagaccagctcgccaagtggcaatgggaaacacatgatccatgggtatgtgcacctgacggtgtactggaggagaagctttctcctcaatgccagccccttcacaatgagctttag

SEQ ID NO: 4162 - DNA, 900 bp, Artificial Sequence
  derived and/or modified sequence
atgggccggatccccgactggaccccccaggcctacgaccccctggatgtgctggtaccttacttcgtgcccaatactccagccgctcgtgccgacttagccgcccaatacaccaccgtggggaggatggaccagggggtggggttggttctgcaggaactcagggacgccggagtgctaaatgatacactagtgatctttacctcggacaacggtattcccttcccatctggcaggaccaatctctactggcccggaaccgccgaacctctcctcgtgtcttctccggaacatcctaagcgatggggccaagtgtccgaggcttatgtgtccctactggacctgacaccaacaatcctggactggttttccatcccctatccatcttatgccatctttggctcaaaaaccattcacctgacggggcgctcgcttctcccagcactggaggccgaacctctctgggctacagtctttgggtcccaatcacatcacgaggtgaccatgagctaccctatgagaagtgtgcagcatagacactttcggcttgtacataacttgaattttaaaatgccatttccaatagaccaggatttctacgtgagtcccacgttccaggacctgttaaaccgtactacagcaggacagccaacaggttggtataaagatctccgccactattactatcgtgcacggtgggaactttatgaccgcagcagagatccccatgagactcagaacttggccactgaccccaggttcgctcaactgctagagatgctccgcgatcagctggcgaaatggcagtgggagactcatgacccgtgggtatgcgcccccgatggggtccttgaagaaaaactcagtccacagtgccagcccctacacaatgaactgtag

SEQ ID NO: 4163 - DNA, 2768 bp, Artificial Sequence
  derived and/or modified sequence
gaccggggtcggggcagggggcggggccgagcgggagaccagagagccggagccggatcccgatcccgagtccgagccgccgccgccatgagctgccccgtgcccgcctgctgcgcgctgctgctagtcctggggctctgccgggcgcgtccccggaacgcactgctgctcctcgcggatgacggaggctttgagagtggcgcgtacaacaacagcgccatcgccaccccgcacctggacgccttggcccgccgcagcctcctctttcgcaatgccttcacctcggtcagcagctgctctcccagccgcgccagcctcctcactggcctgccccagcatcagaatgggatgtacgggctgcaccaggacgtgcaccacttcaactccttcgacaaggtgcggagcctgccgctgctgctcagccaagctggtgtgcgcacaggcatcatcgggaagaagcacgtggggccggagaccgtgtacccgtttgactttgcgtacacggaggagaatggctccgtcctccaggtggggcggaacatcactagaattaagctgctcgtccggaaattcctgcagactcaggatgaccggcctttcttcctctacgtcgccttccacgacccccaccgctgtgggcactcccagccccagtacggaaccttctgtgagaagtttggcaacggagagagcggcatgggtcgtatcccagactggaccccccaggcctacgacccactggacgtgctggtgccttacttcgtccccaacaccccggcagcccgagccgacctggccgctcagtacaccaccgtcggccgcatggaccaaggagttggactggtgctccaggagctgcgtgacgccggtgtcctgaacgacacactggtgatcttcacgtccgacaacgggatccccttccccagcggcaggaccaacctgtactggccgggcactgctgaacccttactggtgtcatccccggagcacccaaaacgctggggccaagtcagcgaggcctacgtgagcctcctagacctcacgcccaccatcttggattggttctcgatcccgtaccccagctacgccatctttggctcgaagaccatccacctcactggccggtccctcctgccggcgctggaggccgagcccctctgggccaccgtctttggcagccagagccaccacgaggtcaccatgtcctaccccatgcgctccgtgcagcaccggcacttccgcctcgtgcacaacctcaacttcaagatgccctttcccatcgaccaggacttctacgtctcacccaccttccaggacctcctgaaccgcaccacagctggtcagcccacgggctggtacaaggacctccgtcattactactaccgggcgcgctgggagctctacgaccggagccgggacccccacgagacccagaacctggccaccgacccgcgctttgctcagcttctggagatgcttcgggaccagctggccaagtggcagtgggagacccacgacccctgggtgtgcgcccccgacggcgtcctggaggagaagctctctccccagtgccagcccctccacaatgagctgtgaccatcccaggaggcctgtgcacacatcccaggcatgtcccagacacatcccacacgtgtccgtgtggccggccagcctggggagtagtggcaacagcccttccgtccacactcccatccaaggagggttcttccttcctgtggggtcactcttgccattgcctggagggggaccagagcatgtgaccagagcatgtgcccagcccctccaccaccaggggcactgccgtcatggcaggggacacagttgtccttgtgtctgaaccatgtcccagcacgggaattctagacatacgtggtctgcggacagggcagcgcccccagcccatgacaagggagtcttgttttctggcttggtttggggacctgcaaatgggaggcctgaggccctcttcaggctttggcagccacagatacttctgaacccttcacagagagcaggcaggggcttcggtgccgcgtgggcagtacgcaggtcccaccgacactcacctgggagcacggcgcctggctcttaccagcgtctggcctagaggaagcctttgagcgacctttgggcaggtttctgcttcttctgttttgccccatggtcaagtccctgttccccaggcaggtttcagctgattggcagcaggctccctgagtgatgagcttgaacctgtggtgtttctgggcagaagcttatcttttttgagagtgtccgaagatgaaggcatggcgatgcccgtcctctggcttgggttaattcttcggtgacactggcattgctgggtggtgatgcccgtcctctggcttgggttaattcttcggtgacactggcgttgctgggtggcaatgcccatcctctgccttgggttaattcttcggtgacactggcgttgctgggtggcgatgcccgtcctctggcttgggttaattcttggatgacgtcggcgttgctgggagaatgtgccgttcctgccctgcctccacccacctcgggagcagaagcccggcctggacacccctcggcctggacacccctcgaaggagagggcgcttccttgagtaggtgggctccccttgcccttccctccctatcactccatactggggtgggctggaggaggccacaggccagctattgtaaaagctttttattttagtaaaatatacagaagttctttttctgaa

SEQ ID NO: 4164 - DNA, 2612 bp, Artificial Sequence
  derived and/or modified sequence
agagagccggagccggatcccgatcccgagtccgagccgccgccgccatgagctgccccgtgcccgcctgctgcgcgctgctgctagtcctggggctctgccgggcgcgtccccggaacgcactgctgctcctcgcggatgacggaggctttgagagtggcgcgtacaacaacagcgccatcgccaccccgcacctggacgccttggcccgccgcagcctcctctttcgcaatgccttcacctcggtcagcagctgctctcccagccgcgccagcctcctcactggcctgccccaggcatcatcgggaagaagcacgtggggccggagaccgtgtacccgtttgactttgcgtacacggaggagaatggctccgtcctccaggtggggcggaacatcactagaattaagctgctcgtccggaaattcctgcagactcaggatgaccggcctttcttcctctacgtcgccttccacgacccccaccgctgtgggcactcccagccccagtacggaaccttctgtgagaagtttggcaacggagagagcggcatgggtcgtatcccagactggaccccccaggcctacgacccactggacgtgctggtgccttacttcgtccccaacaccccggcagcccgagccgacctggccgctcagtacaccaccgtcggccgcatggaccaaggagttggactggtgctccaggagctgcgtgacgccggtgtcctgaacgacacactggtgatcttcacgtccgacaacgggatccccttccccagcggcaggaccaacctgtactggccgggcactgctgaacccttactggtgtcatccccggagcacccaaaacgctggggccaagtcagcgaggcctacgtgagcctcctagacctcacgcccaccatcttggattggttctcgatcccgtaccccagctacgccatctttggctcgaagaccatccacctcactggccggtccctcctgccggcgctggaggccgagcccctctgggccaccgtctttggcagccagagccaccacgaggtcaccatgtcctaccccatgcgctccgtgcagcaccggcacttccgcctcgtgcacaacctcaacttcaagatgccctttcccatcgaccaggacttctacgtctcacccaccttccaggacctcctgaaccgcaccacagctggtcagcccacgggctggtacaaggacctccgtcattactactaccgggcgcgctgggagctctacgaccggagccgggacccccacgagacccagaacctggccaccgacccgcgctttgctcagcttctggagatgcttcgggaccagctggccaagtggcagtgggagacccacgacccctgggtgtgcgcccccgacggcgtcctggaggagaagctctctccccagtgccagcccctccacaatgagctgtgaccatcccaggaggcctgtgcacacatcccaggcatgtcccagacacatcccacacgtgtccgtgtggccggccagcctggggagtagtggcaacagcccttccgtccacactcccatccaaggagggttcttccttcctgtggggtcactcttgccattgcctggagggggaccagagcatgtgaccagagcatgtgcccagcccctccaccaccaggggcactgccgtcatggcaggggacacagttgtccttgtgtctgaaccatgtcccagcacgggaattctagacatacgtggtctgcggacagggcagcgcccccagcccatgacaagggagtcttgttttctggcttggtttggggacctgcaaatgggaggcctgaggccctcttcaggctttggcagccacagatacttctgaacccttcacagagagcaggcaggggcttcggtgccgcgtgggcagtacgcaggtcccaccgacactcacctgggagcacggcgcctggctcttaccagcgtctggcctagaggaagcctttgagcgacctttgggcaggtttctgcttcttctgttttgccccatggtcaagtccctgttccccaggcaggtttcagctgattggcagcaggctccctgagtgatgagcttgaacctgtggtgtttctgggcagaagcttatcttttttgagagtgtccgaagatgaaggcatggcgatgcccgtcctctggcttgggttaattcttcggtgacactggcattgctgggtggtgatgcccgtcctctggcttgggttaattcttcggtgacactggcgttgctgggtggcaatgcccatcctctgccttgggttaattcttcggtgacactggcgttgctgggtggcgatgcccgtcctctggcttgggttaattcttggatgacgtcggcgttgctgggagaatgtgccgttcctgccctgcctccacccacctcgggagcagaagcccggcctggacacccctcggcctggacacccctcgaaggagagggcgcttccttgagtaggtgggctccccttgcccttccctccctatcactccatactggggtgggctggaggaggccacaggccagctattgtaaaagctttttattttagtaaaatatacagaagttc

SEQ ID NO: 4165 - DNA, 1509 bp, Artificial Sequence
  derived and/or modified sequence
atgagttgccctgtacctgcatgctgtgctttattattagtactgggactttgtagagcacgcccacgcaacgctctactcttgctggcagacgacggcggattcgaatcaggagcgtataataactccgccattgccaccccccacttggacgctctggctcgcaggagcttactttttcgcaacgcattcacgtcagtcagttcctgctcgccctctcgagcatccctactcacaggtctacctcagcaccagaacggcatgtatggcctccatcaggatgtgcaccattttaactcttttgacaaggtcagaagcttgcccctgttactgagccaggccggtgtccgaactggcattattggaaagaaacacgtcggccctgagaccgtataccccttcgatttcgcttatactgaggaaaatgggagtgtcctccaggtcggcaggaacattacaaggattaagctgctagtgcgcaaatttctgcaaactcaggatgaccgcccttttttcctgtacgtcgcattccatgaccctcatcgttgcggccacagtcagccccagtacggcacattttgcgaaaagtttggtaatggcgaatctggcatgggacggatcccagactggactcctcaggcatacgatccactcgatgttcttgtgccttactttgtacccaacacccccgcagccagagcggatctggcagctcagtatacaactgtcggaagaatggaccagggggttggccttgtgctccaggaactgcgagatgcgggagtgttgaatgatacactggtaatttttacctctgacaacggaatccccttcccttctggaagaacaaacctgtactggcctggtacagccgagccccttctggtcagtagccccgaacaccccaagagatggggacaggtctctgaggcctacgtgagcctgctggatttgacacctacaattctggactggttcagcataccatatccgtcctatgctatattcggctctaagacaatccatctgacaggccgatctttgcttccagccctggaggctgaacctttgtgggcaacggtgttcggcagccaatctcaccatgaggtaaccatgtcctatcctatgagaagcgtacagcatcgacattttcgactggtacacaatcttaactttaagatgcccttcccaattgaccaagatttctacgtgtcccccacgttccaggatctgctgaaccgaacgaccgcaggccagcccactggttggtataaagacctcagacattactactatagagctcgctgggagctctacgaccgatcccgggacccacacgaaactcagaatctggccaccgaccccaggttcgcccaacttctggagatgttacgggaccagcttgcaaagtggcagtgggagacccatgacccctgggtgtgcgcgcctgacggtgtgcttgaggagaagctcagcccccagtgccagcctctgcacaacgagctgtag

SEQ ID NO: 4166 - DNA, 900 bp, Artificial Sequence
  derived and/or modified sequence
atgggccgaataccagactggactcctcaggcttacgatcctctggacgtcttagttccgtattttgtgcccaacaccccagccgcaagagcggatctggctgctcagtacacaacggttggcagaatggaccagggtgttgggcttgtgctccaggagctgcgagatgccggagttctgaacgatactcttgtcatctttactagtgacaatgggattccattcccctccggccgaaccaatctctattggccagggactgcggagcctcttctggtgtcaagccccgagcacccaaaaagatggggccaggtctccgaggcatacgtgagcctcttagatctgacgccaacaatcctggactggttctcgattccatacccgagctacgccatttttggcagcaagacaattcatctaacagggcgatcgctacttcccgctctggaggcggagcctctctgggcaacggtctttggatcgcagtcccaccatgaggttaccatgtcctatccaatgcgaagtgtgcaacaccgccactttaggttagtccacaacctgaacttcaaaatgcccttccccatagatcaggatttctatgtgtcccctacctttcaagatcttttgaaccggacaacagccggtcagccaaccgggtggtacaaggatctccgccactactactacagggccagatgggagctgtacgaccgcagtcgcgatccacacgagacccagaatctcgccaccgatcctaggttcgcccagcttctggagatgctacgcgatcagctcgccaagtggcaatgggagacacacgacccttgggtgtgtgccccagatggcgtcctcgaggagaagctaagccctcagtgtcagccactgcacaacgagctgtag

SEQ ID NO: 4167 - DNA, 1506 bp, Artificial Sequence
  derived and/or modified sequence
atgtcatgcccagtgccggcatgctgtgcgcttctgctggttctcggtctttgtagggcaaggccgagaaatgcgcttctcctccttgcagatgatggtggatttgaatccggtgcatacaataactcagccatcgcaacccctcatctggatgcactggcgcgcaggagcctgcttttcagaaacgcctttacgtccgtgtcgtcatgctcccctagccgggcatctctgctcaccggtctgcctcagcatcagaatggtatgtacggactccaccaggacgtgcaccatttcaattcgtttgataaagtgcggtcactgccccttcttctcagccaagcgggggttcgcaccgggattattggcaaaaaacatgttggtcccgagactgtgtacccgttcgactttgcttatactgaagaaaatggatcggtccttcaagtgggacgaaacatcacgcggatcaagctcctggtgagaaagtttctgcaaactcaggacgaccgtccttttttcctgtacgtggcgttccacgatccacaccgatgtggacactcgcaacctcagtacggcaccttttgtgaaaagttcggtaacggagagtcaggcatgggacgcatccccgactggactcctcaagcatacgatccactggacgtgctggtgccttactttgtgccgaacactcctgctgccagagcagatcttgccgcacagtacactactgtgggacggatggatcaaggcgtgggtttggttctccaagaactgagagacgctggggtcctgaacgacactctggtcatcttcaccagcgataacggtataccatttccctcggggcgaactaatttgtactggccaggtacggcagagccacttctggtttcatcacctgaacatcctaagcggtggggtcaagtgtcagaggcctacgtgagccttcttgatttgacgcctactattcttgactggttttccattccttacccttcgtacgcaatctttggatcgaaaaccatacacctcaccggccgcagcttgctcccagcgctggaagcagaacctctgtgggcaaccgtgtttggcagccagtcacaccacgaagtcaccatgtcctacccgatgcgttcggtccaacataggcattttaggcttgtgcataacctgaacttcaagatgccttttcctattgatcaagacttctacgtgtcccctacgttccaggacctcctgaatcggactaccgcggggcagccaaccggatggtacaaggacctgcggcactactattaccgtgctcgctgggagctttacgatcgaagcagagatccgcacgaaacccaaaacctggcaactgatccgcggtttgcccagcttttggagatgctgcgggatcaacttgcaaagtggcaatgggaaacgcatgatccttgggtgtgtgcaccagatggagtgcttgaagagaagctgtcgccccaatgtcaaccactgcataacgaactc

SEQ ID NO: 4168 - DNA, 1506 bp, Artificial Sequence
  derived and/or modified sequence
atgtcctgccctgttcccgcgtgttgtgccttgctgctggtcttggggctgtgtcgcgcacgtccgagaaacgccctgctgctcctggccgacgatggtggctttgagtccggtgcatataacaactccgccatcgcgaccccgcacctggatgccctggcgagacgctcgctcctgttcagaaatgcgttcacttcggtaagctcctgctccccttccagagccagcctgctgacaggcttgccccagcaccaaaatggcatgtatggactgcatcaggacgtccatcacttcaactccttcgacaaagtaagatccctacccctcctgctgtcgcaggccggagtccgcaccggtattatcggtaagaagcacgtcggcccagaaacggtttaccccttcgacttcgcctacactgaggagaacggatcggtactgcaggttggaagaaacatcacccgaatcaagttgctggtccgtaagttcctacaaactcaagacgaccgtccctttttcctttacgttgctttccacgatccccaccgctgtggacattctcagccccaatacggtaccttctgcgagaagttcggaaacggcgagagcggcatgggtcgcatccccgattggaccccccaagcctacgatccgctcgacgttctggtcccctacttcgtgcctaacactcccgccgcccgtgccgacctggctgctcagtacaccacagttggtaggatggatcagggcgtcggtttggtcctgcaggagctgagggacgccggtgtgctgaacgataccctcgtcatcttcacctccgataacggcattcctttcccgagtggtcgcaccaacctctattggcccggaaccgccgagccccttctggtgtcgtctcctgagcatcccaagagatggggacaggtgagcgaggcgtacgtatcacttctcgaccttaccccgacgatcctggactggttctccatcccctaccctagctacgccattttcggttctaaaaccatccatttgacaggacgatctcttctccccgctctcgaagctgagccgctctgggccacagtttttgggtcacaatcgcaccacgaggtcaccatgtcctaccctatgcgcagcgttcaacaccgtcacttccgtctggtccataacctcaacttcaaaatgcctttccccattgatcaagatttctacgtttcgccgaccttccaggacctcttgaatcggaccaccgccggccagcctacggggtggtataaggatctgcgccattactactatcgcgcgcgttgggaactctacgaccgttcccgcgacccacacgagactcagaaccttgctacggatccacggttcgctcagctcctagagatgttgcgggatcaattggctaagtggcagtgggagacgcacgacccttgggtgtgcgctcccgatggcgtactcgaggagaagctcagcccccagtgccagcctctgcataacgagctt

SEQ ID NO: 4169 - DNA, 1506 bp, Artificial Sequence
  derived and/or modified sequence
atgtcgtgtccagtccctgcctgctgcgcattgttattagtcttgggcctatgccgcgctaggcccagaaatgctctgctcttactcgcagacgatggtggtttcgaatccggggcatataacaacagtgctattgctacgccacatcttgatgcacttgctcggaggtcactgcttttccgaaacgcattcactagtgtttcaagttgttccccctccagggcttcactcttaactgggctgccacaacatcagaacggtatgtacggactgcaccaggatgttcatcatttcaacagttttgataaggtaaggagcttacctcttttgctttcccaagccggagtcaggactggtatcatcggaaagaaacacgttggtccagaaacagtctatccgtttgacttcgcttatacagaggagaatgggagtgtccttcaggttggcaggaatattacaagaatcaagctgcttgttagaaaatttctccaaacacaagacgataggccattcttcctttacgttgcttttcacgatcctcataggtgtgggcattcccagccacagtacggaactttctgtgagaaatttgggaacggagagtcaggtatgggtaggattccagattggactccacaggcctacgatcctttggatgtcctggtcccatatttcgtgcctaacactcccgctgcaagggcagatcttgctgcccagtacaccacggtgggaaggatggatcaaggagttgggctggtgcttcaagaacttagggacgcgggcgtgttgaacgacacattagtgatctttacctcagataacgggatcccattccccagtggacgaactaatctttactggccaggtaccgccgagcccttgttagtttcttcccctgaacatccgaagagatggggacaggtgtccgaagcttatgtctcattacttgatcttactcctaccattcttgattggttctcaatcccttaccctagctacgctatattcgggtctaagaccattcaccttacaggccgatccctgttaccagcacttgaagcagaacccctttgggcgaccgtcttcggatctcaaagccaccatgaggtcactatgagctatccaatgaggtccgtccagcatcgtcatttccgtcttgttcacaacttaaacttcaagatgccatttcccatcgatcaagacttttacgtgtcgccaactttccaggaccttcttaacaggacgactgcaggccagcctaccggctggtacaaggacctcaggcattattattacagagcacgatgggaattgtatgacaggtctagagatcctcatgaaactcaaaaccttgctacagatcctaggtttgcccaactgttggaaatgctccgcgatcagctggcaaaatggcagtgggaaacacacgatccctgggtctgcgctccagatggagtcttggaggaaaagttaagtcctcaatgccagccacttcataacgaactc

SEQ ID NO: 4170 - DNA, 1506 bp, Artificial Sequence
  derived and/or modified sequence
atgtcgtgtcccgtcccagcgtgttgtgcgctccttctggtcctgggcctgtgtcgtgcccgcccacgcaacgcgctccttctcctggccgatgatggtggttttgaatcgggtgcgtacaacaactccgcgatcgcaacccctcaccttgatgcacttgcacggagatcgcttcttttcaggaatgcctttaccagcgtctcgtcttgtagcccatcccgtgcaagccttctgacggggcttccccagcaccaaaacgggatgtacgggctccaccaggatgtgcatcactttaactcgttcgataaggtcaggagcctcccgctcctgcttagccaagcaggagtgcgcactgggatcatcggtaagaaacatgtgggccccgaaaccgtctaccctttcgattttgcatacactgaggaaaacggaagcgtcttgcaagtgggtagaaatatcacgagaatcaaacttctggtgcgcaagtttctgcaaacccaggacgaccgtcctttctttctttacgtggcattccatgatcctcataggtgtggacactcacagccccagtacgggactttctgtgaaaagtttggaaacggcgagagcggaatgggacggatcccagattggacccctcaggcatacgatcccctggatgtccttgtgccatactttgtccccaacactccagcggcccgcgccgatttggcagcacaatacacgaccgtgggaagaatggatcaaggtgtggggcttgtgcttcaggagttgcgcgacgctggcgtcctgaatgacactcttgtgatctttacctcggataacggtatcccatttccttccggaagaaccaacctgtactggcctggaaccgcagaacctctgctcgtctcttccccagagcatcctaagagatggggtcaagtgtcggaggcatacgtgtcgttgttggacctgacccctactatattggattggttttccatcccgtacccttcctacgcaattttcggttcaaaaactatccatctgactgggcgttccctgttgcctgcccttgaagcagagccactctgggccactgtgttcggatcacaatcccaccatgaagtgactatgagctacccaatgagatctgtgcaacacaggcattttagactggtccataatctcaactttaagatgccatttccgattgatcaggacttttacgtgtcacctacctttcaagatttgctgaaccgaactactgcaggacaacctaccggatggtataaggatctcagacactactactatcgggcacgatgggaactttatgataggtcgcgggatcctcacgagactcagaatcttgctactgacccacggtttgcacaactccttgaaatgctgcgcgaccagcttgctaagtggcagtgggagacgcacgatccttgggtctgtgcaccagacggtgtgctggaagaaaagctctcccctcagtgccaaccactgcacaacgaactc

SEQ ID NO: 4171 - DNA, 1506 bp, Artificial Sequence
  derived and/or modified sequence
atgtcctgtcctgtaccagcctgctgcgccctcctgttggttctggggctttgtagggcccgaccgcggaacgctctcctgctgctggccgacgatggtgggttcgaatcaggagcatacaacaactcggctatcgcgacgcctcacctcgacgcgcttgcgcgcagatcactgcttttccgcaatgccttcacttctgtgagctcatgctccccctcaagggcctcattgctgaccggactccctcagcaccagaatggaatgtacgggctgcaccaggacgtgcatcacttcaactcgtttgacaaagtgagaagcctccctctgcttttgagccaggcaggagtgcggaccggaatcataggaaaaaagcatgtgggaccagagactgtctacccgttcgatttcgcctacactgaggagaatggctcggttcttcaggtcggacggaacatcacccgtatcaagctcctggtgagaaagttcctgcagacccaagacgaccgcccgttttttctgtacgtggcctttcatgacccgcaccgctgcggacactcccagccacagtacggtacgttttgtgaaaagttcggaaacggagaatccgggatggggcggatcccggattggacgcctcaagcctacgacccgctggacgtgcttgtgccgtatttcgtgccaaacaccccagcggcacgcgcggaccttgctgcacagtatactaccgtgggaagaatggatcaaggcgtcggccttgtactgcaggaactccgggacgctggagtcctgaacgatactctggtgatctttacctcggataacggcatccccttcccttccggcaggactaatctgtactggccaggcaccgcagaaccactcctcgtctcatcgccggagcaccctaagcgctgggggcaagtatcagaagcgtacgtctcgctgctggacctcactccgactattttggactggtttagcattccgtatcctagctacgccatcttcgggagcaaaaccattcatctgactggccgctccctgctgccagccctcgaagccgaaccgctgtgggctaccgtgttcggctcgcaatcgcaccacgaggtgactatgtcctacccgatgagaagcgtgcaacaccgacacttccgcctggtccataatctgaacttcaaaatgcctttcccgatcgatcaggacttttacgtctcacctaccttccaagatttgttgaaccggaccactgcgggtcaaccgactggctggtacaaggacctgcggcactactactaccgggcaagatgggaattgtacgaccggtccagagatccgcatgagactcaaaatctggcgaccgatccaaggttcgcacagctgttggagatgcttcgcgatcagctggccaagtggcagtgggaaacccatgatccctgggtgtgcgctccggacggtgtgctggaagaaaagctgtcaccacaatgccagcccctccataatgagctc

SEQ ID NO: 4172 - DNA, 1506 bp, Artificial Sequence
  derived and/or modified sequence
atgtcatgccccgtgcctgcctgttgtgccctgctgctggtgcttgggctttgccgcgcaagaccccgaaacgccctccttttgctggccgacgacggcggattcgagtccggcgcctacaataactcagcaatcgccactccacacctggatgcgcttgccaggcggtccctgctgttcaggaatgcctttacctcagtgtcgagctgtagtccatctcgggccagcctactgacaggcctaccccagcaccagaacggaatgtacggtcttcatcaagacgttcatcatttcaactctttcgataaagttcggagcttgcctctcctcctgtcacaggcaggggtcagaactggcatcataggaaagaagcatgtgggccctgagaccgtatacccgttcgactttgcgtacacagaggagaatggtagcgtgctgcaggtcggtaggaacatcacgcggattaaacttctggttagaaagtttttgcagacccaggatgatcggcccttttttctgtatgttgcatttcatgacccgcataggtgtgggcactcacaacctcaatacgggaccttttgtgagaagtttggcaatggcgaatccggcatggggagaattccggattggactcctcaggcttatgacccacttgacgtacttgtgccatatttcgtaccaaatacgccagccgcaagggcggatctcgcggcacaatacactacagtcggcagaatggatcaaggagttggactggtgctgcaggagctgcgcgacgcgggcgtgctgaacgacacgctggtcatttttacatccgacaatggtattcccttcccctctgggagaaccaatctctactggccaggcaccgcagagcccctgcttgtgagctcacctgaacacccaaagagatggggccaggtgagcgaggcatatgtgtctcttctggacctgacccctaccattctggactggttttcaattccttacccatcatatgccatcttcggatccaagacgattcatctcactggccgctcacttctccccgccctggaggctgagcctttgtgggccaccgtcttcggctctcagagtcatcacgaagtcacgatgagttatcctatgaggtctgtccagcacagacacttcagactcgttcacaacttgaatttcaaaatgccttttcccattgatcaggacttctatgtctcacccacctttcaagacctactcaataggaccaccgccgggcagccgaccggatggtataaggatctgagacactactactacagggcacgctgggaattgtacgatagaagccgcgacccacatgagacacaaaatctggcaaccgaccctagatttgcacagcttctggagatgttgcgggatcagctcgctaagtggcaatgggagacacacgatccatgggtctgtgcacccgatggggtgctcgaggaaaaactgtctcctcagtgtcagcccttgcacaatgaactg

SEQ ID NO: 4173 - DNA, 1506 bp, Artificial Sequence
  derived and/or modified sequence
atgagctgtcccgtgccagcctgctgcgctctgctcctggtgctcgggctgtgccgcgctaggcccagaaacgccctgttgttactagccgacgacggaggatttgaaagcggggcatataacaactcagcaattgccaccccgcatctggacgccctggcacggaggtcattgttgttcagaaatgcatttacaagcgtcagctcctgctccccgtctcgggcgagtctgctgaccggtctgccacagcaccagaatggcatgtacggtctgcaccaggatgtccatcattttaattcttttgacaaggtgcgcagtctacccctactgctgtctcaggcaggcgtcaggacagggattattggaaagaagcacgtgggtcccgagacagtgtacccctttgacttcgcctacaccgaggagaatggttctgttctgcaagtgggcagaaacattacaagaataaagctcttagtgaggaagttcctacaaacccaggacgacagacccttctttttgtacgtcgcatttcacgacccgcaccgctgcgggcactcccaaccacagtacggcaccttttgcgagaagtttggcaatggagagagtggaatggggcggattccagactggacccctcaggcctatgacccactagacgtgctagtgccctacttcgtccccaatacaccggccgcaagagctgacttggccgcgcaatacaccacagtgggccgaatggatcagggggtgggattagtgttgcaggaactgcgcgatgcaggggtgttaaatgacacccttgtgatctttacttcggacaatgggatacctttcccgagcggacgaacaaacctgtactggcccggaacagccgagcctctgttggtcagctctccagagcaccctaagcgttgggggcaggtgtccgaagcgtacgtctctctgctggacctcacgcccaccattctggactggttctctatcccatatccaagctacgcgatcttcgggagcaaaaccattcacctcactggccgatctttactgccggccctggaggcagaacccctttgggccaccgtcttcggcagccagagccatcacgaggtgactatgtcctaccccatgcggtccgtccaacacagacacttcagactagtccacaatctgaacttcaaaatgccctttcccatcgatcaggacttctacgtgtcccctacatttcaggacctccttaatagaacaactgcggggcagccgactggttggtataaggatcttaggcattactactatcgggcaaggtgggagctgtacgatcgctccagagatccgcacgagacccagaatcttgcaactgatcccagatttgcccaactcctggagatgcttagagaccaactggccaagtggcaatgggagactcatgatccatgggtttgcgctcccgacggggtcttggaagagaagttaagccctcagtgccagccacttcacaatgaactt

SEQ ID NO: 4174 - DNA, 1506 bp, Artificial Sequence
  derived and/or modified sequence
atgtcgtgcccagtcccagcatgctgcgcgctgcttctggtgctcgggctctgccgggccaggccaagaaacgcgctcctcctgctggctgacgatgggggattcgagtcaggtgcctacaacaactcagctatcgccaccccgcacctggacgccctggcacggagatcactgctgttccggaacgctttcacctctgtgtcctcgtgctccccatcccgggcatcgctcctcaccggactgccacagcatcaaaacggcatgtacggattgcaccaagacgtgcatcatttcaactcgttcgacaaagtcagatcactccctcttctgctgagccaggctggagtgaggactggaattatcggaaagaagcatgtgggacctgaaacggtgtacccatttgatttcgcctatactgaagaaaatgggtcggtgctgcaggtcggaagaaacattacccgcatcaaactcctggtgcggaagttcctgcagacgcaggacgatagaccgttcttcctgtacgtcgcctttcatgacccgcaccgctgtggacactcacagccccagtacggaaccttctgcgagaaatttggaaacggggagtcaggtatgggcagaatcccggactggaccccgcaggcgtacgacccactggatgtcctggtgccttacttcgtcccgaatacgccggcagctcgcgcggacctggcggcacagtacaccaccgtcggaaggatggatcagggtgtcgggttggtgctccaggagctgagagacgccggagttctgaatgataccctggtgatcttcaccagcgacaacgggatacctttcccttcgggaaggactaatctctactggcctggtacggccgagccgctgctcgtgtcatccccggagcacccgaagcgatggggccaagtgtcagaagcctacgttagcctgctcgatctgactccaacgattctggattggttctccattccttacccgagctacgctatcttcggcagcaaaaccatccatcttacgggtcggagtttgctgccggctcttgaagccgaaccactgtgggccaccgtgttcggatcccaatcgcaccatgaagtgaccatgtcgtacccgatgcggagcgtccagcatcgccacttcagactcgtgcacaatctgaacttcaagatgccgttcccgatcgatcaagacttctatgtgtcacccacttttcaggacctcctgaaccgcactaccgctgggcagccgaccggatggtacaaagatcttcgtcactactactaccgggcgcgttgggagttgtatgaccggtcccgcgatccgcacgaaacccagaacctggccaccgacccccgcttcgcccaattgctggaaatgcttcgggatcagcttgcgaaatggcagtgggagacgcatgacccttgggtgtgcgcgccagacggcgtgctggaggagaagctgtcacctcaatgccagccactccacaatgagctc

SEQ ID NO: 4175 - DNA, 1506 bp, Artificial Sequence
  derived and/or modified sequence
atgtcctgtccggttccagcatgttgcgcgcttcttctggtcctgggactctgccgtgctcgcccccgtaacgcgctgcttctgctggcagatgatgggggatttgaaagcggtgcatacaataactcggcgattgcaaccccacatctcgacgcactggcgcggagatcccttctcttccgaaacgcatttacctccgtctccagctgctcccccagcagagcatctctgctgaccggtctgccacagcatcaaaatgggatgtacggtctgcatcaggatgtccaccatttcaactcatttgacaaagtgcgatcgctgcccctcctcctgtcgcaagcaggtgtgcgcactgggatcatcggtaagaaacatgtcgggcctgaaaccgtgtacccttttgattttgcctacacggaagagaacggatctgtccttcaggtgggtcggaacatcactcggatcaagctccttgtccggaaattccttcaaactcaagatgaccggccgttttttctctacgtcgctttccatgaccctcatagatgtggacattcccagccccaatatggaactttttgtgagaagtttggcaacggtgagtcgggtatgggcagaatccctgactggactccacaagcctacgatcctcttgatgtgctggtgccttactttgtgcctaacactcctgccgccagagcagatcttgcagcacaatataccactgtgggcagaatggatcagggagtcggacttgtccttcaagaactcagggatgcaggagtcctgaacgacactctcgtcatctttacctccgataatggaattccttttccatccggaagaaccaatctgtactggcctggcaccgcagagccacttctcgtctcgtcccctgaacatcctaaacggtggggtcaagtgtccgaggcctatgtgagcctgttggacctcactcccaccatattggattggttcagcataccttacccaagctacgcaattttcggtagcaaaaccattcatctgactggaagatccctgctgccggcattggaggctgaacctctgtgggcaaccgtgtttggttcccaaagccaccatgaagttaccatgtcgtacccaatgcggagcgttcaacatagacattttagacttgtgcacaacctgaactttaagatgcctttccctatcgatcaagatttctacgtttcgcctacgtttcaggacctgctgaatcgcaccaccgcaggtcagccaaccgggtggtacaaggatctgcggcattactactaccgtgcgcggtgggaactgtacgaccgatcacgggacccacacgaaacccagaatcttgccaccgatccaagatttgcccaactgcttgaaatgcttcgggatcaacttgcaaagtggcaatgggagactcatgatccttgggtgtgcgcacccgatggcgtgctggaagaaaagttgagccctcaatgtcaacccctgcataatgaactt

SEQ ID NO: 4176 - DNA, 1506 bp, Artificial Sequence
  derived and/or modified sequence
atgtcatgtcccgtgcctgcgtgttgtgcgctgctgctggtgctgggactgtgtcgggcacggccaagaaacgcattgctcctgctggccgacgatggaggttttgaaagcggggcatacaacaactcggccatcgcaacccctcatctcgatgcacttgcacggcgatcgctcctctttaggaatgcatttacttcggtgtcgtcctgttcgccaagcagagcatcgttgcttaccggtctgcctcagcaccagaacggtatgtacggtctgcatcaagacgtgcatcatttcaattcatttgacaaagtgcgctcgctgccactcctcttgtcccaggcaggtgtaagaactgggataattggcaagaaacacgtgggtcctgaaactgtgtacccctttgatttcgcttacactgaggagaatggatccgttcttcaggtggggcgcaacattaccagaataaagctcctggttcggaagttcttgcagactcaggatgatcgccccttttttctgtacgtggcctttcatgatccccataggtgtggacattcgcagccccagtacggcaccttttgtgagaagtttggcaatggtgaaagcggtatgggaaggattcctgattggactcctcaggcatacgatcctcttgacgtcctggtgccttactttgtgcctaataccccagcagcgagggccgacctggcagcccaatacaccactgtgggccgaatggatcaaggagtgggtctggtgctgcaggagctgagagacgccggtgtccttaacgataccctcgtgatcttcaccagcgataatggaattccttttccatcgggacgcacgaatttgtactggcctggaaccgcagaaccgctcttggtgtcaagccctgaacatcctaagcgatggggtcaggtgtcggaagcgtacgtttcgctgctcgaccttacgccaacgattcttgattggttcagcatcccttatccttcgtacgcaattttcgggagcaagactatccacctcaccggtcggtccctgctgcccgcgctcgaggcagagcctctgtgggccaccgtgtttggatcccaaagccatcacgaagtgaccatgtcatacccaatgcggtccgtgcagcaccgacattttcgtcttgtccataacctgaactttaagatgccatttccaatcgaccaagatttctacgtgtcacccacttttcaagatcttcttaaccgtactaccgcaggacagcctacgggatggtacaaggatctgcggcactactactaccgcgctcggtgggaactttacgacagatcccgtgacccccatgagactcaaaacctggctaccgatcctcgctttgctcagcttttggaaatgctgcgagatcaactcgcaaagtggcagtgggaaacccacgatccttgggtgtgtgcacccgatggtgtgcttgaggagaaactgtcgccccaatgtcaaccactgcataacgaactt

SEQ ID NO: 4177 - DNA, 1506 bp, Artificial Sequence
  derived and/or modified sequence
atgtcttgtccggtgcccgcatgctgtgccttgctgctggtgctcggactgtgtcgagccaggcctcggaatgccctgcttctgctggctgatgatggcgggtttgaatccggagcatataacaattctgccattgcaacgccccatctggacgcccttgcccggcggtcactcctcttccgcaatgcattcactagtgtgagttcttgttcaccttcacgggcaagtctgctgactggactgccccagcaccagaatgggatgtacggtctccatcaggatgtgcatcatttcaattctttcgataaggttcgctctttgccgttgctgctgagccaggctggtgtgcggactgggattataggcaaaaagcacgtgggacctgagacggtgtacccttttgacttcgcctatacagaggaaaatggctccgtcctgcaagtagggaggaacatcacccgaataaagttgttggtgagaaagttcctccagacgcaggatgaccgccccttcttcctgtacgtggcatttcacgacccacacaggtgcgggcatagccagcctcagtatggcaccttttgtgagaaattcggaaatggggagagcggaatgggaaggatccccgactggacacctcaggcttatgacccactggacgtgctcgtgccttacttcgtgcccaacaccccagctgctagagccgatttggcagcccagtacactacagtgggtcgaatggaccagggggtaggcctggttttgcaggagctccgagatgctggggttttgaacgacactctggtgatttttacatctgacaacggtatcccctttcctagcgggcgcactaacctgtattggccaggaaccgcagagcctctgctggtctctagcccagagcaccccaagcggtggggacaggtatccgaggcatacgtttccctgcttgatctgacccccacaatacttgattggtttagtattccctatccctcttatgccatttttggcagtaagacaattcacttgactggaagatccctgctgccagccctggaggccgaaccgctctgggccaccgtcttcggatcccagtctcatcatgaggtcacaatgagctatcctatgcgcagcgtgcaacaccgccacttccgactcgtgcacaacctgaactttaagatgccctttcccatcgatcaggacttctacgtttctccgacttttcaggatttgctcaaccgaactacagctggtcagcctaccggatggtacaaggacctgaggcattattattatcgcgcccgatgggaactgtatgacaggtccagagatccccacgagacccagaatctggccactgacccaagattcgcacagctgcttgaaatgctgagggaccaactggctaagtggcagtgggagactcatgacccgtgggtatgcgcccctgacggagtcctggaggagaaattgagtccgcagtgtcagcctctgcacaacgaactg

SEQ ID NO: 4178 - DNA, 1506 bp, Artificial Sequence
  derived and/or modified sequence
atgtcgtgtcccgtgcccgcatgctgcgctctgctgctcgtccttggcctgtgcagagctcggccaagaaatgctctgctgttattggccgacgacgggggatttgaaagtggcgcctacaataatagcgctattgccaccccccatttggacgcgcttgctcgtcggtctctgctgtttcgaaacgcatttacatctgttagcagttgtagccctagccgagcatcactgctgactgggctgccacagcaccagaatggcatgtatgggctacaccaggatgtgcatcatttcaactcatttgataaggtaaggtccctgcctcttctgctttctcaggcgggagtcaggaccggcatcatagggaaaaagcacgtagggccggagacggtgtaccctttcgattttgcctacaccgaggagaatggctcagtgttgcaagtggggaggaacataacccgaataaagcttcttgtcagaaagttcctgcagacccaagacgatcggccatttttcttatatgtggctttccacgacccccatcgatgcgggcacagtcagccacaatatggtacattctgcgaaaaattcggtaatggtgagtctggcatggggagaataccggactggacccctcaggcttacgacccactggacgtcctggtcccttactttgtgccaaacactcctgccgccagggccgacctcgctgctcagtacactaccgtggggcggatggaccaaggggtgggcctggtcctgcaggaactgagagacgcaggagtgctaaatgacacactggtcatcttcacctcggataacggaataccttttccgtccggccggacaaatctctattggcctggaactgcagaacccctcctggtctctagccccgagcaccccaagagatggggtcaggtaagcgaagcatatgtgtctctgctggacctgacacccactatcttagattggtttagtattccttatccctcctacgctattttcgggtctaagaccattcatctcacaggcaggagcttacttccagctctggaagctgagcctctctgggcgaccgtgttcggatcccagtcgcaccatgaagtgacaatgtcataccccatgaggtcagtgcaacaccggcacttccggctggtgcacaatctgaacttcaagatgccctttccaattgatcaggatttttacgtctcgccaacgttccaggacctccttaataggactaccgccggacagcccacaggctggtataaggatctaagacactactattaccgagcccggtgggagctctacgaccgaagccgggatcctcatgaaacgcagaacttggccactgatcctagattcgcccagctgctcgagatgctgagggaccagctggcaaaatggcagtgggagacacacgacccatgggtctgtgctcccgacggggtcttagaggagaagctgtcccctcagtgtcaacccctccacaatgagctt

SEQ ID NO: 4179 - DNA, 1506 bp, Artificial Sequence
  derived and/or modified sequence
atgagctgcccggttccagcatgctgcgccctcttgctggtcctgggcctctgccgcgcgcgaccgcgtaacgccctgctgttgctagccgatgacggcggcttcgagagcggcgcatataataattctgctatcgccacacctcatctggatgcactcgcccgccgcagcctgctgtttcgtaatgccttcaccagcgttagcagctgcagccccagcagagcatctctcttgaccggtctgccgcagcatcaaaatggtatgtacggcctccaccaagacgttcaccactttaactccttcgacaaagtgcgttcattgcctctgttgctgtctcaggccggtgttcgcactggtattatcggtaaaaagcatgtcggccctgaaacagtgtatccgttcgactttgcatataccgaagagaatggctccgttttgcaagttggtaggaacatcacccgcatcaagctactggttcgcaaattcctgcagacccaggacgatcgtccttttttcctctacgttgcattccacgacccccatcggtgcggacactcccaaccacaatacggtaccttctgtgagaagttcggtaacggtgagtccggtatgggtcgtatccctgactggaccccgcaggcctacgatcctctggacgtgctcgttccttactttgtgccaaacactcctgccgcacgcgcggacctggctgctcaatataccactgttggcaggatggatcagggtgtgggcctcgtgctgcaggagctccgtgacgcaggtgttctgaacgatactctggtgatcttcactagcgataacggcatacctttcccaagcggacgcaccaatctctactggccaggaacggcggagccactgctggtgagcagccctgaacatccaaaacgctggggacaggtttccgaagcttatgtctctctgctggatctgaccccaactattctcgactggttttctattccgtacccgagctatgccattttcggtagtaaaaccattcatttgaccggcaggagcctgctgcctgcgctggaggcggaaccactgtgggctaccgttttcggaagccagagccatcacgaagttacgatgagctatccgatgcggagcgtgcagcaccgccactttcgcttggtgcacaatctgaatttcaaaatgccatttccgatcgatcaggatttctatgtctcgccgacgtttcaggacctgctgaatcgtacaactgctggacagccgacagggtggtataaagatttgcgacattactactaccgggcacgttgggaactgtacgatcgcagccgggatccgcacgagacccaaaatctggcgaccgatccacggttcgcccagctgctggaaatgctgcgtgaccagctggccaagtggcagtgggagacccacgacccatgggtttgtgccccggatggcgtcctagaagaaaaactatctccccaatgccaaccgctgcacaacgagctt

SEQ ID NO: 4180 - DNA, 1506 bp, Artificial Sequence
  derived and/or modified sequence
atgtcatgcccggtgccagcttgctgcgcactgctcttggtgctggggctctgccgcgcccggcctcgcaatgcgctgctgctgcttgctgatgatggaggatttgagtccggcgcctacaacaactcggccatcgcgaccccgcatctggacgctctggcccggagatccttgctgttccgcaatgcgtttacctcagtcagcagctgctctccgtcccgggcatccctgctcactggattgcctcagcatcagaacgggatgtacgggctgcaccaggacgtccaccacttcaattccttcgataaggtccggtcgctgcccttgcttctgtctcaagccggagtgagaacgggaattatcgggaagaagcatgtggggcctgaaaccgtttatccgttcgatttcgcgtacaccgaggagaacggatcggtgctgcaagtgggcaggaacattacgcggatcaagctcttggtccggaaatttctccagacccaggacgatcgccccttcttcctgtacgtggccttccacgacccgcaccgctgcggacatagccagccgcagtacggcaccttttgcgagaagtttgggaacggagaatcaggtatgggaagaattccggattggaccccgcaagcctatgatcctctggacgtgctggttccgtacttcgtcccaaacactccggctgcgcgcgccgacctggctgcccagtacactactgtgggaaggatggatcaaggggtgggcctggtcctgcaagaacttagggacgcgggagtcctgaatgacacgctggtgatcttcacgtccgataacggaatccctttcccctctggtcgcaccaacctctactggcccggaactgcggaacctctgctggtgtcgtcgccagaacatccaaaacgctggggtcaagtcagcgaggcgtacgtgtccctcctcgacctgacccccaccatcctcgactggttctcgattccgtacccgtcgtacgcgatcttcggatccaagactatccatctcactggccgctcgctcctgccggccttggaggcggagccgctgtgggcaactgtgttcggttcgcagtcgcaccacgaggtgacgatgtcctaccctatgcgctcagtgcagcatagacatttccggctggtgcataacctcaacttcaagatgcctttcccgattgatcaggatttctacgtgagcccaactttccaggatctgctgaatcgaaccacggccggccaaccgacgggatggtacaaggatctcagacattactattacagggccagatgggagctgtacgaccgcagccgggacccccacgaaacccaaaatctggctacggacccgcgattcgcgcagctgttggagatgctccgtgaccaactcgccaagtggcagtgggaaactcatgacccgtgggtctgcgctcccgatggtgtgcttgaggaaaagctctcacctcagtgccagccgctccataacgaactg

SEQ ID NO: 4181 - DNA, 1506 bp, Artificial Sequence
  derived and/or modified sequence
atgagctgccctgtgccagcttgctgcgcactcctcctggtgctcggactttgccgcgctcgcccgcgcaacgcgctgctgctgctcgcggacgacggagggttcgaaagtggtgcatacaacaattcagcaatcgctaccccacacctggatgcacttgctagacggagcttgctgttccgcaatgcgtttacttcagtgtcgtcctgttccccttcgagagcatcgcttctgaccggactgccgcagcatcaaaatggaatgtacggcctgcatcaggacgttcaccatttcaattccttcgacaaggtcaggtccctgccgctgctgctctcgcaggccggtgtccgaactggaatcatcggaaaaaagcatgtgggacctgaaaccgtctaccccttcgacttcgcatacacggaggaaaatggctcggtcctccaagtcgggcgaaacattacccgcatcaaactgctggttaggaagttcctgcaaactcaagacgaccgcccgttctttctgtacgtggccttccacgatccgcaccggtgtggacattcacagccccaatacggcactttctgcgaaaagtttggaaacggcgagagcggtatgggccggatcccggactggaccccgcaggcttacgacccactcgacgtgctggtcccgtacttcgtgccaaatactccggcggccagagccgaccttgcagcgcaatacacgactgtgggacggatggaccagggggtgggcttggtgctccaagagcttcgcgacgctggtgtgctgaacgacacgctggtgatctttacctcagataacggtatcccgtttccgtccggacgcaccaacctctactggccggggaccgccgaaccgctcctggtgtccagccctgagcaccctaagaggtggggtcaggtgagcgaagcatacgtgtccttgttggacctgaccccaaccatcctggactggtttagcatcccgtacccgtcgtacgccatcttcggctccaagaccatccacctgaccggcagatcgctgctgccagcactggaggctgaaccgctgtgggccactgtgttcggatcccaatcgcaccacgaagtgacgatgtcgtatccgatgcgctcggtgcagcacaggcactttagactcgtgcataacttgaatttcaaaatgcctttccctatcgaccaggatttctacgtgagcccaactttccaagatcttcttaaccggactaccgcaggacagccgaccggctggtacaaggatctgcgccattactactacagagcaaggtgggaactgtatgacaggtcgcgcgatcctcacgaaactcaaaacctcgccaccgatccgagatttgcgcagttgctggaaatgcttagagatcagcttgcgaaatggcagtgggaaacgcatgatccttgggtgtgcgccccggacggggtactggaagagaagctcagcccgcagtgccagcctctgcataatgagctg

SEQ ID NO: 4182 - DNA, 1506 bp, Artificial Sequence
  derived and/or modified sequence
atgagttgtcctgtgcctgcatgctgtgccctgttgctggtgctgggcctctgccgtgctaggcctcgcaacgccctcctattgctggctgacgacgggggttttgaatctggggcctataataactctgcaattgccacccctcacctggatgctctggctcgcagatctctgctctttaggaacgcttttaccagtgtgagtagttgctctcccagtagggctagcctgctaactgggctgccacagcaccagaacggcatgtatgggctgcatcaggatgttcatcactttaattcttttgataaggtgaggtccctccctctactactgagtcaagccggggtccggactggcattataggtaaaaagcatgttggccctgagaccgtctatccattcgatttcgcatacaccgaggagaatggttcagtgctgcaagtgggtagaaacatcactaggattaaattactggttcggaagtttttgcagacacaggacgatagacctttcttcctgtatgtggccttccacgatcctcatcggtgtggacatagtcagcctcagtatggtaccttttgcgagaagtttggcaatggcgagagcggcatgggccggatccctgactggacaccacaggcttatgatcctttggacgtgctggtgccttactttgtgccaaataccccagctgccagagccgacctggccgcccagtacacaactgtgggacgcatggaccagggcgtggggctggtcctacaagagctgcgtgatgcaggcgtgctgaacgataccttagtgatctttacatctgataacggaataccattcccatccggaaggacaaatctgtattggccaggaacagccgaacccctgctggtcagttccccagaacatcccaaacggtggggacaggtcagtgaggcatacgtgtccctgctggatttaacacccactatattggattggttctccatcccttacccatcatatgctatatttggcagtaagacaatccacctgactggacgttctttactgccagctttagaggcagaaccattatgggctaccgtgttcggatcccagtctcatcacgaagtcacaatgtcctacccaatgcgtagtgttcagcaccgccatttccgactcgtgcataacctaaacttcaagatgcccttccccattgaccaggatttctatgttagtcctacatttcaggatctcctaaacaggaccaccgcaggccagcccaccggctggtataaggacttgcggcattattattatcgggcacgctgggaactgtacgatcgttccagggacccacatgaaacacagaatcttgctaccgatccaaggtttgctcagctcctggagatgctgagggaccagctggctaaatggcagtgggaaacccacgatccctgggtgtgcgcccctgacggcgttctggaggagaagctaagcccacagtgtcagcctctacataatgaactg

SEQ ID NO: 4183 - DNA, 1506 bp, Artificial Sequence
  derived and/or modified sequence
atgtcgtgcccggtcccagcttgctgtgccctgttgctcgtgctgggcctgtgtagagcccgtccgagaaacgctctcctgttgctggctgacgacggcggcttcgaaagcggagcatacaacaattccgcgatcgcaaccccgcacctggacgccctcgctcgcaggtccctgctgttccgaaatgcattcacctccgtcagttcctgctcgccttcacgcgctagccttctcacgggactgccgcagcaccagaacgggatgtacgggctccaccaggacgtccaccatttcaactcctttgacaaggtgagatcactgcctctgctgctctcgcaggcaggagtgagaacggggatcatcggaaaaaagcatgtgggaccagaaaccgtgtacccgttcgacttcgcatataccgaagagaatggctcagtgttgcaggtcggcagaaatatcactaggattaagctcctggtccgcaagttcctgcaaactcaggacgaccggccgttcttcctgtacgtggctttccacgatccgcaccggtgtggtcattcccagcctcagtacggcactttctgcgaaaagttcggaaatggggagtcagggatgggacggatccctgactggactccgcaggcttacgacccgctcgatgtgcttgtgccatacttcgtgcccaacacccctgccgcccgcgccgatctggcggcgcaatacactaccgtgggccgcatggatcaaggggtcggactggttctgcaggaattgcgcgatgctggagtgctgaacgataccttggtgatcttcacttccgacaatggaattccgtttccatccggacgcaccaacctgtactggccgggaaccgctgaaccgctgctggtgagcagccctgaacaccctaaacgctggggtcaagtgtccgaggcgtacgtttccctcctggacctcaccccgactatcctggattggttctccatcccatatccttcgtacgctatctttggatcgaaaaccatccatctgactggccggtccctgctcccagcgctggaggctgaacctctgtgggctaccgttttcggctcccagtcccaccacgaagtgactatgtcgtacccaatgaggagcgtccagcaccgccattttcggttggtgcacaatcttaactttaagatgccgttccccatcgaccaggacttctatgtgtcccccactttccaggaccttctcaatcggaccactgcaggacagccgactggatggtacaaggacctgagacattactactaccgggctagatgggaactctacgatcgaagcagggatccgcacgagactcaaaacctggcaactgacccgcgctttgcgcagctgctcgaaatgctgcgcgatcagttggcaaaatggcaatgggagactcacgacccgtgggtgtgcgccccggacggcgtgctcgaggaaaagctgtcacctcagtgccagccactgcacaatgagctc

SEQ ID NO: 4184 - DNA, 1506 bp, Artificial Sequence
  derived and/or modified sequence
atgtcctgtcccgtgccggcatgctgtgcgctcctccttgtccttggattgtgtagggcaaggcctaggaacgccctcctgctgcttgcagatgatggcgggttcgaaagcggggcatacaataacagcgcaattgcgactcctcatctggacgccttggcgaggcgctctcttcttttccgtaacgcatttacctcggtgagctcttgcagcccctccagagcctcgcttctcaccggacttccgcaacatcaaaacggaatgtacggacttcatcaagacgtccaccacttcaactcgtttgacaaggtgagaagcctgccgctcctcctttcccaggcaggcgtgcggaccggaatcattggtaaaaagcatgtgggccctgagactgtctacccattcgattttgcatacaccgaggagaacggttcggtgctgcaagttggtaggaacattactaggatcaagttgctggtgcgcaagtttcttcaaacccaggatgatagacctttctttctttacgtggccttccatgacccacaccgctgtggacactcccaaccacaatatggaaccttttgtgaaaagttcggaaatggagagtcaggtatgggtaggatccccgactggaccccccaggcgtacgatcctctggatgtgctggtgccttacttcgtccccaataccccggcagcacgagcagacctggcagcccagtacactaccgttgggaggatggatcaaggagtgggacttgtgctgcaagaactgagagacgctggcgtgctgaatgacactcttgtgatcttcacgagcgataacggaattcctttcccttcgggtcgcactaacctttactggcctgggaccgcagaacctcttctcgtctcgtccccagagcacccgaagagatgggggcaggtttcagaggcctacgtgagcctccttgatctgactcccactatccttgactggttttcgatcccttacccatcctacgcaatctttggttcaaaaacgatacacctcaccggcagatcactgcttcctgcgctggaagctgaaccgctttgggctaccgtgtttggctcacaatcgcaccatgaagtcactatgtcataccctatgagatccgtccagcacagacattttcgtctggtccataatcttaactttaagatgccatttccaattgatcaagacttttacgtttcccctacctttcaagatctcctcaacagaaccactgcgggtcagcccacgggttggtataaggaccttcggcactactactacagagcaagatgggaactgtacgatcggtcaagggatccccacgagactcaaaatctcgcaaccgaccctagatttgcacaactgcttgaaatgctcagggaccaactcgcgaagtggcagtgggagacgcatgacccatgggtgtgtgcccctgatggtgtgctggaagagaaactgtcgcctcaatgtcaacctcttcacaatgagctt

SEQ ID NO: 4185 - DNA, 1506 bp, Artificial Sequence
  derived and/or modified sequence
atgagctgccctgtgcctgcttgttgtgcacttctcctggtgcttggcctttgtcgtgcgcgccccaggaatgccctgctgctcctggctgatgacggcgggtttgaatcgggagcatacaacaattcagcgatagctactccgcaccttgacgctctcgcccggaggagtctgctgttcaggaatgcatttacgtcggtgagctcgtgttcgccatcgagggcttcactgcttaccggtttgccacaacaccagaacggtatgtacggccttcaccaggacgtgcatcatttcaactcctttgataaggtgagatcattgcctttgctgctcagccaagcaggtgtccgcacgggtattatcgggaagaaacacgtgggtccggaaactgtgtatccttttgatttcgcttacaccgaagagaacggttcggtgcttcaggtcggacgcaacattacccggatcaagctgcttgtgcgtaaattcctgcaaacccaagatgaccgtcctttctttttgtacgtcgcatttcacgatccgcaccgctgcgggcacagccagccccagtacggaaccttttgtgagaaatttggtaatggggaatcaggaatgggcaggatccccgattggaccccccaggcctacgatcccctcgacgtgctcgtgccatactttgtcccaaacaccccagcagcaagagcagatttggcagcacaatacaccactgtgggacgcatggatcaaggtgtgggacttgtgctccaagaactccgcgacgctggggtgctgaacgacactcttgttatcttcacctccgataatggaatcccatttccatccggacgtacgaacctgtactggcctggtactgcagagccgctgttggtttccagccctgaacatccaaagcggtggggtcaagtctcagaagcgtacgtttcgctgttggatctcacgcctactattcttgattggttttctatcccctacccttcttacgcaattttcggatctaagactattcatctgaccgggcggtccctgctgcctgcacttgaagccgagcctctttgggcaactgtctttggatcgcaaagccatcatgaggttactatgtcgtacccgatgagatccgtgcaacaccgtcattttcgccttgtccataaccttaactttaagatgcccttcccaattgaccaagacttctacgtgagccctacttttcaagatctgttgaatcgcaccactgcaggacagccgacgggatggtataaagatcttaggcattactactaccgggcgaggtgggagctgtacgatcgatcgagggacccacatgaaacccagaacttggcaactgacccccggtttgcacagctgctggaaatgcttcgcgatcaactggcaaagtggcagtgggagactcatgatccatgggtatgcgcccctgacggcgtgcttgaagaaaagttgagcccccaatgccaaccactccataatgagctt

SEQ ID NO: 4186 - DNA, 1506 bp, Artificial Sequence
  derived and/or modified sequence
atgtcgtgtcctgtgcccgcttgttgcgccctgttacttgtgctggggctgtgcagggcccggccccgcaatgccctgcttctgttggctgatgatggaggatttgaaagtggagcctataacaactccgctatagcaacaccccatttagacgcattggcccggcgctctctgctgttcaggaatgcgtttacaagtgtctcctcttgcagcccatcaagagcttcactgctgactgggctgcctcagcaccaaaacgggatgtacgggttacaccaagacgtgcatcactttaattcatttgacaaggtgagaagcctccccctactgctcagccaggcaggagttcgtactgggattatcggcaagaaacatgttgggcccgagactgtgtacccctttgacttcgcgtacacagaagagaatggctccgtgctgcaggtgggtaggaacattactaggattaagctgctcgttaggaagtttttgcaaacacaggatgaccggcccttcttcctctacgttgcgtttcacgatcctcatagatgtggccatagtcagccccagtacgggaccttttgtgaaaaatttgggaacggagagtctggaatgggccggatccctgattggactccacaagcttatgaccctctggatgttttggttccatactttgtgccaaacacccctgcagcaagggccgacctagcggcgcagtacacaactgtcggccgaatggatcaaggtgttgggctggttctgcaagagctgcgtgacgctggagtgctgaatgatacactcgtgatcttcacatctgataatggcatcccattcccctccgggcggaccaatctgtactggccaggtaccgcagagccactgctggtcagctcgcccgagcatccgaagcggtggggacaagtatccgaggcctatgtgtccctgctggacctgacacccacgatattagattggttctcgattccctatccctcctatgctatcttcggatctaagacgatccacctgactggacgttccctgttacccgccctggaagccgagcctctgtgggcgacggtcttcgggagtcagagccaccacgaagttaccatgtcttatcctatgcgatccgtgcagcatcggcactttaggctcgtgcacaacctgaattttaaaatgccttttcccatcgatcaggatttctacgtgtccccgacatttcaggatttactgaataggactactgccggacaacccacaggatggtataaggacttgcgccactactattatagagcccgctgggagctgtacgacaggtcccgggatccacacgagacgcaaaatctggcgacagatcctaggtttgcccagctgcttgagatgctgcgggaccagttggccaagtggcaatgggaaacccatgatccttgggtgtgcgcccctgacggtgtgctagaggaaaagctgtccccccagtgtcaacccctgcataacgagtta

SEQ ID NO: 4187 - DNA, 1506 bp, Artificial Sequence
  derived and/or modified sequence
atgtcgtgccccgttccagcatgctgcgccctgttgctggtcctgggactgtgtcgcgcgcggccccgcaatgcgttgcttctgctggcagacgatggaggcttcgagtccggggcctacaataattcggccattgctacgccccacctggatgctctagcgcgcagatccttgctgtttagaaacgcattcacttccgtgagttcgtgcagcccctcgagagccagcctactgacgggcctgccccagcatcagaacggcatgtacggcctgcaccaggatgtccatcatttcaactccttcgacaaagtcagaagcctgccgctgctcctatcgcaggctggcgtgcgcacgggaatcattggaaaaaagcacgtgggtccggagacagtgtatccattcgattttgcctatacagaggagaatggaagcgtcttgcaggttggccgcaatatcacacgtatcaaattgttggtccgtaagtttctacagacccaggatgaccgtccattctttctgtacgtggccttccatgatccgcatcgatgcggacatagtcaaccccagtacggtacattttgtgaaaagtttggcaatggagagtcgggtatgggccgaatacccgactggaccccccaagcctacgatccactggacgtcctcgtcccgtacttcgtcccgaacacccctgccgcccgcgctgacttggctgcccaatacaccacggtgggtagaatggaccagggcgtgggcttggtcttgcaggagctccgagatgcaggcgtgctgaacgatacactggttatattcacgagtgacaatggaattccgttcccgagcggacgcaccaatctctattggcctggaactgccgagcctttactggtctcctctccagaacacccaaagcgttggggccaggtgtcggaggcatacgtgtcccttctggacttgacgcccacgatactggactggttttccatcccctacccgtcctacgcaatattcggctccaagacgatacacctgacgggccggagtttgctacccgcgctggaggccgagccgttgtgggcgaccgtctttgggagtcagtcgcatcatgaggtgaccatgtcatacccgatgaggtctgtgcagcaccggcactttcggctagtgcataatctgaatttcaaaatgcccttccccatcgaccaggatttctatgtgagcccgacctttcaggatctgttgaaccgtacaactgccggccagcccacaggatggtataaggacttgcgtcattattattacagagcccgctgggagttgtacgaccgctcccgtgatccgcatgagactcagaacctggccaccgatccccgattcgcccagctcttggagatgctgcgtgatcagctggcgaagtggcagtgggagacccacgatccctgggtttgcgcccccgatggagttctggaggagaaactgagcccccagtgccagccactgcacaatgaatta

SEQ ID NO: 4188 - DNA, 1506 bp, Artificial Sequence
  derived and/or modified sequence
atgagttgccctgtcccagcttgttgcgccttattgcttgtcttgggactgtgtagagctcggccgaggaatgcactgttactcctggccgatgacggtggctttgagtccggcgcctacaataattctgcaattgcaacccctcatctggacgcccttgctaggaggtcactcctgtttcggaatgctttcacaagcgtgtcctcctgctctccatccagggccagcctgctcacgggcttgccacagcaccaaaacggtatgtatggacttcatcaggacgttcaccactttaatagcttcgacaaagtgaggtcattaccactgctcctttcccaggctggagtgcggacaggtatcattggaaagaagcatgtgggcccagagaccgtataccccttcgatttcgcctacacggaggagaacggtagtgtgctacaggtggggcgtaatatcacaaggattaaactcctggtcagaaagtttctgcaaacgcaggacgaccggccttttttcttatatgtagcatttcacgacccacaccgttgcggtcactctcagccccagtacggcactttctgcgaaaagtttgggaatggagaatctgggatgggtaggattcctgactggactccacaggcatatgaccctctggacgtgctcgttccttactttgttccgaacacccctgccgcacgtgccgacctcgcagcgcagtatactacagtgggacgcatggaccagggagtgggcctggttctccaggagctgcgcgacgctggggtcctcaatgatacccttgttatatttacttcagataacggcatccccttcccatctggacgcactaatctgtactggcctgggacagctgagcctctgctagtgtcctccccggagcacccgaagcgctgggggcaggtttccgaggcgtacgtgtctttgttagacctaactcctacgatccttgattggtttagcataccgtacccttcttacgccattttcgggagcaaaaccatccatcttacaggaaggagcctactgccagcgctggaggctgaaccactttgggccactgtgttcgggagtcagtcgcaccacgaagttaccatgagctatcccatgcgcagtgtgcaacatagacactttcgcctggttcataaccttaactttaagatgccgtttcctattgaccaggatttctacgtaagcccaacgttccaagacctactaaatcgcaccaccgcagggcagcccactgggtggtacaaggacttacgacattactattacagggcccggtgggaactgtatgataggtcaagggatccacatgagacccagaatctggccaccgacccaaggttcgcccagctgctcgagatgttgcgggatcaattggcgaaatggcagtgggaaactcacgatccctgggtctgtgcccccgacggcgtccttgaagaaaaattatcccctcaatgccagccccttcacaacgagcta

SEQ ID NO: 4189 - DNA, 1506 bp, Artificial Sequence
  derived and/or modified sequence
atgtcctgtcccgtgccagcttgttgcgccctcctgctggttctcgggctctgtagggctcgccccaggaacgcgctactgcttctagccgacgacggcggctttgagtcaggcgcttacaataacagcgccattgctaccccacatctggacgcactcgccaggcgttccttgctgttccgcaacgcattcaccagcgtcagcagttgcagccccagccgggcttcattgctgaccgggctacctcagcaccagaatggtatgtatggtctccatcaggatgtgcaccatttcaattcctttgacaaagtcaggtccctacccctccttctatctcaagccggagtaaggacaggaataattggaaagaagcacgtgggtccagagactgtgtacccatttgacttcgcttataccgaagagaatggctctgtactccaggtcggccggaatataacacgtatcaagttgctcgtgaggaagtttcttcagactcaggatgaccgacctttcttcctgtacgtggcctttcacgatccacaccgctgcgggcatagccagccccaatatggcacattttgtgaaaaattcggcaatggcgagtccggaatgggaagaatccccgattggaccccacaggcctacgatcccctggacgtactggtgccctattttgtgcctaatacacctgccgcacgagcggatctcgcagctcaatacaccactgtgggccgaatggatcaaggcgtggggctagtgttacaagaacttcgggatgcaggagtgctcaacgatactctcgtgatttttacgagtgataatggaatcccctttcccagcgggagaactaatctgtattggcccgggaccgcagaaccccttcttgtttcatctcctgaacacccgaaaaggtgggggcaggtgtcggaggcatatgtgtcccttctcgacctaaccccaacaatccttgattggttttccatcccctaccctagctatgccatctttggaagcaagaccatccatctaaccggacgatccttgctgcccgccctggaagcagagccgctctgggccactgtctttggttctcagagccaccatgaagtgactatgagctaccccatgcgatctgtccaacataggcatttccgcctggtgcacaatcttaatttcaagatgccctttcccatcgaccaggacttctacgtgtctcctacatttcaggacctgctgaacaggacaactgctgggcagccaactggttggtacaaggatctgcgccattactactatcgggcccgttgggagctatatgacagaagtcgggacccacatgagacacagaacctggctaccgaccctcggtttgcgcagctgttagaaatgttgcgcgaccagctggcaaagtggcagtgggaaacccacgacccttgggtgtgcgcaccagatggcgtcctggaggagaaactgtccccacagtgccagcctctacataatgagctc

SEQ ID NO: 4190 - DNA, 1506 bp, Artificial Sequence
  derived and/or modified sequence
atgagctgtcctgtgccggcctgttgtgcacttcttcttgtgctgggactctgccgcgcccgaccacggaacgcacttctgctgcttgcggatgatggtggttttgaatcgggtgcatacaataactccgcaattgcgaccccccatcttgatgcactcgcccgtcggtcgctgctcttccgaaatgcctttacctcggtgtcatcgtgtagcccctctcgggcatcgctcctcaccggactgcctcaacaccaaaacggtatgtatgggctccatcaagatgtgcaccatttcaacagctttgacaaggtgcgatcactcccacttttgctctcacaggccggagtcaggactggaatcataggaaagaagcacgtgggacccgagactgtctacccttttgattttgcatacactgaggagaatggatcagttctccaggtcggacggaacattacccgcattaaacttcttgttcgtaaattcctccaaacccaggatgataggccttttttcctttacgtggcctttcatgacccccaccgttgcggtcactcgcaaccacaatacggcactttctgtgagaaatttggtaatggcgaatcgggtatggggagaatcccagactggactcctcaagcctacgatcccctcgatgtcctggtgccatactttgtgcctaacacccctgctgcaagagccgatcttgctgcccagtacactactgtgggtcggatggatcagggcgtgggactggtcttgcaggagcttagagacgcaggggtcctgaatgacaccctggtgattttcactagcgacaacggtatcccttttccaagcggccgcactaatctttactggcccggtaccgcagaacctttgcttgtcagctcccctgaacatccaaagcgttggggtcaagtgagcgaagcatacgtgagccttctggatctgacccctaccattctcgattggtttagcatcccctatccaagttacgcaatctttggatcaaagactattcatttgaccggcagatcactgctgccagcactggaagcggagccactttgggctaccgtctttggaagccagtcccaccatgaagtgactatgtcttaccctatgagatcggtgcaacatcgacattttaggctggtccataatctcaactttaagatgccttttccaattgaccaagatttctacgtgtcacctactttccaagatctcttgaacaggactacggctgggcaacctactggttggtacaaggatttgcggcattactattacagagcgcgctgggagctctatgatagatcgagagatccacatgaaacccaaaatcttgcaactgatcctagatttgcccaacttcttgaaatgctgagagatcaacttgcgaagtggcagtgggaaacccacgacccttgggtgtgtgcacctgacggagtgttggaggaaaaacttagcccgcagtgtcaacctcttcataacgaactt

SEQ ID NO: 4191 - DNA, 1506 bp, Artificial Sequence
  derived and/or modified sequence
atgtcttgccctgtgcccgcatgttgtgcccttctccttgtgttgggtctgtgccgtgcgagaccgagaaacgcacttctgcttctggcagacgatggaggcttcgaatcaggggcatacaataattctgcaattgcaactccgcacctcgacgccctggcccgccgaagcctgttgtttcggaatgcatttacttcagttagctcctgtagtccctccagagcttcattgctgacaggcttgccgcagcaccagaatggcatgtatggcctgcaccaggacgtgcaccacttcaactcttttgataaagtgaggtccctgccactcctgctgtcccaagctggggtccgcaccggcatcattggcaagaagcacgtgggtcccgagaccgtctatcctttcgattttgcctataccgaggagaatggctctgtattacaggtgggcagaaatataaccaggattaagctgttagttcgaaaattcctccagacacaggatgacaggccattcttcctctatgtcgcatttcacgacccacaccgatgtggccactctcagcctcaatacggaactttctgcgagaaatttggtaatggagagtccggcatgggccggattcctgattggaccccccaggcgtacgatcctctggacgtcctggtgccatacttcgttccaaacaccccagccgcacgagccgacctggccgcgcaatacaccaccgtcggacgcatggatcagggggttggactggttctgcaggaactgcgagacgccggagtcctgaatgatactctggtgatatttacttccgacaacggaataccatttccatcgggccggacgaacttgtattggcccggcacagctgagcccctgctggtcagctcgcccgaacacccgaagaggtggggtcaggtaagcgaggcatacgtgtcactgttggacctaacacccacgattttagactggttctcaatcccatatccctcttatgctatctttggctctaagacaattcatctcacgggccggagcctgctgccagccctggaagctgagcccctgtgggccaccgtgtttggttcccagagtcatcacgaggtgaccatgtcctacccgatgcggtctgtgcagcatcgccattttcggcttgttcataatctgaacttcaaaatgccatttccaatcgatcaggatttctacgttagtcctaccttccaggatttactcaataggacaactgccgggcaaccaacaggctggtataaggatctgcgacattactattaccgagcccgttgggaactgtatgaccggtcaagagaccctcacgagacccagaacctggctacagatcctcgctttgcacagttgctagaaatgctgcgggatcagctggccaaatggcaatgggaaacacatgacccctgggtttgtgcccccgacggggttctagaagaaaaactgtcaccccagtgtcagccacttcacaacgagctc

SEQ ID NO: 4192 - DNA, 1506 bp, Artificial Sequence
  derived and/or modified sequence
atgtcatgtccggtcccggcctgctgcgcccttctgctcgtcctggggttgtgtcgcgctcggccgcgcaatgccctgctgctcctcgcggacgatggcggattcgagtcgggcgcctacaacaacagcgccatcgcgactccacacctggacgctctcgccagacgttctctgttgttccggaatgcgtttacttccgtgtcctcctgctccccgtcaagggccagcctgctcactggcctcccgcaacaccagaacggaatgtacggactgcatcaggatgtgcatcatttcaacagcttcgacaaagtgaggtcgcttccgctgctgttgtcacaagcaggagtcagaacgggcatcatcggaaagaagcatgtgggacccgaaactgtctacccgttcgatttcgcctacaccgaagaaaatggctcggtgctgcaggtgggacgcaacatcacccggatcaaactgctcgtgcgcaaattcctgcaaacgcaagacgataggcctttcttcctgtacgtggccttccatgacccgcatagatgcggacactcccagccccaatacggaactttttgcgagaagtttggtaatggcgaatctgggatggggcgaatcccagactggactccacaggcgtacgatccactggacgtccttgtgccttattttgtgccaaacacgccggccgctcgggcggacctggccgctcagtacaccaccgtcggacgcatggaccagggagtgggtctggtgcttcaggaattgcgcgacgcaggggtgcttaacgataccctcgtgatcttcacctccgacaatggtatccctttcccgtcaggtagaactaacctctactggcctggaaccgccgagccgctgctcgtgagttcgccggagcacccaaagcgatggggccaagtctccgaggcatacgtctcactcctggacctgacccccactattttggactggttctcgattccgtaccccagctatgctatcttcggatcaaagaccatccacctgactggccggagcttgctgcctgcgctggaggcagagcctctgtgggcgaccgtgtttgggtcgcagtcgcaccacgaagttactatgtcgtacccgatgcgcagcgtgcaacaccggcacttcaggctggttcataacctgaattttaagatgccattcccgattgaccaggatttttacgtctccccaactttccaggacctgctcaatagaaccaccgcgggacagcccactggatggtacaaagacctccggcactactactaccgcgcccgctgggaactgtacgatagatcccgggacccacacgagacgcagaacctggcaaccgatccacggttcgctcagctcctcgagatgcttcgcgatcagctggcaaagtggcagtgggaaacccatgatccttgggtatgcgcacctgatggagtgctcgaagaaaagttgagcccgcaatgtcaaccgctccacaacgaactg

SEQ ID NO: 4193 - DNA, 1506 bp, Artificial Sequence
  derived and/or modified sequence
atgtcatgccccgtccccgcctgttgcgcgctattgttagtgctgggtttgtgcagagcccggcctcgaaacgccctgttactgctggccgacgacggtggctttgagtccggggcttataataacagtgctatagcaacaccacacctggacgcccttgcccggcggtctctactgttccgcaacgcatttacttcagtctctagttgtagccccagccgggcctctttgttgacgggactgccacagcaccagaacggtatgtacggcttacatcaggatgtccatcattttaatagcttcgacaaggtccggtctctgcccctgcttttgtctcaggccggagtgcgtaccgggatcatcgggaagaagcacgtcggacccgaaacagtgtatcccttcgacttcgcatacaccgaggaaaatggatccgtgctccaggttgggcgaaacattacaaggataaagttgctcgtgcgcaaatttctccaaactcaggatgatagaccattttttttatatgtggctttccatgatccacatcggtgcgggcacagccagccacagtacggcaccttttgcgaaaagttcggcaatggagagtctggcatgggccgcattcccgactggacaccacaggcgtacgaccctctggatgttctggtgccctactttgtcccaaatacccctgccgcccgtgccgacctggcagcacagtataccaccgtgggaaggatggatcagggcgtcggtctggtcctccaggaactacgggacgcaggggtgctgaatgataccctggtgatcttcacctctgataatgggatcccctttccaagtggaagaacaaatttgtattggcctgggaccgcggaaccattgctcgtctccagtccagaacacccaaagaggtgggggcaggtgagtgaggcctatgtctctttattggatctgacacctacaatcctggactggttcagtatcccctacccctcgtacgcgatttttggctcgaagaccattcacttgactgggcggtctctcctgccagcactcgaggccgaaccgctgtgggctacagtgttcggctcacagagccaccacgaggtgacaatgtcatatcccatgaggagcgtgcagcaccgacattttcggttagtgcacaatcttaacttcaagatgccttttccgattgaccaggacttttatgtgagtcctaccttccaggatctcttaaacaggactacagccggtcagcctacgggatggtataaggacctaagacactactactacagagcgcggtgggagctttacgaccgatcacgggacccacacgagacccaaaacctggccaccgatcctcgctttgcccagttacttgaaatgctgcgggaccagcttgcgaagtggcagtgggaaactcatgatccatgggtttgtgcccctgatggggttctggaagagaaactgagccctcagtgtcagcctctccataatgagtta

SEQ ID NO: 4194 - DNA, 1506 bp, Artificial Sequence
  derived and/or modified sequence
atgagttgccctgtaccagcatgttgcgctctcctgctggtgctaggtctctgtcgtgccaggccccggaatgccctactgctgcttgccgacgacgggggcttcgagtctggagcttacaacaactccgccattgcaacaccccatttggatgcactggctaggaggtcactcctctttcgtaatgcgttcacgagtgtctcctcctgttcaccgagtagggcaagcctcttgactggcctgccccaacatcagaacggcatgtatggcctgcatcaggacgtgcaccacttcaattcttttgataaggttcgaagcctgccactgttgctcagtcaggctggcgtcagaaccgggataatcgggaagaagcacgtgggcccagagactgtgtatccattcgattttgcctatactgaggagaacggaagtgtgttgcaggtcggcagaaacatcaccaggataaagctgctggtcagaaaatttttgcagacccaggacgacaggccgtttttcttgtatgtagcattccacgacccccaccggtgtggacattctcagccacagtacggaaccttttgcgagaaattcggaaatggcgagtctgggatggggagaatacccgactggactcctcaagcctatgaccctctggatgttctggtcccatacttcgtccctaacactcccgcagcaagagcagacctcgccgcacagtacacgacagtgggacgaatggaccagggggttggactggttctccaagagctgcgggatgcgggtgtgctaaacgataccctagttatcttcacgtctgataacggtatcccttttccgtccggacggaccaatctgtattggcccgggaccgcagaaccactgctagtgtcctctcctgaacacccaaagaggtggggccaggtgtccgaggcatatgtgagcctgttggaccttactccaaccattctggactggttcagcatcccctaccctagctacgcaatttttgggagtaaaaccatccacctgacaggtaggtcattgttgccagcgctagaggctgagcctttatgggcgacggtgtttgggtcccagagccaccacgaggtgaccatgtcctatccaatgcggtccgtgcagcacaggcacttcaggctcgtgcataacctgaacttcaaaatgccattcccgatcgaccaggatttctacgtgagccccacattccaggatttactcaaccgcactaccgctggacagccaacaggatggtacaaagacctgagacactactattatcgtgctcgctgggagttgtatgatcggtcaagagatccacacgagactcagaacctcgcgacagatcctcgcttcgcccagctgttggaaatgctgagggatcagctggcaaaatggcagtgggaaacccatgacccgtgggtgtgtgcacccgatggggttttggaggaaaagttgagccctcagtgtcaacccctgcacaatgagttg

SEQ ID NO: 4195 - DNA, 1506 bp, Artificial Sequence
  derived and/or modified sequence
atgagctgccctgtgcctgcctgctgcgccctgctgctcgtgctcggactgtgtcgcgcccgcccgcgcaacgcccttttgctgctggccgacgacggagggttcgagagcggcgcatacaacaatagcgccatcgccaccccccatctggatgctctcgcccgccgctcgctccttttccggaacgcgttcacttcggtaagcagctgttcgccttcgcgggcaagcctcctgactgggctgccccagcaccagaacggcatgtacggactccaccaggacgtgcaccatttcaattccttcgataaggtgagatcgcttcccctgctcctgtcccaagcgggggtcaggactggaatcatcggtaagaaacacgtcggaccggaaacggtgtacccattcgacttcgcctacaccgaggaaaacggctccgtgctgcaagtcggtcgcaatatcacgcgcatcaagctcctcgtccggaaatttctgcagacccaagacgaccgcccttttttcctgtacgttgcattccacgacccccataggtgcggccattcgcaaccacaatacggcacgttctgcgagaaattcggtaatggagagtcaggtatggggagaatcccggactggactccacaggcatacgacccactcgatgtgctcgtgccgtacttcgtcccaaatacccctgccgctcgcgcggacctggccgcgcagtacactactgtgggacgcatggaccagggcgtcggactggtcctgcaagaactccgcgacgcaggagtgcttaacgatacccttgtgatcttcactagcgacaatggcattccatttccctcgggacgcaccaacttgtattggccgggcactgccgaaccgctcctggtgtcatcaccggaacatccgaagcggtggggacaagtctctgaagcctatgtcagcctcctggaccttactcccactattctggactggttttcaattccataccccagttacgcgatcttcgggtccaagactatacatctgactggtcggagcctgctgcctgctctggaggccgaaccgttgtgggcgactgtctttggatcccagtcacaccacgaagtcactatgtcatacccaatgaggtcggtccaacacaggcacttccgccttgtccacaaccttaactttaagatgccgttcccgatcgatcaggacttttacgtgtcccctaccttccaagacctgcttaacagaaccactgccggccagcctaccggctggtacaaggatctgagacattactactatagagcccgctgggaactgtacgatagatctcgcgatccgcatgagactcagaacctcgccacggatccacgctttgcacaactgcttgaaatgctgcgcgaccagctcgcgaagtggcaatgggagactcatgatccctgggtgtgtgccccggacggggtgctcgaggagaaactgtcgcctcaatgccagccactgcataacgaactg

SEQ ID NO: 4196 - DNA, 1506 bp, Artificial Sequence
  derived and/or modified sequence
atgtcttgccctgtgcctgcctgctgtgccttgcttctggtgcttgggctgtgtagagcacggccacgcaacgcgcttttgctccttgctgatgacggcggtttcgagtcaggagcgtacaacaattcagcaatcgcaactccccatctggacgcactggcacgccggtcccttctttttcgcaacgcatttacttccgtgtctagctgttccccatcgagagccagcctgctgactggtctgcctcagcaccagaacggaatgtacggactgcaccaagatgttcatcacttcaattcgtttgataaagtccgatctcttcccctgctgctttcacaggcaggagtgcggaccggaatcattggaaagaagcacgtgggtccagaaaccgtctacccattcgacttcgcctacaccgaagagaatggatcagtcctccaggtcggacgaaacattaccaggattaagctcttggtacgcaagtttctgcagacccaggacgataggcctttctttctttatgtcgcttttcatgatcctcaccgctgcgggcattcgcaacctcaatacggaacgttctgcgagaaatttggcaatggagaaagcgggatgggtaggattcctgattggaccccacaagcatacgaccctcttgatgtccttgtgccgtactttgtccctaataccccggcagcgcgcgcagacctggcagcgcagtataccactgtcggcaggatggaccaaggtgtgggtctggtgcttcaggaactcagggatgccggtgtgcttaatgacactcttgtgattttcacctcggataacgggattccttttccatcgggaaggacgaacctgtactggccaggcaccgctgaacccctccttgtgtccagcccagaacaccccaaacgatggggacaagtcagcgaggcatacgtcagcctcctggatctgactcctactatcctggattggttcagcattccctacccttcgtatgctatctttggctccaaaactattcaccttactggtcgctccctgcttccggcgttggaagccgagcctctgtgggcaaccgtgttcggttcccagagccatcatgaagtcaccatgtcgtacccgatgcggtctgtccagcacagacacttccgtttggtgcataacctgaacttcaaaatgcctttcccaattgatcaagatttctacgtgtcccccacgtttcaggatcttctgaatagaactacggcaggtcaacccacgggctggtacaaggatctgcgtcattactactaccgggccaggtgggaactttacgatcgttccagggacccacatgaaactcaaaacctcgcaaccgacccacgctttgcccaactgcttgagatgcttagagatcaactggcaaaatggcagtgggaaactcatgacccttgggtgtgtgcaccggatggagtactggaagaaaagctctcacctcagtgtcaacctcttcataacgagctg

SEQ ID NO: 4197 - DNA, 1506 bp, Artificial Sequence
  derived and/or modified sequence
atgtcttgccctgtgcccgcatgttgtgcgttgctactggttttgggcctgtgtagggcacgaccgcggaacgcgctacttctgttggccgacgatggaggctttgaaagtggtgcctataataattcggccatcgccacccctcacctagacgcactggcccggagatcattgctctttcgaaacgcatttacaagcgtgagctcctgctcccccagccgagccagtctcctcaccggattaccccagcatcaaaacggtatgtatggactgcaccaggacgtccaccattttaactctttcgacaaagtgcgatctctgcctttgttactgtcgcaggcaggcgtgagaacagggatcattggcaagaagcacgtgggcccagaaaccgtgtaccctttcgacttcgcctatacagaggagaatgggagcgtgttgcaagtgggccggaatatcacccgaatcaagctgctggtacgaaaatttctccagacacaggacgatcgacctttttttttgtacgtggcttttcacgatccccatagatgcggtcactcccagccccaatatggaacgttttgtgagaagtttggcaatggcgaatcaggaatgggcagaattcccgattggactccccaagcatatgatccgctggacgtgcttgtcccatactttgtcccaaatactccggcagctcgagccgatctggctgcacagtacaccaccgtcgggagaatggaccagggcgtaggcctggtcctgcaagaattgagggatgctggcgtgctcaatgacacattagtcatctttacttcagacaacggcataccattcccatccggtcgtaccaatctatattggcccggcactgcggagcccctgctggtgtcctcccccgagcaccccaaaaggtggggacaggtatccgaggcctatgtctctttgttagacctcacacctaccatcctggactggtttagcatcccctatccatcatacgctatcttcggtagtaagacgattcacctgaccggtagatcactcctccctgccctggaggcggagccactgtgggcaactgtcttcggcagccaaagtcaccatgaggtcacaatgtcttatcccatgagaagtgtgcagcaccgacacttcaggttagtgcacaatctgaatttcaagatgcccttcccaattgaccaggatttctatgtatctcccacatttcaggaccttttaaatagaaccacggctgggcaaccaacaggctggtataaagacctgcgacattactactatcgagcccgctgggagctgtatgatcgaagtcgagacccccatgagacgcagaatctcgccaccgaccccagattcgctcagctcctcgagatgttacgtgaccaattagcaaaatggcaatgggagacccacgatccttgggtatgtgcccctgatggggtgttggaggagaagcttagtccccagtgccagcctcttcacaacgaactg

SEQ ID NO: 4198 - DNA, 1506 bp, Artificial Sequence
  derived and/or modified sequence
atgtcatgtccagtgccagcttgctgcgctcttcttctagtgttaggtctgtgtcgggctagaccccgcaacgccctgctgttactcgccgacgacggcggcttcgaatctggtgcgtataataacagcgcaatcgctacacctcatttggacgctttagccagacgcagtctgcttttccggaatgctttcacttcagtgtcctcatgtagtccgtcccgagcatccctgctaacgggtctccctcagcatcagaacggaatgtacggcctccaccaggatgtgcaccactttaatagctttgataaggtaaggtccctgccgttactcttgtctcaagccggggtccgcacagggatcattgggaaaaagcacgtaggcccagaaaccgtctaccccttcgatttcgcctatacagaggaaaacggcagtgtactccaggtgggcaggaacatcacccgcattaaactgctggtgagaaagttcctacagactcaggacgaccgacccttctttctatacgtggcattccatgatccacacaggtgtggtcattctcagccacagtatggaacgttctgtgagaagtttggaaacggagagtccggcatgggacggatccctgattggaccccgcaggcgtacgatcctctcgacgtgttagtgccctacttcgttccgaacacacccgccgccagggcggatctagccgcccaatacaccacggtgggacgtatggaccagggtgtgggtcttgtgctgcaggagctgagagacgccggggtgctcaacgacactctcgtgatatttacctctgacaacggaatccccttcccatcaggaagaacgaatctgtactggccaggaaccgccgaaccactgctggtgagctctcccgagcatcccaagcgttggggccaggtgagcgaagcttatgtcagtcttctcgatctcacccccactatcctagattggttttcgattccctacccctcctatgccatctttggctccaaaacaattcatctcactgggagatcccttctgccagctctggaagccgagcctctctgggccacggtttttggaagtcaatcccaccatgaggtaacaatgagctaccctatgaggagtgtgcagcaccggcactttcgtttggttcacaacctgaatttcaagatgcccttcccaattgaccaagacttctatgtatcgcctaccttccaagacctgctgaaccggaccacggccggacagccaactgggtggtacaaggatttgcgccattactactatcgcgcccgctgggagttgtacgatcgaagccgagaccctcatgagacgcaaaatctggctaccgatccccgatttgcacaactgctcgagatgctcagagatcagttggccaaatggcagtgggagacacatgatccctgggtgtgcgcgcccgatggagttctcgaggagaagctgtcaccacagtgtcagcctctgcacaatgagctt

SEQ ID NO: 4199 - DNA, 1506 bp, Artificial Sequence
  derived and/or modified sequence
atgagttgtcctgtacccgcctgctgcgccctcttactcgtgttggggctgtgtagagccagaccaaggaatgccctgctgcttctcgccgacgacggaggtttcgagtcaggtgcctataacaactctgctattgcaaccccccatctcgatgccctcgcccgtcgctcattactctttcgaaatgccttcacctcagtaagctcctgctctccaagtagggcctcactgcttacaggattgccacaacatcagaatggcatgtacggacttcatcaggatgtgcatcacttcaactcgttcgacaaggtgagatctcttcccttgttgctctctcaggccggagtgcgcacagggattatcggcaagaaacacgtgggtccagaaacggtttacccctttgatttcgcctataccgaggaaaatgggagcgtgttgcaggtggggaggaatatcacaagaatcaagctgttagtccgcaaattcctgcagacccaagacgatcggcctttctttttgtacgtggcgtttcacgacccgcaccgatgcggacactctcagcctcagtatgggaccttctgcgagaagtttgggaacggggagtctgggatgggcaggattccagactggactccgcaagcttacgatcccttagatgttctagtaccatattttgtgccaaacacacctgctgccagggcggacttggcagcacaatatactacggtaggtcgcatggaccagggtgttggactagttttgcaagaactgagagatgccggcgtcctgaacgacacactggtgatattcacctcagataacggaattccattcccatcaggccgaaccaatctgtactggcctgggactgccgagccacttctggtgagcagtcctgagcacccaaaaagatggggacaggtgtctgaggcctacgtttctctgctggatctgacgcccaccatcctggactggttttctataccctacccttcttacgctatctttggatccaagacaatccacctcaccgggcgcagcctgctgcccgctcttgaggcagagccactctgggctaccgttttcggcagccagtcccaccatgaggttaccatgagttatcccatgcgctcggttcaacaccgccattttcgcctggtacacaatctgaattttaaaatgccttttccaattgaccaggatttctacgtttcccccacatttcaagaccttctgaaccggacgacagcaggacagccaacagggtggtataaggacctgagacattactactatagggccaggtgggaattgtatgacaggagccgggatccccatgagacacagaatttggctaccgatccacgctttgcccagctgctagagatgctgagggatcaactcgccaagtggcaatgggagactcatgatccctgggtatgtgcacctgatggtgtcctggaagaaaagttaagtccgcagtgccagccgctccataatgagctg

SEQ ID NO: 4200 - DNA, 1506 bp, Artificial Sequence
  derived and/or modified sequence
atgagctgcccggtgcccgcatgttgtgcgttgctactcgtccttgggctgtgtagggcaaggccccgaaatgccctgctgctgctagcagacgatggcggcttcgagtcaggcgcctataacaatagcgcgatagcgactcctcatttagatgctctggctaggcgcagtttgctgtttcggaatgcttttacgagcgtgagcagttgcagtccaagcagggcttctcttctaaccggcctgccacaacaccagaacggtatgtatgggttgcatcaggatgtgcatcattttaatagctttgataaagtgagaagcctgccccttctgctgtcacaagctggagtgcgtaccggcatcatcggcaagaagcacgtgggccctgaaacagtttatccatttgatttcgcctatacagaagaaaatggttccgtgctgcaggttggccgaaacataaccagaatcaagctgttggtaaggaagttcttacagactcaggacgaccgaccatttttcttgtacgtagcttttcatgacccccaccggtgtgggcactctcaaccccagtacggaactttctgtgaaaaatttggcaacggtgaatctggtatgggtaggattccggattggacgccccaggcatatgacccactggacgtgctggtgccctattttgtgcccaacacccctgccgcacgggctgacctggctgcccagtataccaccgtgggcagaatggaccagggagtagggttggtgttgcaggaattacgtgacgccggggtgctaaatgatacccttgtgattttcaccagtgacaatggaatccccttccccagcgggcggacgaacctatattggcctggcacagctgagcccctgcttgtgtccagcccggagcacccaaaaaggtggggtcaggtcagcgaggcatatgtgagcctgcttgatcttacccctaccatactggactggttctccattccgtaccctagctacgccatcttcgggagtaaaaccattcacttgacaggtaggagccttctccctgcccttgaagcagagcctttgtgggcgactgtttttgggagtcagtcacaccatgaagttactatgtcttatcccatgcgctctgttcagcataggcacttccgtctcgtgcataatttgaactttaaaatgcccttcccaatagaccaagacttttacgtgagcccgacatttcaagacctgcttaatcgaacaaccgcgggtcagccaacaggttggtataaagatcttagacactactattaccgagctagatgggaactctatgacaggtcgcgtgatcctcatgagacacaaaatctcgctaccgacccacgatttgctcagcttttggaaatgctccgggatcagttagcaaagtggcagtgggaaacacacgacccttgggtctgtgcgccagacggagtgttggaagaaaagctgtccccccagtgccagcctctgcataacgagctg

SEQ ID NO: 4201 - DNA, 1506 bp, Artificial Sequence
  derived and/or modified sequence
atgtcttgccccgtgcctgcctgttgcgcacttctgctggttctcggactgtgtagggcccggcctagaaacgcacttctgctcttggcggatgacggcggcttcgaatctggggcttataacaattcagccatcgcgactccacacttggatgccctcgctaggcgcagtcttctgttcagaaatgccttcacctctgtctccagttgttcaccgagcagagctagcctgctgaccggcttgccccagcaccaaaatggcatgtacggccttcaccaagatgtgcaccattttaattccttcgacaaggtgaggtcccttcccctgctgttgtctcaagcgggggttcgaacagggatcatcgggaagaagcacgttggcccagaaacggtgtatcccttcgattttgcttacactgaggagaacggctctgtcttgcaagtggggagaaacatcactaggatcaagttgcttgttcgcaaattcttgcaaacccaggatgacagacctttttttctgtacgtggcgtttcacgaccctcatcgctgtggccactcacagcctcagtacggaactttttgcgagaaatttggtaatggggagagtggcatggggcggattcccgattggacaccccaagcctatgacccactcgatgtgctcgttccttactttgtgcctaacacaccggcagctagagccgacctcgccgcacagtatactacagtcggcagaatggaccaaggagttgggctggttctgcaggagctgcgggacgcaggagtactcaatgatacactcgtgatcttcacgtccgataacgggatcccgtttcccagcgggcgaacaaacttgtattggcctggtacggctgagcctctgctggtgtctagtcccgaacaccccaagcgatggggccaggtctcagaagcatatgtgagcctgctggacctgaccccaaccatcctcgactggtttagtatcccatacccgtcatacgcgattttcgggtccaagaccatccatctgaccggcagatccctgcttcccgcactggaggccgaaccactgtgggccacggtattcggaagccagagccatcatgaggtgactatgtcttacccgatgaggtcagtacagcaccggcacttccggctcgtgcacaacctgaatttcaagatgccattccccatcgatcaggatttctatgtttcacctacatttcaagatctgctgaaccgcaccactgcaggccaacccactggatggtataaggacctgaggcactactattaccgagcccgctgggaactctatgacaggagccgagatccccacgaaacccagaacctggcgactgatccaagattcgcccaactgctggaaatgcttagggatcaactggcaaagtggcagtgggagacacatgacccttgggtttgcgcacccgacggggtacttgaggagaagctctctccccagtgccaacccttgcacaacgaactt

SEQ ID NO: 4202 - DNA, 1506 bp, Artificial Sequence
  derived and/or modified sequence
atgtcatgtcctgttcctgcatgttgtgcattattattagttcttggactttgtagagcaagacctaggaatgcattattacttttagctgatgatggaggatttgaatctggagcatataacaatagtgcaatcgctactccacatttagatgcattagctagacgatctttactttttcgtaatgctttcacatcagtatcttcatgttctccatcaagagcatcattgttgactggattgcctcaacatcaaaatggtatgtatggacttcatcaagatgtacatcatttcaattcatttgataaagtaagaagtcttcctcttttattaagtcaagcaggagttcgaacaggaatcattggaaaaaaacatgttggtcctgaaactgtttatccattcgattttgcatatactgaagaaaatggatctgtattacaagttggtagaaacatcactcgtataaaacttttagtcagaaaatttcttcaaacacaagatgatagaccattttttctttatgtagcatttcatgatccacatagatgtggtcactcacaaccacaatatggaacattttgtgaaaaatttggaaatggagaatctgggatgggaagaatccctgattggactccacaagcatatgatccattagatgtattagttccatattttgttcctaatactccagccgcaagagctgatcttgcagctcaatatacaactgtaggtagaatggatcaaggagtgggtctagttttgcaagagcttagagatgctggagtattaaatgatactcttgttattttcacatcagataatggaattccatttccatctggacgtacaaatttatattggccaggaactgctgaacctttacttgtttcatcaccagaacatccaaagcgatggggacaagtaagtgaagcatatgtttctttattggatttaactcctactattttagattggttttctattccatatccaagttatgcaatatttggaagtaagactattcaccttactggaagatctttgttacctgctttagaggcagaaccattatgggctactgtttttggatctcaaagtcatcatgaagtgactatgtcatatcctatgagaagtgttcaacatagacattttagacttgtacataatttaaattttaagatgcctttcccaattgatcaagatttttatgtatcacctacttttcaagatcttttaaacagaacaactgctggacaaccaactggatggtataaagatttaaggcattattattatagagcaagatgggaattatacgatagatcacgtgatccacatgaaacacaaaatttagctacagacccaagatttgcacaattattagaaatgcttagagatcaacttgcaaaatggcaatgggaaacacatgatccatgggtttgtgctccagatggagtattagaagagaaattatctccacaatgtcaaccattacataatgaacta

SEQ ID NO: 4203 - DNA, 1506 bp, Artificial Sequence
  derived and/or modified sequence
atgtcttgtcccgtacccgcctgctgtgccttgctcctcgtactgggcctgtgccgggcacggcctaggaacgccctgctgctgcttgctgatgatggcggcttcgaatcaggagcttataataactcagctatagctaccccacaccttgatgcgctcgcacgcagaagccttttgttcaggaacgcctttacaagcgtatcgtcatgcagccctagcagggcttcattgctgaccggcctgccacagcaccagaatgggatgtatggtcttcaccaggatgtacatcattttaattcgtttgacaaagtgaggagtttgccattgctgctcagccaggccggcgtgagaacgggaatcatcgggaagaagcatgttggccctgagaccgtttaccctttcgactttgcatacaccgaggaaaatggctccgtgcttcaggttggaaggaatattactagaatcaagctgctggtgagaaaattcttgcagactcaggatgataggcctttcttcctctacgtggctttccatgatccccacagatgtggccactcgcaaccacagtacggcacattctgtgaaaagttcgggaacggcgagtcaggcatgggtagaattcccgactggacaccacaagcctacgatcccttggacgtgctggtgccctattttgtgcccaatactcctgccgcacgcgccgacttggctgctcagtacaccaccgtgggccggatggaccaaggcgtcgggctggtcctgcaggagctgcgggacgccggggtcctaaacgacaccctggtgatatttacaagcgataacgggattcctttcccttccggacgtactaacttgtattggcctggaactgccgaacccttgctcgtcagttcgcctgagcacccgaagaggtggggccaagttagtgaggcctatgtctccctgttggatctgaccccaaccattctcgactggttttccattccctaccccagctatgccatcttcggaagtaaaaccattcatttgacaggccggtcgctgttacccgccctggaagccgaacctctgtgggctacagtgtttggatctcagtcacaccatgaagtcacaatgtcatacccaatgcggagtgtacagcatcggcatttcagattagttcacaacctcaacttcaagatgcctttccccatcgaccaggacttctacgtaagcccaacgtttcaggacttgttgaatcgcaccacggcgggtcaacctactggatggtacaaggatctcagacactactattatagagcccggtgggagctgtacgaccgctcacgggatccccatgagacccagaatcttgcgacggatccacgatttgcgcagctcctggagatgctccgggatcaactggccaagtggcagtgggagacacacgacccctgggtgtgtgctccggacggcgtccttgaagaaaaactcagccctcagtgtcagcccctgcacaacgaactt

SEQ ID NO: 4204 - DNA, 1506 bp, Artificial Sequence
  derived and/or modified sequence
atgagttgccctgtgccagcctgttgtgcgctgttgttggttctcgggctgtgcagagcgcggccccgaaacgccctgctactcctggccgacgacggcggctttgagtccggcgcctataacaactctgcaatcgctacgccccacctggacgccctggcgcgccggagcttgctctttcgtaatgcattcacgtccgtgagttcttgtagcccaagccgagcatccctgctcacggggctaccacagcatcagaacggtatgtacgggctgcaccaggacgtccaccatttcaactctttcgacaaggtgcggtctctgcccctgctcttatcacaggcaggggtgcgaactggcataattgggaagaagcacgtgggcccagaaaccgtgtaccccttcgattttgcctataccgaagagaatggctccgtgctgcaggtgggaaggaacatcacaaggatcaaacttctggtgagaaagttcttacagactcaggacgacagaccgttttttctctacgtggcctttcacgatccacaccgttgcggccattctcagccccagtacgggacattttgcgaaaaatttgggaacggcgagtccggaatgggtagaattcctgattggacaccgcaggcgtatgatcctctggatgtactcgtgccgtattttgtcccaaacacgccggccgctagagcagacctggcagcccaatataccactgtgggccgcatggaccagggcgtcggcctcgtccttcaggaactccgcgacgccggagtcctcaacgacacacttgtgatcttcacttccgacaacggaattccgttccccagcggtcgcaccaatttgtactggcccgggaccgccgagccactcctggtgagcagcccagaacaccctaagcggtggggacaagtgagtgaagcctacgtctcactgcttgatctgacccctacaattctagactggttctcaatcccctacccttcttatgcgatctttggcagtaaaacgattcacttaacagggcggagtctgttgcctgcacttgaggctgaacccttatgggccacggtattcgggtcacaaagccaccacgaagttacaatgtcgtatcctatgagatcagtccaacatagacacttccgactcgtgcataatctgaatttcaaaatgccctttcccatagatcaggatttttacgtcagccctacttttcaggacctgctaaacagaacgactgcaggccagcccactgggtggtacaaggacctgcgtcactactactatagggcccgctgggagctttacgacagatcaagggatcctcatgagacccaaaatttagctacagatcctcgatttgcgcagctgcttgagatgttgcgcgatcagcttgcaaaatggcagtgggaaactcatgacccatgggtgtgcgcacccgacggggttcttgaagagaagctgagcccccagtgccagcctctccataacgagctc

SEQ ID NO: 4205 - DNA, 1506 bp, Artificial Sequence
  derived and/or modified sequence
atgtcttgtcccgtgccagcctgttgtgcactgctgctagtgttgggcttatgtagagctaggccacgcaatgctcttctgctgctagccgatgacggtgggtttgagagtggggcttataataattccgcaattgcgacaccacatctggacgcccttgcgcgcagaagcctgctgtttcgcaacgcttttacgagcgtatcgtcctgcagccccagccgcgcatctctgctcacaggactcccccagcaccagaatggcatgtatggcctgcaccaggacgttcaccacttcaactccttcgacaaggtccgcagcttgccacttttgctgagccaggccggagtgcgcactggtattattgggaaaaaacatgtcggcccggagacagtgtaccctttcgattttgcatacaccgaggagaatggatccgttctgcaggtgggcaggaatattactcgcattaagctgttggtccgcaaattcctccagacccaggatgaccggccattttttctgtacgtggcattccacgaccctcatcggtgtggacactcccaaccccaatacggaaccttctgtgaaaaatttggcaacggtgagtcaggaatgggccgcattccagattggacaccacaggcctatgacccacttgacgtgctcgtcccttattttgtgcccaatacccccgcagcgagggccgacctggctgcacagtataccaccgtgggccgaatggatcagggagttggtttggtgttgcaggagctgagagacgcgggggttctaaatgacacactcgtgatattcacctcagataatggaatacccttcccgtctggaaggaccaatctctactggccgggtaccgcagagcctttacttgtgtcaagtcccgaacaccccaagcgttggggccaggtgagcgaagcctacgtgtccttgctcgaccttaccccgaccattcttgattggttctccatcccttacccgtcctacgctatctttggctcaaagacgatccatcttaccggtagaagtttgcttccagcattagaggcagaacccttatgggccaccgtgttcgggtctcagtcccaccacgaggtgacgatgagttacccgatgagaagcgtgcagcaccgccatttcagattggtacataacctaaactttaaaatgccttttcctatcgaccaagacttctacgtgtcgcccaccttccaagatctgcttaatcgcacaactgccggccagcccaccggctggtataaggatctgaggcattattattatcgcgctcgctgggagttgtatgatagatccagggatccccatgagacccagaatctggccactgatccccgcttcgcgcagctattggagatgttgcgcgatcaacttgcaaaatggcagtgggagacgcacgacccatgggtgtgcgctcctgacggggtgttggaagagaagttgtcccctcagtgccagcccctccacaacgagctt

SEQ ID NO: 4206 - DNA, 1506 bp, Artificial Sequence
  derived and/or modified sequence
atgtcttgcccggtgcccgcttgctgcgccctgcttctggtcctgggtctctgtcgcgcccgcccacgcaacgcactcctgttgctcgcggatgacggcggattcgagagcggtgcatacaacaatagcgcaatcgctacccctcacctggacgccctcgctcgaaggtccctgctcttccgcaacgccttcacttcagtcagttcctgtagcccgagccgcgccagcctgttgaccggtttgcctcagcaccagaacgggatgtatggactgcaccaggacgtccatcactttaactcctttgataaggtgaggtccctccccctgctgttgtctcaggctggcgtcagaactggtatcatcggaaagaaacacgtcgggccagaaaccgtctacccgttcgacttcgcctacaccgaggagaacgggtcagtgttgcaggtgggccgcaacataacgcggataaagctgcttgtccggaaattcctccagacccaggacgacaggccatttttcctctatgttgcgttccatgatccacataggtgcgggcattcacagccgcagtatggcacattctgcgagaagtttggcaatggcgagagcggcatgggtcggataccagattggactccacaggcttacgatccgctggatgttctggtgccttacttcgtccccaataccccggctgcccgcgcagatctggccgctcagtatacgaccgtgggcaggatggaccagggagtgggattggtgcttcaggaactcagagacgcaggcgtactgaacgatactctcgtaatattcacaagcgacaacgggatcccattccctagtgggcgcaccaacctctactggcccgggacggcagaacccctcctcgtaagctctccagaacatcctaagaggtgggggcaggtgtctgaggcctacgtttccctgctcgacctgaccccaacaattctggattggttttccatcccatatccttcctatgccatatttggtagcaagactattcacctgacagggcggagcctgctcccggctctggaagcagaaccgttgtgggctacagtgttcggcagtcagagccaccacgaggtgacaatgtcttatccaatgaggagcgttcagcatcgacattttcggcttgtccataatctcaatttcaagatgccgtttcctatcgatcaggatttttacgtttccccaacatttcaggatctgctgaacagaaccaccgccggtcagcccacgggctggtacaaagatctgaggcattattattaccgagctcgatgggagctgtacgataggtcaagagatccccatgagactcaaaacctggctacagatccacggtttgcacagctgctggaaatgcttagagaccagcttgctaaatggcagtgggagacccacgacccatgggtgtgtgccccagacggggtgctggaggagaaattgtcacctcagtgccaacctctgcacaatgagctc

SEQ ID NO: 4207 - DNA, 1506 bp, Artificial Sequence
  derived and/or modified sequence
atgtcatgccccgtgcccgcatgctgtgcgctcctgctggtcttgggactttgcagggcgcgtccgcggaacgctctgctgttgctcgccgatgatggtggctttgagtcgggggcatacaacaactccgcgattgctactccacatctcgatgctctggccaggagaagccttctgttcaggaatgcatttacctccgtctcgtcctgtagcccttcccgcgcaagcctgttgaccggactcccacagcatcaaaacggaatgtacgggctgcaccaagacgtccaccacttcaactcatttgacaaagtgcgatcgctgccgctcttgctgtcacaagcgggtgtgcgcaccggaatcatcggcaaaaagcacgtgggtccagaaaccgtttacccatttgatttcgcatacaccgaggaaaacgggtcggtgcttcaagtgggaaggaacattacccgaattaagctgctggtgcggaagtttttgcagacgcaagacgatcggccgttttttctttacgtggcctttcatgacccccatagatgtgggcattctcaaccacagtatggcacgttctgtgagaaattcgggaacggagaatccggaatggggcggatacctgactggactccgcaagcgtacgatccattggatgtgctggtcccatactttgtccctaacaccccagcagccagagcagacctggcggcccaatacactactgttggaagaatggatcagggagtgggactcgtgctgcaggaactgcgggacgcaggggtccttaatgacacgctcgtcatattcacctcagataatggcattccttttcccagcggacgcaccaacctttattggcctgggactgcagagccgctcctcgtttcgagtccagaacatcctaagcgatggggtcaagtctccgaagcatacgtgagcctcctcgatcttacccccactattcttgattggttctcgatcccttacccgtcctacgcaattttcggctccaagacgatacacctcacgggtcgcagtctccttcctgccctggaagcagaaccgttgtgggcaaccgtgtttggtagccaatcccatcacgaagtgactatgtcgtaccctatgcgatcagtgcagcatcgtcactttagacttgtgcataatctcaactttaagatgccttttccaattgaccaggacttttacgtaagtccaactttccaagatctgctcaatcggaccaccgcaggtcagccaactggctggtacaaggacctccgacattactactatcgcgccaggtgggagctgtacgatcggtcgcgtgatccccatgaaactcaaaaccttgcaacggatcctcgatttgcccagctgttggaaatgctgagagatcagttggcaaagtggcagtgggaaactcatgacccgtgggtctgtgcccctgatggtgtgctggaagagaaactgagcccacaatgtcagccgcttcataatgagctg

SEQ ID NO: 4208 - DNA, 1506 bp, Artificial Sequence
  derived and/or modified sequence
atgtcctgtccggtgccggcttgttgcgccctcctgctggtgctggggttgtgccgggcccgccctcgcaatgcgctgctcctccttgctgacgatggaggatttgagtcaggagcatacaacaacagcgcaatagccaccccgcacctggacgccttggcacggaggtcactgctttttagaaacgcattcacttcagtgtcgtcctgctctccgagccgcgcgtcgctcctgaccggactgccacagcatcaaaacggcatgtatggtttgcatcaagatgtccatcacttcaactcattcgataaagtgagatcgctccccctgctcctgagccaggcgggagtcaggaccgggatcatcggtaagaagcacgtgggaccggagactgtctacccgtttgatttcgcctacaccgaggagaatgggagcgttcttcaggttgggagaaacattactcgcatcaaattgctggtccggaagttcttgcaaactcaggatgatcgcccgttcttcctttacgtagcctttcatgacccgcatcggtgcggccactcgcagcctcaatatggaactttctgcgagaagttcgggaacggagaatccggaatgggtcggatcccggactggacccctcaggcctacgaccccttggacgtgctggtgccctacttcgtcccgaatactcccgccgcaagagcggacctcgccgcacagtataccaccgtcggcaggatggaccagggagtgggactggtgcttcaagagctcagagacgcaggagtgcttaacgatacgctggtgattttcacgtccgataatggcatcccgttcccgtccggacgtactaacctgtactggccagggaccgcggaacctctgctcgtgtcctcacctgagcacccgaaaagatggggacaggtgtccgaagcatacgtgagcttgctggacttgaccccaacgatcctggattggttcagcatcccctacccgtcgtacgcaatcttcggaagcaagaccatccacctcactggtcgctcgctgctgcctgccctcgaagcagaacctctgtgggctaccgtattcggcagccaatcccaccacgaggtgaccatgtcataccctatgagaagtgtacaacacagacattttcgcctggtgcacaatctgaatttcaagatgccatttcctatcgatcaagacttctacgttagcccaaccttccaagacctgctgaaccggactactgctggacaaccaactggctggtacaaggacctgcggcactactactaccgggctcggtgggaactttacgaccgctccagagatccacatgaaacccaaaacctcgctacggacccacgttttgcgcagttgctggaaatgctcagggaccagctggcgaagtggcagtgggaaacgcatgacccgtgggtgtgcgcgccagatggcgtgttggaagaaaagctgtccccccagtgtcagccacttcacaatgaactg

SEQ ID NO: 4209 - DNA, 1506 bp, Artificial Sequence
  derived and/or modified sequence
atgtcttgccctgtcccagcctgttgcgcgctgcttttggtgctcggtctctgtcgagctagacccaggaatgccctactgctgctggctgatgacgggggattcgaatcgggcgcatataataatagtgctattgctactccccacttggatgcattggccagaaggagcctcctgttcaggaatgcatttacatccgtcagctcttgctcaccttctcgcgcctccttactcaccggcctgccgcaacatcagaatgggatgtacggcttgcaccaggatgtgcatcactttaatagcttcgacaaagtgaggtctctgcctctgctcttatcgcaggccggcgttagaactggcatcatagggaagaaacacgttggcccagagacagtgtaccctttcgattttgcctacacggaggagaatgggtcagtgttacaggtagggcggaacattacacgtatcaagctgcttgtcagaaaattcctgcagacacaagacgatcggcctttttttctatatgttgcattccacgacccacatcggtgcggccactcccagccgcagtacggtaccttctgcgaaaagttcggtaacggcgaatctggcatgggcagaatccctgactggacacctcaagcctacgaccccctggatgtcctggtgccctattttgtgccgaataccccagccgctcgggctgacctcgcagctcagtacacaacggtgggccgaatggaccagggggttggcctcgttctgcaggagctgagagatgccggggtgctgaacgacaccttggtgatcttcacatccgataacggcattcccttcccttcaggcagaactaatttatattggcccggtactgcggaacctctgctggtgagttcccccgagcacccgaaaagatggggacaggtgtctgaagcatacgtttctctcctggacctgacgccgaccattcttgactggttctcaatcccctacccgtcttatgctatctttgggtccaaaaccattcacctaaccggacgatcactgctgccagctctagaggctgagcccctgtgggcgaccgtctttggatctcagagtcaccatgaggttactatgagctaccctatgcgatctgtacaacatagacacttcaggctggtccataatttaaactttaaaatgccatttccaattgatcaggacttctatgtgtcgccaacctttcaggacctgctcaatcgcacaacagctgggcagcctaccggctggtataaggacctcaggcattactattaccgagctagatgggaactgtacgatagaagtagagaccctcatgagactcagaacctagcgaccgacccgagattcgcccagctcttagagatgctcagagaccaactggctaagtggcagtgggagactcatgacccatgggtatgcgctccggacggagtcttggaagagaaactctcccctcagtgccagcctctccacaacgagcta

SEQ ID NO: 4210 - DNA, 1506 bp, Artificial Sequence
  derived and/or modified sequence
atgagctgcccggtgccagcctgttgcgctttgctgcttgtgctcggattgtgcagagcacgccctagaaacgccctgcttctcctggcagatgatggaggctttgagtcaggggcgtacaacaacagcgcgatcgccaccccgcacctcgacgctctggccaggcggtccctgctgtttcggaatgcgtttaccagcgtcagcagctgctccccatcccgggcttcgctcctcaccgggcttccgcagcaccagaacgggatgtacgggctgcatcaggacgtgcatcactttaacagctttgataaggtgcgtagcctgcccctgctcttgtcccaggcgggggttcgcaccggcatcatcggcaagaagcacgtgggcccggagacggtgtaccctttcgacttcgcgtacaccgaggaaaacggctccgtgctgcaggttggaagaaacataacccggattaagctgctggtccggaagttcctccagacccaagatgaccggccgtttttcctctacgtggcattccatgacccacaccgctgcgggcacagtcaaccccagtacgggactttttgcgagaagttcgggaatggagagtcgggtatggggcgaattcccgactggacgccgcaggcctacgatccgctcgacgtgcttgttccctacttcgtccccaacactccggcggcccgcgccgatttggcagcccagtacacgaccgtgggtcgcatggaccaaggagtgggactggttctgcaagaactgcgggacgcgggagtgctgaatgacaccctggtgatcttcacgtccgataacggcatcccttttccaagcggacgcaccaacctgtactggcctggtaccgcagaaccgctgttggtgtcaagccctgagcacccgaaacggtggggacaggtgagcgaagcgtacgtgtcgcttctcgacttgacccctactatcctggattggtttagcatcccatacccgtcgtatgctatcttcgggtcgaaaaccatccatttgacgggcaggtcgctgttgcctgctctcgaagcggagcccctttgggccactgtgttcggatcccagtcccatcatgaagtgactatgtcttacccgatgcggtcggtccaacaccggcacttccggctggtacacaacctcaatttcaagatgccctttccaatcgatcaggatttctacgtgtctccgaccttccaggatctgctgaataggactactgccggacaacctactgggtggtacaaggaccttcggcactactactacagagcacggtgggaactgtacgatcgatcgagggacccgcacgagactcaaaatctggctaccgacccgcggttcgcgcaactgcttgaaatgctgcgcgaccaactcgcaaagtggcagtgggaaacccatgacccttgggtctgtgcccccgacggagtgctggaagaaaaactgtcgccgcagtgccagccactccacaacgagctt

SEQ ID NO: 4211 - DNA, 1506 bp, Artificial Sequence
  derived and/or modified sequence
atgtcatgcccagtccctgcgtgctgcgccctgcttttggtgcttgggctctgtcgtgctagaccccggaacgccctgctgcttctggcagatgatggcgggtttgaaagtggcgcctacaataattctgctatcgcaaccccgcacctcgatgctctagctaggaggtcactgcttttccggaacgcatttacaagcgttagctcttgctccccttcacgcgcctccctgttgactggccttcctcaacatcaaaacggaatgtatgggttgcaccaggacgtgcaccatttcaattcgtttgataaagtccggagtctgcctctgttgttgtctcaggctggcgtgagaacaggcataataggaaagaagcatgtcggtcccgagaccgtgtacccttttgactttgcttatacagaggagaacggaagcgtgctccaggtgggtagaaacatcacaaggatcaagttgctcgtgcgaaagtttctgcagacacaggacgaccggcctttcttcttgtatgtcgctttccacgatccacatcggtgtggtcattctcaacctcagtatggaacgttctgcgagaagttcggaaacggagaatccggcatgggaagaatccctgactggacaccccaagcttatgaccccctagatgtccttgtgccatactttgttccaaatacacccgccgctagggccgacttagccgcccagtacaccacggtgggaaggatggatcagggagtgggattggtcttgcaagagttgagggacgcaggcgtgcttaacgatactctggttatttttaccagcgacaacgggattcctttcccatcgggcagaacaaacctctattggcctggtaccgcagagcctctgcttgtgagctccccagaacaccctaagaggtggggccaggtgtctgaagcttacgtaagtctgcttgacctgacgcctactatcttggattggttctcaatcccttaccccagctacgcaatcttcggatccaaaactattcatctgaccggaagatcgttgctccccgccctggaagcggagcctctttgggccaccgtttttggatctcagagccatcacgaagtcaccatgagctatcctatgaggtctgtgcagcacaggcacttccgactagtgcacaatttgaacttcaaaatgcccttcccgatcgatcaggatttctacgtctcaccgacttttcaggatctcctcaatcggactactgccgggcagcctacgggctggtacaaagacttacggcactattactatcgggctaggtgggagctgtatgaccgcagtagggatccgcatgaaacacagaacctggccacagatccacggttcgctcagcttctggagatgcttcgagaccagttggcgaaatggcagtgggaaacccatgatccgtgggtctgtgcccccgatggggtcttggaagaaaagcttagcccgcagtgccagcccctgcataacgagctt

SEQ ID NO: 4212 - DNA, 1506 bp, Artificial Sequence
  derived and/or modified sequence
atgagttgtcccgtcccagcttgttgtgccctcctcctcgtgttaggactatgcagagcgcgccctcggaacgccctattacttctggcagatgacggggggttcgaatcaggagcatacaacaactccgctatcgccactccccatctcgatgctctggcccgccgatcactactattccgcaatgcattcacatccgttagttcctgttccccttctagggcatcccttctgactgggctcccacagcaccagaatggaatgtatgggctgcaccaggatgtccaccactttaactcctttgataaagtgaggtctctgcctctacttctcagtcaggctggagttcgcactggaataatcggaaaaaaacatgttggacctgaaactgtttatccctttgattttgcctatacagaggaaaatggatccgtccttcaggtgggacggaatatcactcggatcaaactcctagttagaaaattcctacagacacaggacgataggccattctttctatatgtcgcttttcacgacccacaccggtgtggacattcccagcctcaatacgggactttttgtgaaaaatttgggaatggagaatctggaatggggcggatccctgattggactccacaggcctatgatcccctagatgttctagtcccatatttcgtccccaacactcctgcggccagggcagatctggcagctcagtatactacggtagggaggatggaccagggagtcgggcttgtgttacaagaactccgggatgccggagtcctgaacgatactttggtcatatttacttcagataacgggatacctttcccctcgggacgtacaaatctttactggcccggaacagcagaacctctcctcgttagttcccccgaacaccccaagcggtgggggcaggtttccgaagcttatgtgtccctactggatttaactccaacaatacttgactggttctcaatcccctacccctcctacgcaatctttggatctaaaacaatacatctgacagggcggtctctactcccagccctcgaggcagagccactgtgggctacggtattcggatcgcaatctcaccatgaagtgactatgtcttatccaatgaggtcagtacagcacaggcatttccggcttgtgcataacttgaatttcaaaatgccctttccaatagatcaggacttttatgtctcccctactttccaagatctccttaatcgcactactgctgggcagcctacagggtggtataaagaccttcggcattattattatagagccagatgggaactgtatgaccgcagtagggacccccatgaaactcagaacctcgctactgatcccagatttgcccagcttttagaaatgctgcgagaccagttggcaaaatggcagtgggagactcacgatccttgggtatgtgcccctgatggagtgttggaagagaaactgtctcctcagtgtcagccattgcataatgaactc

SEQ ID NO: 4213 - DNA, 1506 bp, Artificial Sequence
  derived and/or modified sequence
atgtcctgtccggtgcctgcctgttgtgcactgttgttggttcttggcctctgccgggctagaccgcgcaatgcacttctgctgttggccgatgacggaggatttgaatccggcgcctataacaattcagccatcgccactccccatcttgatgcgctggcccggcgctccctcctgtttaggaacgctttcacctcagtgtcttcatgctcaccttctcgtgccagtctgctgacaggactaccacagcaccaaaacggcatgtatggcctgcatcaggacgtccatcactttaactcttttgacaaagtgaggagtcttccactgctgctgagtcaggcaggcgtaaggactggcatcataggaaagaaacacgtggggccggagaccgtatatccctttgactttgcctatacagaggagaacgggagcgtccttcaggtcggacggaacataactcgcattaagctgctggtcaggaagttcttacagacacaggatgataggccctttttcctctacgtggcttttcacgaccctcatagatgcggacatagccagccgcaatacggcacgttttgcgaaaagttcgggaatggagagagtggtatgggtcggattccggactggactccccaggcgtatgaccccctggatgtccttgtcccttacttcgtgcccaatacgccagctgcaagagcggacttggccgctcaatatactacagttggccgcatggaccagggtgtgggccttgtgctccaggagctgcgcgatgcaggcgtgcttaacgacacactcgtcatcttcacgtccgataatggcattccgttcccatctggtagaacgaatctatactggcccggaacagccgagcccttgcttgtcagcagccccgaacaccctaaacgctgggggcaggtgagcgaggcctatgtttctctgttagatttgacgcctaccattctggattggttctccataccctatccatcttatgctattttcgggtcaaaaactatccatctgaccggcaggtctctgctgcctgcgctggaagcagagcccctctgggccactgtgttcggcagccagtcacatcatgaggtgacaatgagttatcccatgcggagcgttcaacaccgccatttcaggcttgtgcataacctgaactttaaaatgcctttccctatcgatcaagatttttacgtatctccgacattccaagatctactgaacagaacaacagcagggcagcccaccgggtggtacaaagatctgcggcactattattatagggctaggtgggagctctacgacagatcacgcgatcctcacgagacccagaatctcgctacggatcctcgctttgcccaattactggagatgctgcgcgatcaactggccaagtggcagtgggagacgcatgatccctgggtgtgtgcgcccgatggcgttttggaagagaagctttcaccgcagtgccagccactgcacaacgagctg

SEQ ID NO: 4214 - DNA, 1506 bp, Artificial Sequence
  derived and/or modified sequence
atgtcgtgtcccgtccccgcatgttgcgcactgctcctcgtgcttggcctgtgtcgtgctagaccccgaaatgcattgctgctgcttgcggatgatggtggattcgagtccggagcctacaataactcggcgatcgcgactccacaccttgatgcattggctagaagaagcctgctcttccgaaacgcctttacttctgtgagcagctgttccccctcaagagcatcgcttctcactggacttcctcaacatcaaaacggtatgtacggcctgcatcaagacgtgcatcactttaactcatttgataaggtcaggtcactgcctctgctgctttcccaggccggcgtgcggactggtattatcggcaagaagcacgtgggccccgaaaccgtgtacccttttgacttcgcctacactgaagaaaacggttcggtcctgcaagtgggaaggaacatcaccagaatcaagctgcttgtgcggaagttccttcaaactcaagacgatagaccctttttcctctacgtggcctttcatgaccctcacagatgtggacactcgcaaccacagtacggaactttttgcgaaaagttcggtaatggggaaagcggaatgggacgtataccagattggacgcctcaagcctacgaccctctggatgttcttgtcccatacttcgtgcctaatactccagccgccagagcagatctcgcagcccagtacactactgtcggtcgaatggaccaaggtgtgggactggtcctccaggagttgcgggatgcgggggtgcttaatgatactctggtaatctttacctcagataacggaataccattcccgtcaggaagaactaatctttactggcctggcaccgccgaacccttgctggttagctccccagagcaccctaaacggtgggggcaagtgagcgaagcatacgtgtccctgcttgatctgacccctaccattcttgactggtttagcattccatacccgtcgtacgcaattttcggatcgaaaactattcatcttaccggtcgatcactgctccctgcacttgaagcagaaccgctgtgggcaactgtgtttggttcgcagtcacaccacgaggtcactatgagctacccaatgcgttccgttcaacatagacattttcgactggtgcataacctgaacttcaagatgccctttcctatcgatcaggacttttacgtgtcccctacctttcaagatctcctgaatagaactaccgcagggcaaccgactggatggtataaggatctcagacattactactacagagctaggtgggaactttacgatcggtcccgtgatccacatgaaactcagaacctcgcaaccgatccccggtttgcacaactgctggaaatgctgagggatcaattggcaaagtggcaatgggagactcatgatccatgggtttgtgcccctgacggcgtgctggaggaaaagctgtcacctcaatgccaaccattgcataacgagctg

SEQ ID NO: 4215 - DNA, 1506 bp, Artificial Sequence
  derived and/or modified sequence
atgtcgtgccccgtgcctgcctgttgtgcacttctgctggtgctcggcctctgtcgtgcacggcccaggaacgcactcctccttcttgcagacgatggcgggtttgaatccggcgcctacaacaactcggctatagcaacgccccatctggacgctctggcacgcagatccctgctttttcgtaatgcgtttacctctgtgtcgtcatgttcaccttctcgagcctctctccttactggacttcctcaacaccagaacgggatgtacggacttcatcaggacgtccatcacttcaattcctttgataaggtgcggtccctcccacttctgcttagtcaggcgggagtccgtaccggcatcattggaaaaaagcacgtcggacccgaaaccgtctacccctttgattttgcctacaccgaagagaacggatcggtgctccaagtgggccgtaacattaccaggattaagctcctggttagaaagttccttcagactcaagatgaccgccccttctttctctacgtggccttccatgacccgcatcgttgtggtcattcgcaacctcaatacggaacgttttgcgagaaatttggaaatggcgaatccggtatggggagaattccggattggaccccacaggcttacgatccattggatgtgctggtcccttactttgtgccaaatacccctgcagcccgcgcagacctggcagcgcagtacacgactgtgggtcgaatggatcaaggggtgggtcttgtgcttcaagaacttagggacgcaggagtcctcaatgataccttggtgatattcacttccgataatgggattcctttcccatctggtcgcactaacctgtactggcctggtaccgcagaaccgttgctggtgtcgtccccggaacatccaaagaggtgggggcaggtgtcggaagcatacgtgtcgctgctcgatctcaccccaacgatccttgactggttcagtataccttacccttcgtatgctatctttggtagcaagactattcaccttaccggcagatcccttcttcccgcacttgaagcagaacctctgtgggcaactgtgttcggttcacaatcgcaccatgaagttactatgtcctatcctatgagatccgttcagcataggcacttccgtctggtccacaacctgaacttcaaaatgccctttcccatcgatcaagacttttacgttagcccgacttttcaagacttgctcaataggaccacggcgggtcagccaactggttggtacaaagatctgcgccactactactaccgagccagatgggaattgtacgatcggtcccgagatccacatgagactcagaacctcgcgactgatccccgatttgcgcaacttctcgagatgctcagggatcagctggccaagtggcaatgggagactcatgatccatgggtctgcgcacctgacggagtcctcgaggagaagctgtcgcctcagtgtcaaccattgcataacgaactt

SEQ ID NO: 4216 - DNA, 1506 bp, Artificial Sequence
  derived and/or modified sequence
atgtcttgcccggtgccagcgtgttgtgctttgctgttagtgctggggctttgtcgtgcaagaccacgaaacgcactattgctgttggcggacgacggtgggttcgaatcgggagcgtacaacaactcagccatagccacaccacacttagacgctctggctcgacggtccctcttgttcaggaatgcctttacgagcgtgtcatcgtgttcaccatcgcgtgcctcacttcttacaggactgccgcaacatcaaaatggtatgtacggacttcaccaggatgtgcatcatttcaattcttttgataaggtccgctcacttccgttgttgctttctcaggccggagtaagaactggaattatcggaaagaaacatgtgggacctgaaacggtgtatccgtttgatttcgcctataccgaagaaaacggctctgtgctccaggtgggaagaaatatcactagaatcaagctccttgtccgtaagttccttcagacacaagatgatcggccttttttcctgtatgtagcttttcatgacccacatcgttgtggccactcacaaccgcagtatggaactttttgtgaaaagttcggaaacggagagagtggcatgggacgaattccagactggacaccacaggcttatgatccactggacgtgctagtgccatactttgtgccgaatacgccagcagctcgagctgaccttgccgctcaatacaccactgttggtaggatggaccaaggagtaggccttgttctacaagagttaagggatgcgggggttcttaatgatacattggtgatattcacatctgacaatggaattccattcccttcgggacgtacgaatctgtattggccggggaccgccgaaccgctattagtttcgtctccagagcatccaaagcgttggggtcaagtatctgaagcctacgtctcattacttgatctgacgccgacaatcttggactggttttctattccatacccaagttatgcaatatttggttccaagactattcatctaacgggccgatcgctactgccagcattggaagcagaaccgctctgggctactgtattcggttcacaatcacatcacgaggttacaatgagttaccctatgcgatcagtgcaacaccgtcatttccgacttgtccataatttaaattttaaaatgccgttccccattgatcaagatttctatgtttcacctaccttccaagatctcctaaacagaactacagctggacaacccactggttggtataaagacttgaggcactattactatagagctagatgggaactctatgatcgatctcgagatccacatgaaacacaaaatttggctaccgatccgcgtttcgctcaactgcttgagatgctccgggatcagcttgccaaatggcaatgggaaacacatgatccatgggtttgtgcgccagatggagtgttggaggaaaagctgtcaccgcaatgccaaccactgcataatgaactt

SEQ ID NO: 4217 - DNA, 1506 bp, Artificial Sequence
  derived and/or modified sequence
atgtcctgtcctgtaccagcctgctgcgccctgcttctcgtcctgggactgtgtagagcccgtccgaggaacgcactcttgctccttgccgacgatggaggatttgagtcaggggcctacaataatagcgcgatcgccactcctcacctcgacgcattggctcgcagaagcctgctttttcgaaatgccttcacctctgtctctagctgctcaccaagtcgagcctctctgctgacagggctgccacagcaccagaatggcatgtacggcctacatcaggacgtacatcatttcaactcgttcgacaaagtaaggagtcttccactgctgttgagccaggccggggtgcgcactggaatcatcggcaaaaagcatgtcggacctgaaacagtctatccttttgattttgcctacacagaagagaatggcagcgtcctccaggttggcaggaatattaccagaataaaactcctcgtgagaaagttcctgcagactcaagacgacaggccgttttttctatatgtggctttccatgatccacatcgctgcgggcatagtcagccccagtatgggaccttctgcgaaaagtttggcaatggggagagtggcatgggcagaatcccggattggacgccccaggcatatgaccccctcgatgtgctcgttccatatttcgtccctaacacccctgccgcacgtgccgatcttgccgcccagtacaccactgtcggtaggatggaccagggtgtgggccttgttctgcaggagctgagagatgctggcgtgctcaatgatacgctcgtgatatttactagtgacaacgggatacccttcccctccgggcgcaccaacctctattggcccggtactgccgaaccactgttggtgtccagcccggagcatcccaaacggtgggggcaggtttccgaagcctatgtgtccctccttgatctaacccctaccatactggattggttttccattccctatccatcttacgctatctttggatcaaagaccatccacttaacagggcgctctctgctccccgcattagaggctgagccactgtgggctacagtgttcggttctcagtcccaccacgaggtcacgatgagttaccccatgcggagcgtccagcaccgccactttcgccttgttcataacttaaacttcaaaatgcctttcccgatcgatcaggacttttatgtgtccccaacgttccaggacctgttgaatagaactaccgcagggcagccaactgggtggtataaagatctgcggcattattattaccgggcaaggtgggagttgtacgatcggtcacgtgatccacatgaaacccaaaatctagcaaccgatccacgcttcgctcagctcctggagatgctgagagaccagttggcaaaatggcagtgggaaacccatgacccctgggtatgtgcccccgacggggtgctggaggagaaattgagcccacagtgccagccacttcataatgaactg

SEQ ID NO: 4218 - DNA, 1506 bp, Artificial Sequence
  derived and/or modified sequence
atgtcatgcccagtgcctgcctgttgcgcactgctgctggtgctgggactctgccgcgcccggccacgcaacgctctgctgctgctggcggacgacggcgggttcgaatcaggagcgtacaacaactctgcgatcgcaaccccgcatcttgatgccctggccagacgctccttgctgttccgcaacgccttcacttcggtgtcgtcttgcagcccgtcccgggcatccttgctgactggactgcctcagcaccaaaatgggatgtacggtctgcaccaggacgtgcatcactttaactcgttcgacaaagttagaagccttccactgctcctttcacaggcgggtgtgcggactggaatcatcggcaagaaacacgtgggcccggaaaccgtgtacccgttcgatttcgcctataccgaggagaatggatcagtgttgcaggttggtcggaacattactcggattaagctgttggtgcgcaagttcctccagacgcaagacgaccgccctttctttttgtacgtcgcatttcacgacccgcaccgctgcggacatagccagccgcaatacggaaccttctgcgagaaattcggaaacggagagtcgggaatgggaagaatcccggattggactcctcaggcttacgatcctcttgatgtcctggtgccgtactttgtgcctaatactccggccgcaagagctgacctggctgcgcagtacaccaccgtgggccgcatggatcagggggtgggactggtgttgcaggagcttcgcgacgccggtgtcctgaatgatactctcgtcatcttcacctcagacaacggaatcccttttccatcgggtaggactaatctgtactggccgggcactgccgaaccgttgttggtgagcagcccggaacacccaaagcgttggggccaagtgtccgaggcatacgtgtccctcctggatctgacgcctaccatcctcgactggttttcgatcccgtacccgtcatacgccatcttcggatcaaagactatccaccttaccggacggagcctcctcccagccttggaagcggaaccgctgtgggcgaccgtgttcggaagccagtcgcaccacgaggtgacgatgtcctaccccatgcggtcggtgcaacaccggcacttccgcctggtccacaatctgaacttcaagatgcctttcccgatagaccaggacttttatgtgagcccgacctttcaagatctgctgaaccggaccaccgcagggcagcccaccggctggtacaaggacctgcggcactattactaccgcgcaaggtgggaactgtacgatcggtcgagagatcctcatgaaacccagaacttggccaccgatccgcggtttgctcaactcttggaaatgctccgggaccaactggccaagtggcaatgggagactcatgacccttgggtgtgcgccccggatggtgtcctcgaagaaaagctgagcccacagtgtcagcctctgcataacgaactg

SEQ ID NO: 4219 - DNA, 1506 bp, Artificial Sequence
  derived and/or modified sequence
atgtcatgcccggtccccgcctgctgcgcgctgctcctcgtgctggggctgtgtagggccaggccgagaaacgccctgctgctgttggcagacgatggaggatttgaatccggagcctacaataacagcgcaatcgcaacccctcaccttgacgcgctcgctagacgcagcctgctgtttagaaacgcatttacctccgtttcctcctgcagcccctcgagggcttccctgcttaccggtttgccgcagcaccagaacggaatgtacggtctgcaccaggacgtccaccatttcaacagcttcgacaaagtgcggtccctgccactcctgctcagccaggccggagtgagaaccggcatcatcggaaagaaacacgtggggccggaaactgtgtacccattcgatttcgcctacaccgaggaaaacggatcggtgcttcaagtgggtcggaatatcacccggatcaagttgcttgtgcggaagtttctgcaaactcaagatgataggccgttcttcctgtacgttgcctttcacgatccgcaccgctgcggacactcccagccgcaatacggaactttctgcgaaaagttcggaaacggagagtcggggatgggacggatccctgactggacgcctcaggcctatgatcctctcgatgtgttggtgccgtactttgtgccgaacactccagcggctcgcgcagatctggcggctcaatacactactgtcggcagaatggaccaaggagtcggactggtgttgcaggaactgcgggacgcgggagtcctcaatgatacgctcgtcattttcaccagcgataatgggatcccgttcccatcgggacgaaccaacctttactggcctggcactgcagagccgctcctcgtgagctcgccagagcatccgaagcggtggggtcaggtgagcgaggcttacgtgtccctgctggatctcactccaaccatcctggactggttcagcatcccgtacccgtcatacgccatctttggctccaagactatccaccttaccggcaggtccctgctgcccgcgcttgaagccgagccactctgggctactgtgttcgggtcccaaagccaccacgaagtcaccatgagctatccaatgagatctgtgcagcaccgccacttcagactggtccacaatctcaacttcaagatgcctttcccgattgatcaggatttctacgtgtcgccgacgttccaagacttgctgaacaggactaccgcggggcagccgaccggatggtacaaggacctcaggcactactactacagggcacggtgggagctgtacgatcggtcgcgggacccccatgaaacccagaatttggccaccgacccccgcttcgcgcaacttctcgagatgttgcgcgaccagctggcaaagtggcagtgggaaacccatgacccgtgggtgtgcgcccctgatggagtccttgaagagaaactttcgccgcagtgccagcccttgcataacgaactg

SEQ ID NO: 4220 - DNA, 1506 bp, Artificial Sequence
  derived and/or modified sequence
atgtcctgtcccgtcccagcctgctgcgctcttctcctcgtcttgggcctttgtagggctcgccccagaaacgccctgctcctgctggctgatgatggtggctttgagtccggcgcttataacaattctgccatcgctacccctcatttggatgctcttgctcgtcgtagcctgctctttaggaatgctttcaccagcgtgtcttcctgttcaccttctagagccagcctgctgaccggccttccccagcaccaaaatggcatgtatggcctgcaccaagatgtccatcactttaactccttcgataaagtgaggagtctgcctctgctgctgtcccaggccggagtcaggacaggtatcatcggtaagaagcacgtcggtcccgagaccgtgtatcccttcgacttcgcctacaccgaagaaaatggaagcgtactccaggtgggccgtaatatcaccaggattaagcttttggtcaggaagtttcttcagacacaggatgatcgcccttttttcctctatgtggcctttcatgatccccaccgttgtggccactcacagccccagtatggaaccttctgcgagaaattcggcaatggcgaatccggtatgggccgcatccccgattggaccccccaggcctacgatccattggatgttctggtaccatacttcgtgcctaacacacctgctgccagggctgacctggccgctcagtatactaccgtaggtagaatggaccagggcgtgggactggttctccaggagctgagagacgctggcgtgttgaatgacactctggtgattttcactagcgataacggcatccccttcccttccggcaggacaaacctgtattggcccggtactgccgagcctctcctggtgagctcacctgagcatcctaagcgctggggccaggtaagcgaggcttatgtgtctctgctggatctgacaccaaccatcttggactggttctccatcccttaccctagctatgcaatcttcggatccaaaaccatccaccttacaggacgctccctccttcccgcattggaggctgagccactctgggctaccgtgtttggtagccagagtcaccacgaggtgaccatgtcttatccaatgagatctgttcaacatcgccacttccgcttggttcataacctcaacttcaagatgccattccctatcgatcaggatttctacgtaagccctaccttccaggatctccttaacaggactacagctggtcagcctacaggttggtacaaggatctgcgccactactactacagggcaaggtgggaactgtatgataggagccgcgatccacacgagacccagaacttggctaccgatccaagattcgcacagcttctcgaaatgctgcgcgaccaactcgcaaagtggcagtgggaaactcacgacccctgggtgtgtgcaccagatggagtgttggaggaaaagctgagcccccaatgtcagcccttgcacaacgagttg

SEQ ID NO: 4221 - DNA, 1506 bp, Artificial Sequence
  derived and/or modified sequence
atgtcctgtccggtgcccgcttgctgtgctttgctccttgttctcgggctctgccgtgccaggcctcgcaacgcgctcttgttactggcggatgacggcggtttcgaaagcggcgcctacaataattcagccatcgccacccctcacctggacgctttggcccggagaagtctgcttttccggaacgcattcacatctgtttctagctgctctccctccagggcctcgctcctgaccggactgccccagcatcagaatggcatgtatggcttgcaccaggacgtgcaccactttaactctttcgacaaagtcaggagcctccccttactcctttctcaggccggagttaggaccgggattatcggaaagaaacatgtagggccggagacagtgtacccctttgatttcgcatacactgaggaaaacggcagcgttctccaggtgggaagaaacataactaggatcaagttactggtgcgcaagttccttcagacacaggatgaccggccgttcttcctttatgtggccttccacgacccccaccggtgtgggcactctcagccccaatacgggactttctgcgagaagttcgggaacggtgagagtggaatggggcgaattcccgattggacacctcaggcatatgatcctcttgatgtgttggtaccttacttcgtgcccaatacacctgcagccagggctgacctggcagcacaatatactactgttggacgaatggaccagggggtagggctcgtcttacaggagctgcgggacgccggggtgctgaacgacaccttggtcattttcaccagcgacaatgggatcccatttccctctggccgtaccaatttgtattggccaggtaccgctgagcctttactggtgtcttctccagaacatcccaaacgatggggccaggtgagcgaagcctacgtgagtctcttagacctcacccccaccatcctggattggttcagtatcccttatccaagctacgcaatcttcggctcaaagacaatacatctcactggacggtctttactgcccgctctggaggcagaaccgctgtgggccaccgtctttggttcgcaatcccaccacgaagtcaccatgagctacccaatgagaagtgtgcagcaccggcatttccgactggtgcataacctgaatttcaaaatgcccttccccattgatcaggatttttacgtttcgcctactttccaagatctcctaaaccggaccacggctggccagcctacaggctggtacaaagacctgcggcactactactaccgcgcaaggtgggagttatacgaccgatcgcgcgatccccacgagactcagaacctggctactgatccgcggttcgcgcagcttttggagatgcttagggatcagttggccaagtggcagtgggaaacccacgacccatgggtctgcgccccggacggcgtgttggaggagaagttgagtcctcagtgccagccccttcataacgagctc

SEQ ID NO: 4222 - DNA, 1506 bp, Artificial Sequence
  derived and/or modified sequence
atgtcctgtccagtccccgcctgctgtgccttactattagtgctgggcctatgtcgcgctcgcccaagaaacgcactgctcctcctagctgacgatggaggtttcgagagcggggcctataataatagcgctatagctactcctcacctggacgctctcgccaggcgttctttactctttagaaacgcctttaccagcgtgagctcatgctctcccagtagagcaagcttgctaaccgggcttccgcaacaccaaaatggaatgtacggcctgcatcaagacgttcatcactttaattctttcgataaggtccgcagtctccctttgctgttatcccaggccggtgtgcgaacagggatcataggtaagaaacatgttggcccagagacagtttaccccttcgacttcgcctatactgaagagaacggcagcgttctccaagtgggacgcaatatcaccaggattaagctgttagtccgaaaatttttacagacgcaggatgacaggcctttctttctctatgttgccttccatgatccacacaggtgcggtcatagccagcctcagtacggaaccttttgcgagaaattcggaaacggagagagcgggatgggcagaatccccgactggacacctcaagcgtacgaccccctcgacgtgctcgtcccatatttcgtcccaaatactcctgcagcccgagcagacctggcggctcagtacaccacagtcggcaggatggaccaaggcgtaggactggttctgcaggagctaagggacgctggggtgctgaacgacaccctagttatttttacaagtgataatggtatccccttcccttctgggcgcaccaatctttactggcccgggacagcagagcctctattggtgtcgagtccagagcaccctaaaaggtggggtcaggtctcagaggcctatgtgagcctgctggacctaacaccgaccatcctggattggttttcgattccgtatccctcatacgctatctttggaagtaagaccatccatctgaccggtagatcactgcttccagccttggaggcagagccactttgggcaacagtatttggatcacagtcccatcacgaagtcaccatgagctaccctatgcgcagtgtgcagcaccggcattttagactcgtgcataacctgaacttcaagatgcccttcccaatcgaccaggacttttacgtaagcccaacttttcaggacctcctgaacagaactacagccgggcaaccgacagggtggtacaaggacttacgacactattactacagggctcgatgggaactgtatgataggtcacgcgatccgcatgaaacccagaacttagctaccgatccgcgctttgcccagttgctcgaaatgctcagggatcaactcgcaaaatggcagtgggagacccatgacccatgggtgtgcgcccctgacggcgtgttagaggagaaactgtcaccccagtgccagcctctccacaatgaattg

SEQ ID NO: 4223 - DNA, 1506 bp, Artificial Sequence
  derived and/or modified sequence
atgtcctgtcccgtgcctgcatgctgcgccctgctgctcgtgctgggactctgccgggcgagaccaagaaacgctctcttactattagccgacgatggggggttcgagtccggagcatataacaattctgcaattgccaccccacatctggatgccctcgcccggcggagtctgctgttcagaaatgcttttacttctgtgtcgagctgtagcccatccagggcaagtcttctgactggattgcctcagcaccaaaacgggatgtacggcttgcaccaggacgtgcaccattttaattcttttgataaggtgagaagtctgccccttctgctatcgcaggctggagtccgtaccggcattattgggaagaaacatgtggggcctgagaccgtctatccttttgatttcgcctatactgaagagaacggatccgttttgcaagtcggtagaaatataacccggattaaactgctcgtgcgtaaattcctgcagactcaggatgatagacccttcttcctgtacgtggcttttcacgatccacatcgctgtggccactcacagccgcagtacggtaccttttgtgaaaagttcggaaatggggagtccggcatgggacggatccctgactggaccccccaggcttatgatcctttggacgttttggtgccttacttcgtaccaaatacacctgcagcgagagccgaccttgccgctcagtacacgacagtagggaggatggatcagggggtgggattggtcctgcaggaactgcgggatgcgggcgttctgaacgatactctggttatttttacgagtgataatggcataccgtttccctcgggccgaaccaatctgtattggcccggtacggctgagccactcctggtctcttctcctgaacacccaaaacgatggggacaggtcagcgaagcctacgtttccctgctggacctcaccccaaccattctggattggttctccattccatacccaagctatgcgatctttggctctaagacaatacacttaactggaagatctcttttgcctgccttggaggcggaacccctttgggccactgtgtttggttctcagagccaccatgaggtgacaatgtcctaccctatgcggagtgtacagcatcgtcacttcaggttggttcacaatcttaactttaagatgcccttcccaatagaccaggatttctatgtgtcaccaacattccaggacctgctaaatcgtactactgccggacaacctacaggatggtataaggacctgcgacactactattaccgtgcccggtgggaactgtatgaccgaagtcgtgacccacacgaaacgcagaatctcgcaacagacccacggttcgctcagctgctcgaaatgctgcgagatcagctcgccaagtggcagtgggaaacacatgatccctgggtttgcgctcctgatggggtcctggaagaaaagctgtcaccccagtgccagccgctccacaatgagctg

SEQ ID NO: 4224 - DNA, 1506 bp, Artificial Sequence
  derived and/or modified sequence
atgtcttgcccggtccctgcctgttgtgccctgctgttggtgcttggcctatgcagggcccgcccaagaaatgcgctactgttactggctgatgatgggggcttcgaatctggcgcttataacaacagtgcaatcgcgaccccacatctcgacgctctggcacgtagaagcttactgtttcgcaacgccttcacatctgtgtcatcttgcagcccaagccgggctagtcttctgaccgggctgccccagcaccagaacggaatgtacggattgcaccaggatgtgcatcatttcaattccttcgacaaagtgaggagcctgccactcctgttgagccaggccggagtgcgcaccgggattattggcaagaagcacgttggcccagagaccgtttacccgttcgattttgcttataccgaagaaaatggcagcgtgctgcaggtcgggagaaatatcacccgaatcaagctgctggttaggaaattccttcagacgcaagatgatagaccctttttcctgtatgtagccttccacgacccacatcggtgcggccattctcagcctcaatacggcactttctgtgaaaagttcggaaatggtgagtcaggaatggggcgcatccctgactggacaccgcaggcttatgaccccttggacgtgttggtgccatatttcgtgcccaacacacccgccgcacgggcagacttggctgcacagtatactacagtgggccggatggaccagggcgtgggactagtgctgcaggaacttagggacgcaggcgtactgaatgatactctagtgatttttacctctgacaacggcattccttttccttcgggacggacaaacctctattggcccggaaccgccgagccactcctggtaagctcccccgaacaccctaagaggtggggccaggtcagcgaggcctatgtgagcctgctagacctgacacctaccatacttgactggttctccatcccttacccctcttacgctattttcggatcaaagacaatccacctcactggtcgcagtcttcttcccgcgctggaggccgaacctctgtgggccactgtgttcggaagccagagtcatcacgaggtgacgatgagctaccccatgcgcagtgtgcagcataggcactttcgtctagtccataatctgaattttaagatgccctttccaatagaccaggacttctatgtgtcacctactttccaggatctcctcaatagaacgacagcagggcagccaaccgggtggtataaagacttgcgccattactactacagagcgcggtgggaactgtacgacagaagtcgagacccccatgagactcagaacctcgccacggatcctcgattcgcacagctgcttgaaatgctacgcgaccaactggcgaaatggcagtgggaaactcatgacccttgggtgtgtgccccagatggcgtgctcgaggaaaagctgtccccacaatgtcagcccctgcataacgagtta

SEQ ID NO: 4225 - DNA, 1506 bp, Artificial Sequence
  derived and/or modified sequence
atgtcgtgtccggtaccggcgtgttgtgcgttattactagttctaggtctatgtcgagcgcgtccgcgtaatgcgctattattattagcggatgatggtggttttgaatcgggtgcgtataataattcggcgatagcgacgccgcatttagatgcgctagcgcgacgttcgctattatttcgtaatgcgtttacgtcggtatcgtcgtgttcgccgtcgcgagcgtcgctactaacgggtttaccgcaacatcaaaatggtatgtatggtttacatcaagatgttcatcattttaattcgtttgataaagttcgatcgttaccgctattactatcgcaagcgggtgttcgtacgggtataataggtaaaaaacatgtaggtccggaaacggtatatccgtttgattttgcgtatacggaagaaaatggttcggttctacaagtaggtcgaaatataacgcgaataaaattactagttcgtaaatttttacaaacgcaagatgatcgaccgttttttttatatgtagcgtttcatgatccgcatcgatgtggtcattcgcaaccgcaatatggtacgttttgtgaaaaatttggtaatggtgaatcgggtatgggtcgaataccggattggacgccgcaagcgtatgatccgttagatgttctagttccgtattttgtaccgaatacgccggcggcgcgtgcggatttagcggcgcaatatacgacggttggtcgtatggatcaaggtgtaggtctagttctacaagaactacgagatgcgggtgtactaaatgatacgctagtaatatttacgtcggataatggtataccgtttccgtcgggtcgtacgaatttatattggccgggtacggcggaaccgttactagtatcgtcgccggaacatccgaaacgttggggtcaagtttcggaagcgtatgtatcgctactagatctaacgccgacgatactagattggttttcgataccgtatccgtcgtatgcgatatttggttcgaaaacgatacatttaacgggtcgttcgttactaccggcgctagaagcggaaccgttatgggcgacggtatttggttcgcaatcgcatcatgaagtaacgatgtcgtatccgatgcgatcggtacaacatcgtcattttcgtctagtacataatttaaattttaaaatgccgtttccgatagatcaagatttttatgtttcgccgacgtttcaagatttactaaatcgtacgacggcgggtcaaccgacgggttggtataaagatttacgtcattattattatcgtgcgcgatgggaactatatgatcgatcgcgtgatccgcatgaaacgcaaaatttagcgacggatccgcgttttgcgcaactactagaaatgctacgtgatcaactagcgaaatggcaatgggaaacgcatgatccgtgggtttgtgcgccggatggtgtactagaagaaaaattatcgccgcaatgtcaaccgttacataatgaacta

SEQ ID NO: 4226 - DNA, 1506 bp, Artificial Sequence
  derived and/or modified sequence
atgtcatgcccggtgccagcttgctgcgcattgttgctcgtgttgggactttgccgggccaggcctcgcaacgccctccttcttttggccgacgacggtggtttcgagagcggagcgtacaacaacagcgccatcgcaaccccacatttggacgcgctggctcgccgttccctgctgttccgcaatgctttcacttcagtctcatcttgttcaccgtcgcgggcatcactcctcaccggcctcccacagcatcagaacggcatgtacggtttgcatcaggatgtccatcatttcaactctttcgataaggtgcgctcgctgccacttctgctcagccaggctggcgtcagaactggcatcatcggcaagaaacacgtgggaccagagactgtctaccctttcgatttcgcctatactgaagagaatggatccgtgttgcaggtgggcagaaacatcacccggattaaacttctggtcagaaagttcctccaaacgcaagacgacagaccgttcttcttgtacgtggcgtttcacgatccgcaccggtgtgggcactcccagccacagtacggcactttttgcgaaaagttcggcaatggagagtctggaatgggaaggattcctgactggaccccacaggcatacgatccactggatgtgctggtgccatacttcgttccaaacactccggccgctcgggccgaccttgcggcgcagtacactaccgtgggccgcatggatcaaggggtgggactggtgttgcaagagctgagagacgccggtgtactgaatgacacgcttgtcatcttcacttcggataacggaatcccgttcccctccggccggaccaatctgtactggccaggaaccgcggaaccgctccttgtgagctccccggaacaccccaagaggtggggacaggtttcggaggcttatgtgagcctgctggatcttactccgactattctcgactggttttcgatcccgtacccgtcctacgcgattttcgggtcaaaaactattcacttgaccgggcgctccctcctgccggccttggaagccgaacctctgtgggcaacggtgttcggatcgcaaagccatcatgaagtcacgatgtcctaccccatgcgcagcgtgcagcacagacacttccgcctggtgcacaatctgaacttcaagatgccgtttccgattgaccaagatttctatgtgtcgccaacttttcaggacctgctgaaccgcactactgcaggacagcccacgggatggtacaaggacttgcgccactactactacagggcccggtgggaactgtacgaccgctccagggatccgcatgaaactcagaatctggccacggacccgcggtttgcacagcttctggagatgcttcgggaccaactggccaaatggcaatgggagactcacgacccctgggtctgcgcgccggacggtgtgctggaagaaaagctgagcccccagtgccagcctctccacaatgagttg

SEQ ID NO: 4227 - DNA, 1506 bp, Artificial Sequence
  derived and/or modified sequence
atgtcttgtccagtccccgcctgttgtgccctgctattagtgctgggattatgtcgcgccagaccccgaaatgctctactgctcttggctgatgatggaggcttcgagtcaggagcgtacaataactccgctatcgccactccacacctggacgcacttgctaggagatccctcctctttcgcaacgcattcacgtcggtgagttcatgtagcccctctcgcgccagtttgctcacagggctgccccagcatcagaatggaatgtacggactgcatcaggatgttcatcactttaattctttcgacaaggtgcgttccctgccacttctactttcccaggctggggtgaggacgggcatcattggtaaaaagcacgtgggccctgaaactgtgtatccgttcgatttcgcatacaccgaggagaatggttcagtgttgcaagtgggtcgaaatattaccagaattaagttgctagtacgcaaattcttgcagacacaggatgatcgccccttttttctatatgtcgcctttcacgatccacatagatgcggacacagccagccacagtacggcacgttttgtgagaaattcggcaacggcgaatcgggtatggggcgcatccctgattggaccccccaagcatacgaccccctggacgtactggttccctacttcgtccctaatactcctgcagccagagcggatctagctgctcaatacactacggttggaaggatggatcagggggtaggcctggtgctccaggagctgcgcgatgccggcgttctcaatgacacgctggtgattttcacttccgacaatggaatcccttttccttcaggccgcacgaatctgtactggcctggcacagcagagccactgttggtgtcttcccctgaacacccaaagaggtggggacaggtgagcgaggcttatgtctcattgctggacctgactcctactatacttgactggttctccatcccctacccaagttacgcgatattcggctccaaaactattcacctgacgggccgcagcctgctgcccgcactcgaggcagaacccctgtgggccacggtgtttggctcccaatcccaccatgaggttaccatgtcttaccccatgcgctcggtgcagcacagacattttcggctggtgcataatcttaacttcaagatgcctttccccatcgaccaagacttctatgtgtcccctacgttccaggacctgctcaatcgcacaactgcggggcagcccaccgggtggtataaagatctcagacactactactatagagctaggtgggaactttacgacagaagcagagacccccacgaaacgcagaatctcgccacagatcctagatttgcgcagctcctcgagatgctgcgggatcaattggccaagtggcagtgggagacgcacgatccttgggtctgcgccccggacggggtgctggaggaaaaactttctcctcagtgtcagcctctgcataatgaactg

SEQ ID NO: 4228 - DNA, 1506 bp, Artificial Sequence
  derived and/or modified sequence
atgtcctgccctgtgccagcttgttgcgctctgctgctcgttcttggactctgcagggctcgcccaagaaacgccctcctccttctggctgatgacggaggcttcgaatccggagcatataataattccgccatcgctacaccgcaccttgacgcgctggctcgcagaagtctcctctttcggaatgcgtttacttctgtatcttcttgtagccccagcagggcctcactcctgacaggactgcctcaacaccagaatggcatgtacgggctgcatcaggacgtgcaccacttcaactcgttcgataaagtcagaagtttgcctctcctacttagccaggctggagttaggactggcattatcggcaaaaaacatgttggaccagaaacggtctatccatttgatttcgcttacaccgaagagaacgggtccgttcttcaggtgggtcgcaacattaccaggatcaagctgttagtccgtaaatttcttcaaacgcaagacgataggccattctttttgtacgtagcttttcacgatccgcaccgctgtgggcacagtcaaccacaatacggtactttttgtgaaaagtttggaaatggtgaatctgggatgggcagaatcccagactggaccccccaagcatacgaccccttagacgttctggtcccctactttgttcctaatactccagccgctcgcgctgacctagccgctcaatataccaccgttggacggatggaccaaggggttggcttggtattgcaggaactgagagatgccggcgtacttaacgatactctggtcatcttcacctctgacaatggcatccctttccctagtggaaggacgaatctctattggcctggcaccgctgagccacttctggtgtcttctcctgagcaccccaagcggtggggacaagtgtcagaggcttacgtcagcctcttggatcttaccccaactatcctggactggttcagcattccatacccaagttacgctatcttcggttctaagacaatccatctgaccggcaggagcttgcttcccgctctcgaggcagaacctctatgggcaacagtgtttgggagccaatctcatcacgaagtgactatgagctacccaatgaggagtgtccagcacagacattttcgccttgtccacaacctaaacttcaagatgccatttcccattgaccaagacttctatgtgagccccacgtttcaggatctgctgaacagaactactgccggtcaacctaccgggtggtacaaagaccttcgccattactattaccgagctagatgggagctgtatgaccgaagcagggacccacacgagacacagaacctggcgaccgatcccagattcgctcagcttctcgaaatgcttagagatcagctggcaaaatggcagtgggagacacatgatccttgggtctgtgcccctgacggcgtgcttgaggaaaagctctcaccccaatgccagccacttcacaatgaactg

SEQ ID NO: 4229 - DNA, 1506 bp, Artificial Sequence
  derived and/or modified sequence
atgagctgcccggtcccagcgtgctgcgcgctcctgctggtgctcggactttgtcgggccagaccaaggaacgccctcttgctgctcgcagacgacggcggattcgaatcgggtgcttacaacaactcggccatcgccacgccgcacctggacgcccttgcgagacggtcactgctctttagaaacgcgttcactagcgtgtcctcgtgttcgcctagccgcgcttcgctgctgaccggactgccgcagcatcagaacggcatgtacgggctgcaccaggacgtgcaccatttcaactcctttgacaaggtgcgctcgctcccgctgctgctcagccaagcaggagtgcggactggaattatcggaaaaaagcacgtgggccctgagacggtgtaccctttcgacttcgcgtacaccgaagagaatgggagcgtgctccaggtgggtcggaacatcacccgcatcaagttgctcgtgcgcaagttcctccaaactcaggatgatcggccgttcttcctgtacgtcgcgttccacgacccgcatcgctgcggccactcacaaccacagtacggaactttttgcgaaaagtttggtaacggcgagagcggcatgggacgcatcccggattggaccccccaggcctacgatccccttgatgtactggtgccctacttcgtccctaacaccccagccgctcgggctgacctggccgcgcaatacaccactgtgggccgcatggatcaaggggtgggactcgtcctgcaagagctcagggacgccggtgtgttgaacgacactctggtcatctttaccagcgataacggaattccctttccttcgggtcgcacgaatctgtattggcccggaactgccgagcctctgctggtgtcaagccccgaacacccgaagaggtggggtcaggtatcagaggcttatgtttcactgctcgatctgacccctactatcttggactggttcagcatcccatacccgagctacgcgatcttcggttcaaagaccatccacctcaccggaagatcccttctgcctgcgttggaagccgaacccctctgggcaactgtctttggatcccaaagccatcacgaagtcaccatgtcatatccgatgcgatcggtgcaacacagacacttccgcctcgtgcataacctcaatttcaagatgccgttcccaatcgatcaggacttttacgtctcgccgaccttccaggatcttctgaacaggaccaccgcaggacagccgacggggtggtacaaggacttgcggcattactactacagagcccgctgggagctctacgatcgctcccgcgacccgcatgagactcaaaatctcgctaccgacccacggttcgcccagctcctggagatgctccgcgatcagctggcgaagtggcaatgggaaacccacgacccgtgggtgtgtgccccagacggcgtcctcgaggaaaagctgtcgccgcaatgtcaaccactgcataacgaactg

SEQ ID NO: 4230 - DNA, 1506 bp, Artificial Sequence
  derived and/or modified sequence
atgagctgcccagtccccgcatgctgtgcccttcttctggttctcggattgtgccgtgcccgacctcgcaacgcattactactcctcgctgatgatggggggtttgaatcgggagcctataacaactccgctattgccaccccgcacctggatgcccttgcccggcgtagcctactgttccgcaacgcctttacatcagtgtcatcctgtagtccgagccgcgcctctcttcttaccggtctcccgcagcatcagaatggaatgtatggtctccatcaggacgtccatcacttcaattcatttgacaaagtgagatctctcccactactgttgtctcaagccggggtgagaacgggtatcatcggcaaaaaacacgttggaccggaaacggtttatccattcgattttgcttatacggaggaaaacggatctgttttgcaagtaggaaggaacatcacgcgcatcaaattattagtccgaaaatttcttcaaacacaggatgaccggcctttttttctgtatgtcgcgttccatgacccccaccgttgtggtcattcacaaccgcaatacggaacgttctgcgagaaattcgggaacggtgaaagcggtatggggcggattccggactggaccccccaagcatatgatccactcgatgttcttgtcccgtatttcgttccgaacacaccagcggcacgcgccgacttagccgcacagtacacgacagtgggtagaatggatcaaggagtcggactggtgctgcaggaacttagagatgctggagttcttaatgataccctggtcatctttacatccgataatggaattccgttcccttcaggacgcacgaatctttattggccgggaacagcagaaccccttctggtctcaagcccggaacacccgaaacgatggggacaggtatctgaagcctacgtatctctccttgacttgacaccgacaatcttagactggttctctattccatacccgtcgtatgcgatttttgggtctaagacaattcatctgacaggacggtcccttttgcccgcactcgaggcagagcctttgtgggcgacagttttcgggtcgcagtcacaccatgaggtaacaatgtcttacccgatgcggtcagtacaacatcgtcatttccgtttggtgcacaatttaaattttaaaatgcctttcccaattgaccaagatttttacgtttcgcctacgttccaagaccttctgaatagaacaacggcaggccagcctacagggtggtacaaggatctgaggcattattattatcgagctcggtgggaattgtatgatcgttctcgcgatcctcatgagacacagaatttggctactgacccgcgatttgctcagcttctggaaatgttacgcgaccagcttgctaagtggcaatgggaaacacacgatccttgggtgtgtgccccggatggtgtattagaagaaaaattatctccgcagtgtcagccgctgcataacgaactt

SEQ ID NO: 4231 - DNA, 1506 bp, Artificial Sequence
  derived and/or modified sequence
atgtcatgcccggtccctgcctgctgcgcgctgcttttggttttgggactgtgcagagcccgcccgagaaatgctctgctcctgctcgctgacgacggaggatttgaaagcggcgcttacaataattctgcaattgctacgcctcacctggatgcactcgcaagaagaagcctgttgtttaggaacgcttttactagtgtgtcctcctgctcaccttctagagcctctttgttgacaggtctgccccagcaccaaaatggcatgtatggactccaccaggatgtccaccactttaactcctttgacaaggtcaggtcacttccgctgctgttgtctcaggctggagtgaggactggtatcattggcaagaaacacgttggtccagagactgtctatcccttcgattttgcttatactgaggaaaacggtagtgttttgcaggtgggcaggaacattactcgcatcaagctgctggtacgcaagtttctgcaaacccaagacgaccgcccattcttcctgtacgtagcattccacgacccacataggtgtggccactctcaacctcaatacggtaccttctgtgagaagttcggcaatggtgagtcaggtatgggacgcatacccgactggactccccaggcttacgatcccctggatgtgcttgtaccttatttcgtgccaaacacacccgctgcaagggctgacctggccgctcagtacactactgtcggcaggatggatcaaggcgtcggacttgtgctccaagaattgcgcgacgcaggtgttttgaatgacacacttgttatctttaccagtgacaacggtatccccttcccaagcggtagaacaaatctctactggccaggtacggctgagcctctgctggtctctagccccgaacaccctaaaagatggggacaggtatctgaggcgtatgtctccctgctcgatctgacacccacaatcttggactggttttcaattccctacccgtcctacgctatatttggctccaagaccattcacctgacgggtaggagtctccttcccgccctcgaagccgagccactctgggccaccgtcttcggctcccagtcccatcatgaggtcacaatgtcttatcctatgcgctctgtgcagcacaggcattttcgcctggtccacaacctcaatttcaagatgccgttccccatagaccaagacttctacgtatctccaaccttccaggacctgctgaatagaacaaccgccggtcaacccacaggctggtacaaggatttgcgccattattactaccgcgctcgctgggagctttacgataggagccgcgacccccacgaaacccagaacctggctaccgatccccgcttcgcccagctgctggagatgcttcgcgatcaacttgcgaagtggcaatgggaaacacacgacccttgggtatgcgcaccggatggagtgctggaggagaaactctcaccacagtgtcaaccacttcacaacgagttg

SEQ ID NO: 4232 - DNA, 1506 bp, Artificial Sequence
  derived and/or modified sequence
atgtcatgtcccgtgccagcgtgctgcgccctgctgctggtgcttggattgtgcagagctcgcccgcggaatgccctgttgctgctggccgatgacggaggattcgaatcgggcgcctacaacaattccgcgatcgcgacccctcacctcgatgctctggcacgccggagcttgctcttcaggaacgcatttacctcagtgtcaagttgcagccctagcagagcctccctgctcaccggactcccacagcatcaaaacggcatgtacggacttcaccaagacgtgcaccatttcaactcgtttgacaaggtgcgctccctcccgctgcttctgagccaggccggagtgcgaactggcatcatcggcaagaagcacgtcggaccggaaactgtgtaccccttcgatttcgcatacactgaagaaaacggttcagtgctgcaagtcggacgtaacatcacgcgtatcaaacttctcgttcgcaagttcctgcagactcaggacgatcgacctttcttcctgtacgtggccttccacgacccgcacaggtgcgggcatagtcaaccgcagtacggaaccttctgtgaaaagttcggaaacggggaatcgggaatgggtagaatcccggattggacgcctcaggcttacgacccactggatgtgcttgttccatactttgtcccaaatactccagcggcgagagcagatcttgctgcccagtacaccaccgtggggagaatggaccagggtgtgggcctcgtccttcaagaactgagggacgctggcgtcttgaatgataccttggtgatcttcactagcgacaacgggattcccttccccagcggaagaactaatctgtactggccgggaactgcagaaccgctcctcgttagcagcccagagcacccgaaacggtggggtcaggtgtccgaggcttatgtatccctcctcgatttgacccccaccatcctggactggttttccatcccgtacccatcttacgccattttcggttccaagactatccatttgaccggacggtcactgctcccggccctcgaagcggagcccctgtgggctaccgtgttcggaagtcagtcccaccacgaggtgaccatgtcatatcctatgagatctgtgcagcatcgacattttagactggtccacaacctgaactttaagatgccgttcccaattgatcaggacttttacgtgtcacctaccttccaggaccttttgaacagaactactgccggccagccgacgggttggtacaaagacctccgccactactactaccgcgctcgctgggagctgtacgacaggtcccgcgatcctcatgagacgcagaatctggccaccgacccacgcttcgcccaactccttgagatgctgcgggaccaacttgcgaaatggcagtgggagactcatgacccctgggtgtgcgcaccggacggcgtcctcgaagaaaagctgagcccacaatgccaaccgctccacaacgagctg

SEQ ID NO: 4233 - DNA, 1506 bp, Artificial Sequence
  derived and/or modified sequence
atgtcgtgcccggtgccagcatgctgtgcgcttctgctcgtgctgggactctgccgggcccgcccgcgaaatgcactgctgctgctcgctgacgatggggggtttgaatccggggcatacaacaacagcgccatcgctactccgcatttggacgccctcgcgcggagaagcctcctctttagaaacgcgttcacctcagtctccagctgttcgccgagcagggcgtctctgctgactggactgccgcagcaccagaatggaatgtacggtctgcaccaggacgtgcaccacttcaattcgtttgacaaggttcggtcgctgccgctccttctctcacaagcgggtgttcgcactggaattatcggtaagaagcacgtgggacctgaaactgtgtaccctttcgacttcgcttacactgaggaaaatggatccgtgctgcaggtgggtcgcaatatcacccggatcaaacttctcgtgagaaagttcctgcagacgcaagacgataggccgttctttctgtacgtggccttccacgacccgcatcgctgcggtcattcccagccccagtacggaaccttctgcgaaaagttcggaaacggcgaatcaggcatgggtcggatccctgattggactcctcaagcatacgatcccctggacgtgctggtgccttacttcgtccctaatactccggccgcacgcgcggatcttgcagcacagtacactactgtcgggcgcatggatcagggcgtgggcttggtcctccaagagctgcgagatgccggcgttcttaacgacactctggtgatcttcacctcagacaacggaatcccgttcccttccggaagaacgaacctttactggccgggcaccgccgaacctctgctcgtgagctcccctgagcaccctaaacggtggggacaagttagtgaagcgtacgtctcgctgctcgacctgacgcctaccattctggactggttctccattccctacccgtcttacgcaatcttcggctcaaagactatccatctgactggccgcagccttctccctgctctggaggcagaacctctgtgggccaccgtgtttggcagccagtcccatcacgaagtgaccatgtcgtacccaatgaggtccgtgcagcaccgccatttccggctggtgcataacttgaactttaagatgcctttcccaatcgatcaagacttctacgtgagcccgactttccaagatctgctgaaccggactactgccggccagccgactgggtggtacaaagacctgagacattactactacagggcacggtgggaactctacgatagatcccgcgatccgcacgaaacgcagaacttggcgaccgatccgagattcgcgcagctgctcgagatgctccgcgaccaactcgctaagtggcagtgggaaacccatgatccgtgggtgtgcgcgcctgacggagtgctcgaggaaaagttgtccccgcaatgccagccactccataacgagctg

SEQ ID NO: 4234 - DNA, 1506 bp, Artificial Sequence
  derived and/or modified sequence
atgtcgtgccccgtgccagcgtgctgcgcactgcttctggtactgggcctttgtcgagcacgaccccggaacgccctgctgctgctggctgatgacgggggctttgaaagcggcgcttataacaattccgccatagccaccccccatctggacgcactggctcgcagatcacttcttttcagaaacgcatttacatccgtttcgagctgttcgccatcaagggcctcacttttaaccggtttgccccaacatcaaaacggaatgtacggcctgcatcaagacgtgcaccacttcaactctttcgataaggtgaggagcctgccgctgctcctgtcccaagcgggtgttaggacaggcattatcggaaagaagcacgtaggccctgaaacagtttatccatttgacttcgcctacaccgaagagaacggatctgtactccaggtgggtcgcaacatcacccgtataaaattactcgtgcggaagttcctccaaacccaggacgaccggccgttttttctgtacgtggcatttcatgatccacatcgctgcggccatagccagccacagtatggcacgttttgtgagaagttcggtaacggggagagcggcatgggccgcatccccgattggacacctcaggcgtacgatccgctagatgtcttagttccatacttcgtgcccaacacgcccgccgctagagccgacctcgctgctcagtatacaaccgtggggcggatggaccagggtgttggcctggtgctccaagaactcagggacgcaggcgtgctgaatgatacacttgtgattttcaccagtgacaacggcattccttttccatccggcagaaccaacctgtactggcctggcacagctgagccactgctcgtgtctagcccagagcaccctaagcgttggggtcaggtcagcgaagcttatgtgagcctgctggatctgacccctactatcctagattggttctccatcccataccctagctatgcaatcttcggatcaaagactatccatctcacaggaaggagcctgcttcccgctctcgaagccgaaccactgtgggccaccgtattcgggagccagagtcaccacgaagtgactatgtcataccccatgaggtccgtgcaacacagacatttccgtttggttcacaaccttaactttaagatgcccttcccaatcgatcaggacttttacgtgtctcctacatttcaggatctcctgaacagaacaactgcaggacagccaaccggatggtacaaggatcttcgccactactactaccgggctagatgggagctgtatgatcgtagccgagatccacatgaaacccagaaccttgcgaccgatcctaggtttgctcagctcctggagatgctcagagaccaactggccaaatggcaatgggagacccacgatccatgggtctgtgcaccggatggggtgttggaagagaagttgagtccacaatgtcaacctctgcacaacgagctg

SEQ ID NO: 4235 - DNA, 1506 bp, Artificial Sequence
  derived and/or modified sequence
atgtcttgccccgtacccgcatgctgcgcactgctgttggtgctcggattatgtcgggccaggccaaggaatgcccttttactactggccgatgacggagggtttgaaagtggggcgtataataactcagccatagccacgccacatttggatgctttggccagacggtctctcctgttcaggaatgcttttacatctgtaagttcatgctctccttctagggctagtcttttgacagggttacctcaacatcagaacggaatgtatgggctgcatcaggacgtacaccacttcaattcatttgataaagttcgctccctacctctgctgctgagtcaggccggggtgcggacagggataatagggaaaaaacacgtcggacctgaaacagtatatccttttgattttgcctatacagaggaaaacggatctgtgctccaggtgggacgcaatataacaagaatcaaactgctggtcaggaaattcttacagacacaggatgatcggcctttctttctttatgtcgctttccatgatccacatagatgtgggcactcacagccccagtatgggacattctgtgaaaaatttgggaatggggaatccggaatggggcgaattccagattggactccacaggcctatgatcctcttgatgttctggttccttatttcgtgcctaacacacccgcagcacgagccgatttggcagcccagtatactactgtggggagaatggatcagggagtagggttagtgcttcaggagctcagagacgctggagtgctcaacgatactctcgtaatctttacatccgataacgggattcccttccccagtggacggacaaatctgtactggcctgggacagctgaacctttgttagtgtctagtcctgagcaccctaaaaggtgggggcaggtttcagaggcctatgtttccctcctagatctgactcctacaatcctagattggttttctataccctacccctcatatgctattttcggatctaaaacaatacacttaacaggacggagtctattacccgcactggaagctgaaccactgtgggctacagtcttcgggtcacagtcccaccacgaagtgacaatgtcctatcccatgagaagtgtacagcaccgccatttcagactagtgcacaatcttaattttaaaatgccattcccaatcgatcaggatttctatgtgtctcccacattccaggatctgctgaatagaacaactgccggacagcccacagggtggtacaaagatctccgccactattattatcgtgcccgctgggaactctacgatcgctctagagatcctcatgaaacacagaacttagctactgatcccagattcgctcagttacttgaaatgctccgggaccagctcgcgaagtggcagtgggaaactcatgatccctgggtctgtgcaccagatggggtattagaagaaaaattgtcacctcagtgtcagccccttcataatgaactg

SEQ ID NO: 4236 - DNA, 1506 bp, Artificial Sequence
  derived and/or modified sequence
atgtcatgcccggtcccagcatgctgtgcgctgctcttggtgctgggattgtgcagagcccgcccgcggaacgctctgctgttgctggcggacgacggaggattcgaaagcggcgcgtacaacaactcggccatcgctactcctcatctcgacgcactggcccgtagatccctgctgttccgcaatgccttcacttcggtgtcctcctgctcgccgtcccgggcgtcgttgctgaccgggctgccgcagcatcagaatggcatgtacgggttgcaccaggacgtccatcactttaactcgtttgataaggtcagatcactcccgctcctgctgtcccaggcaggtgtgaggaccggcatcattggaaagaaacacgtgggaccggaaaccgtctacccgttcgacttcgcctacacggaagagaacggatcggtgctccaagtgggcaggaacatcaccagaattaagttgctcgtccgcaagtttctgcaaactcaagacgacagacctttcttcctgtacgtggcgttccacgatccccaccggtgtgggcattcccagccgcagtacggaactttctgcgagaaatttggaaacggggaatcgggcatgggcagaatcccggactggaccccccaagcctacgacccgctcgatgtgctcgtgccgtacttcgtgccgaatactcccgcggcacgcgcggacctggccgcccagtacactaccgtgggtagaatggaccagggtgtgggactggttctgcaggaactgcgcgacgccggtgtactgaacgataccctggtcatattcacgtccgacaacggcatcccgttcccttccggacgcaccaacctgtactggccaggaaccgccgaaccactcctggtgtcatcaccggaacatccaaagcgctgggggcaggtgtcagaggcgtacgtgtcactgctggacctcactccgaccatccttgattggtttagcattccatacccgagctacgccattttcggatcaaaaactatccaccttaccggtcgttcactcctcccggcgctcgaggcggagccactgtgggccaccgtgttcgggagccagtcccaccacgaggtcacgatgtcgtacccgatgcggtcagtgcagcatcgccactttagactcgtgcataacctgaacttcaagatgccgttcccgattgatcaagacttctatgtgtcaccgaccttccaggacctgctgaaccgcaccaccgcgggacagccgactggatggtataaagacctgcgccattactactacagagcccggtgggaactttacgatcggtcgcgggacccacatgagactcagaatcttgctaccgatccccgcttcgcccagctcctggagatgcttagggaccagcttgcaaagtggcagtgggaaacgcacgatccatgggtgtgtgccccggacggcgtcctggaagagaagttgtccccgcagtgccagcccctgcacaatgaactg

SEQ ID NO: 4237 - DNA, 1506 bp, Artificial Sequence
  derived and/or modified sequence
atgtcatgcccagtgcctgcatgctgcgcacttctgctggtgcttggcctctgtagggcacgtccgagaaatgcattgctcctgctggctgacgacggcggctttgaatcgggcgcgtacaacaatagcgcaattgccactccccaccttgatgcgctggctcgccgatcactgctttttcgcaacgcgttcacctccgtgagctcatgttcaccttcacgagcatcccttcttactggactccctcagcatcagaacggaatgtatggcctccatcaggatgtccaccacttcaattccttcgataaggtgcggagcctccctcttctgctgtcgcaagccggcgtccgaactgggataattgggaagaagcatgtgggacccgagactgtctacccatttgattttgcatacaccgaggagaacggcagcgtcctgcaggtgggtaggaatatcacccgtattaagctcctggtccggaagtttctgcagacccaggatgaccgccccttttttctttacgtggcttttcatgaccctcaccgctgtggccattcccagccacagtacggaaccttttgtgaaaagttcggtaacggcgagtccgggatgggtagaattcctgattggaccccacaagcgtacgatcctcttgatgtgcttgtgccttacttcgtgcctaacaccccagcagcacgggccgatctggcagcacaatacactactgtggggcgaatggatcaaggtgtgggcctggtgctgcaggagttgcgggatgccggagtgctgaatgacactcttgtcatattcacgtcggataacgggatcccatttccaagcggcagaactaacctttactggcccggaactgcagaacccctgcttgtgtcaagccctgaacatcctaagcggtggggccaggtgtcggaggcatacgtctccctcctggacctcacccccactatcttggattggttctcgattccatacccctcgtacgctattttcggtagcaaaactatccatcttactggaaggtccctgctcccggcactggaggcagagcccctttgggcgactgtgttcggatcgcagagtcatcacgaagtgacgatgtcgtaccctatgcgttccgtccaacacagacactttaggctggtccacaatcttaactttaagatgcctttcccaattgatcaggatttctacgtttccccaacgttccaagatctccttaataggactaccgcaggacaacctacgggttggtacaaagatcttcggcattactactacagggcaaggtgggagctgtatgatagatcgcgagatcctcatgaaacccagaaccttgcaaccgacccacgttttgcgcaacttctcgagatgcttagagatcaactcgcgaaatggcagtgggaaacccacgacccctgggtgtgtgctccggatggagtccttgaggaaaagctgagtccacagtgtcagcctctgcataatgaactt

SEQ ID NO: 4238 - DNA, 1506 bp, Artificial Sequence
  derived and/or modified sequence
atgtcgtgtcccgtgccagcttgttgtgccctgcttctggtactcggactgtgccgggctcggccacggaatgctctgctgcttctggcagacgacgggggtttcgaaagcggggcttacaataacagtgcgatagctactccccatctggacgctctggcccgtcggtctctgttgtttagaaatgcgttcacatcggtatcatcatgttcacctagcagggcatccctcttaacgggactcccacaacatcagaacggcatgtacggactgcaccaggatgtgcaccactttaattcgttcgacaaggtccgctccctgccccttctactgagtcaggctggtgtgagaaccggaatcattgggaagaagcatgttggcccagagaccgtctacccattcgacttcgcctacaccgaggaaaatggatctgttctacaggtcggccggaacattacccgaattaagcttcttgtcaggaaattcctccaaacgcaggacgatcgcccattttttctatacgtcgcttttcacgatcctcataggtgtggccacagccaacctcaatacgggacgttttgtgagaagtttgggaacggggaaagcggcatggggcggataccagattggacaccacaagcgtacgatccactcgacgttctggtgccctatttcgtgccaaacaccccagctgctcgcgccgacctggctgcccagtataccacagttggtcggatggatcagggtgtcggactcgtattgcaagagctcagagacgcaggagttttgaacgacactctggtgatatttactagcgacaatggaattccattcccaagcggccggacgaacctttactggccaggcaccgcagagccacttttagtgagttcccctgagcacccaaagaggtgggggcaagtgagcgaagcttacgtgagtctgttggacctgacaccgactattttggattggttcagtattccatacccatcctacgccatttttggatccaagacaatccatcttaccggccggtcacttctgccagccctagaagccgagccactgtgggcaaccgtttttggatcgcagagtcaccatgaggtcactatgtcatatcctatgcgcagcgttcagcaccgccacttccggctggtgcacaacctgaactttaagatgcctttccctatcgatcaggacttttatgtgagccctacctttcaagatctgctaaaccgtacaactgcgggtcagccaactggctggtataaagatctacgacactactattacagggctcggtgggaactttatgaccgctcgagggaccctcatgagacccaaaacttggctaccgacccacgatttgcacagcttttggagatgctgagagatcagcttgccaagtggcagtgggaaacacatgacccatgggtttgcgccccagatggggtacttgaggaaaaactgtctccccagtgccagccactccataatgagctg

SEQ ID NO: 4239 - DNA, 1506 bp, Artificial Sequence
  derived and/or modified sequence
atgagctgcccagtccccgcgtgttgtgccctcctcctcgtgttggggctgtgccgcgcccggcctcgcaatgcactcttgctcttggcggacgacggcggattcgaatcaggcgcatacaacaactccgcgatcgcaaccccgcacttggacgctctcgcccgtcggtcgctgttgttccggaacgcttttacctccgtgtcatcgtgctccccgagcagggcctccctgctgactggattgcctcaacatcagaatggaatgtacgggctgcaccaggacgtgcaccacttcaattcattcgacaaggtgagatccctgccgctgctgctgtcccaggcgggagtgagaaccggaatcatcggcaaaaaacacgtgggtccggaaaccgtgtatccgttcgacttcgcatacacggaggaaaacgggtcggtcctgcaggtgggtcgaaatatcacccgaatcaaactgctggtgcgaaagttcctccagacccaggacgatcggccgttcttcctgtacgtcgcatttcacgacccgcaccgctgcggacattcccagccccaatacggaactttttgtgagaagtttggcaacggcgagtcgggcatgggaaggatcccggattggaccccgcaagcgtacgatccgctcgacgtgttggtgccttacttcgtgccgaacacccccgcagccagagcagacctcgccgcccagtacactaccgtgggtcgcatggaccagggggtgggacttgtcctgcaggaacttcgggacgctggggtcctcaacgataccttggtgatcttcacctcggataacggaatccccttcccatcgggtaggactaacctgtactggccaggtaccgcggagccgttgttggtgtcctcacctgaacatcctaaacgctgggggcaagtctcagaagcatatgtgtccctgctcgacctgaccccgactatcctcgattggttcagcatcccatatccatcatacgccatattcggaagcaagacgatccacctcactggtagatctctgctgccggccctggaagcagagcccctctgggcaaccgtgttcggatcacaaagccatcacgaggtcaccatgtcatacccaatgcgctcggtccagcataggcatttccggttggttcacaatctcaactttaagatgccgtttccgatcgaccaggatttctatgtcagcccgaccttccaggacctgctcaaccggaccaccgccggacaaccgactggatggtacaaggatctgcggcattactactaccgcgcccgctgggaactgtacgaccgaagtcgggatcctcacgaaactcaaaacctcgctaccgatcctcgctttgcccagctcctggagatgctccgagatcaactggccaagtggcagtgggaaacccacgatccatgggtttgtgccccagatggagtgctggaagagaagctctcacctcaatgccagccactgcacaacgaactt

SEQ ID NO: 4240 - DNA, 1506 bp, Artificial Sequence
  derived and/or modified sequence
atgtcgtgccccgtgcctgcttgttgtgcactactgctagtcctgggcctgtgtcgggcccggcctcggaatgctctgctgctgctcgcagatgacggtggcttcgaatccggcgcctacaataacagtgccattgcgaccccccatctggatgctctggcaaggagaagcttgttgtttagaaacgcattcacctccgtttcctcatgctctccctcaagggcttccctcctgaccggccttccccagcaccagaatggcatgtatggactgcatcaggacgtgcaccatttcaactctttcgataaagttcgatctcttcccttgttactgtctcaagccggggttagaactggtatcattggtaagaagcacgtaggcccggagaccgtgtatcctttcgattttgcctatacagaagagaacgggtctgtgttacaggtgggacgcaatattacgcgtatcaagctgcttgtgagaaagtttctgcagactcaggacgaccggcctttttttctatacgttgcttttcacgatccgcacagatgcggtcactcacagcctcagtatggaactttctgtgagaaattcgggaatggagagtcaggtatgggaaggatacctgattggacacctcaagcatacgatcccctggatgtgctagtgccatacttcgttccgaacacacctgccgctagagcggatctggcggcacagtacactacggtgggccgcatggaccaaggagtcggattggtgctgcaggagcttagagatgcgggcgttttaaatgatactctggtgatatttactagcgataatggtataccattcccttctggtcgcactaatctgtactggcctgggactgctgaacctcttttagtaagcagcccagagcatcctaaaagatgggggcaggtgtctgaggcatacgtgagtctattagacctcacacccaccattcttgattggttctcaattccatatcctagttatgccatcttcggaagcaagacaattcatttgaccgggaggtcactgcttcccgcgctagaggccgagccactttgggcgacagtgttcggatctcagtcacatcacgaagtcaccatgtcctaccctatgagaagtgtgcagcaccgccatttcaggttagtgcacaacctgaactttaagatgcctttccctatagaccaggatttttacgtgtcaccaacctttcaggatctcttgaaccggacaacagctggtcagcccacaggttggtataaggaccttcgccactactattaccgtgcaaggtgggaactctacgaccgctctagggacccacacgagactcagaatctggccaccgacccacgcttcgctcagctgctggagatgctgcgggaccagcttgctaaatggcaatgggaaactcacgacccatgggtgtgtgcccccgacggtgtgctcgaagaaaaattaagccctcagtgccagccgctccacaatgagctt

SEQ ID NO: 4241 - DNA, 1506 bp, Artificial Sequence
  derived and/or modified sequence
atgagctgcccagtcccagcctgttgtgccctgctgctcgtcctgggcctttgtagggctagaccccgcaacgcactccttcttcttgcggatgacggaggatttgaatcgggtgcatacaacaactcagcaattgctactccacatctggatgcattggcacgccgctccctgttgttcagaaatgcgtttacctcggtgtcctcgtgctctccttctcgggcctcgctgcttaccggactccctcaacatcagaatggcatgtacgggctccaccaggatgtgcatcactttaactcatttgacaaggtccggtcgctgcctctgctgctgagccaggccggagtgcgaaccggaatcattggtaagaagcatgttgggccagaaactgtgtacccctttgattttgcatataccgaagaaaatggatccgtccttcaagtgggtcgcaatatcactcgcattaagttgctggtccggaaatttctccagactcaggatgatcgacccttcttcttgtacgtggcattccacgatccacacaggtgtggccactcgcaacctcaatacgggaccttttgtgaaaagtttggaaacggcgaaagcggtatggggcgtattccagattggaccccgcaagcatacgacccgctggatgtgctggtgccgtacttcgtccctaacacgcccgctgcacgagccgacctcgccgcccagtataccactgtgggtagaatggatcagggagtgggactcgttctgcaagaactccgtgatgcgggcgtccttaacgataccctggtgatattcacctcagataacggcatcccatttccatcagggagaactaatctttactggcccgggactgcggagcctctccttgtgtcgagccctgagcatccgaaacgatggggtcaggtgtcagaagcgtatgtttccctgctcgacctgactcctaccattcttgattggttttccattccatacccttcatacgcaatcttcggatccaaaactatacatcttaccgggagatctcttctgcccgctctggaagcagagccattgtgggcaactgtgttcggatctcaatcgcatcacgaagtgactatgtcctacccaatgagatcggtgcagcacagacattttagactcgtgcataaccttaacttcaaaatgccatttcctatcgatcaggacttttacgtctcacctaccttccaagacttgcttaaccgtaccaccgcaggccagcctactggttggtacaaggatctccggcattactactaccgggcacggtgggagctgtacgaccgctcgagggacccccacgagactcaaaatcttgcaaccgatccaagatttgcacaactcctcgagatgctgcgggaccaattggccaagtggcagtgggaaacccatgatccgtgggtgtgcgcgccggacggcgtgttggaagaaaagttgtcgcctcagtgtcaaccgttgcacaatgagctt

SEQ ID NO: 4242 - DNA, 1506 bp, Artificial Sequence
  derived and/or modified sequence
atgtcgtgccccgtccccgcgtgctgtgctctgttactcgttctgggtctttgccgcgcacgccctcgtaatgcgctcctgttgctggctgacgatggaggcttcgaatctggtgcctataataactccgcgattgcgacgccccatcttgatgcactcgcccgccgctcgcttttattccgaaacgctttcacctccgtctcgtcttgttcaccgtcccgcgcctcgctccttacaggtttaccacaacatcaaaacggcatgtacgggctccaccaggatgtgcatcattttaacagttttgataaagtcaggtctcttcctctcctgctatcacaggcgggtgtccggacgggcatcatcggcaaaaagcacgtgggccctgagacagtctatccgtttgatttcgcatacaccgaagagaacggcagtgtcctacaggttggtcgaaacatcacacgtattaagttgttggtacgcaaatttttgcagacccaggacgaccgaccgttcttcctgtacgtcgcgtttcacgatccgcatcgatgtggtcacagtcagcctcagtatggaactttctgtgaaaagttcggaaacggagaaagcggcatggggaggataccagactggactcctcaagcctacgacccgcttgatgttcttgtgccctacttcgtccccaatactcctgcagcacgggcagatctggccgcccagtataccactgtcggccgaatggatcagggtgttggactggtgctccaagagctccgagacgcaggagttcttaacgacacacttgttatctttactagtgacaacggaattccgtttccttcaggacgtacaaatctttattggcctgggacagcggaacccttgttggtgagcagcccagaacatcccaagagatggggacaggttagcgaggcgtatgtgagcctccttgaccttacaccgaccatcctcgactggttctccatcccgtatccctcgtatgccatcttcggttcaaagaccatccatcttacagggcgtagtctgttaccggccctcgaggcggaacctttgtgggcaacagtttttggcagccagtcacatcacgaggtcacaatgagttatcctatgcggtccgtgcaacaccgtcatttcagacttgtccataaccttaactttaaaatgcccttccctatcgatcaggacttttacgtttcgcctactttccaggacttgttgaaccgtacaacagcgggccagccaaccggatggtacaaggatctacgacattattattatcgagcacgctgggaattgtacgatcgttcccgggatccgcatgagacacaaaacctcgcgaccgaccctcgctttgctcagttgctggagatgctgcgagaccaactggctaaatggcaatgggagactcatgatccctgggtgtgtgcccctgatggcgtgctagaagagaagctgagtcctcaatgtcaacctttacataatgagttg

SEQ ID NO: 4243 - DNA, 1506 bp, Artificial Sequence
  derived and/or modified sequence
atgtcttgccccgtaccagcttgttgcgcactgctgctggtgctggggctttgtagggcacgaccacgaaatgcgttgctgctgcttgctgacgatggagggttcgaatctggcgcttacaacaatagtgcaatcgccacaccacatctcgatgctctcgctagaaggtccctgcttttccgtaacgcctttacctccgtatcctcatgtagcccatccagggcttccctcctcaccgggttaccacagcatcagaatgggatgtacggcctgcaccaggatgtacaccatttcaactcctttgataaggtgaggagtttgccactactgctctcacaggcgggtgtgaggactggcattattggaaaaaagcatgtgggcccagagacagtgtacccattcgactttgcctatacagaggagaatggctctgtgctgcaggtcggccgaaatataacacgcatcaagcttcttgtcaggaagttcctgcagactcaggatgatcgaccttttttcttgtacgtggcctttcacgacccgcaccggtgtggacattcacaaccgcagtatggcactttttgtgagaaatttgggaacggcgaaagcggcatgggcagaatacctgattggacgccccaggcatacgaccccctggatgtcctcgtgccgtactttgtgcctaatacaccagccgcccgggccgacctggctgcccagtacaccaccgtgggcagaatggaccagggcgttggcctagtcctgcaggagctccgggatgcgggggttttgaatgatacacttgttatcttcacctcagataacggaataccgttcccttccggcagaacgaatctctattggccgggtaccgcagaaccgctgctcgtgtcctcacctgaacaccctaaaaggtggggccaagtgagcgaagcttacgtgtcgctccttgacttgacccctacaatcctggactggttttcaatcccatacccctcgtatgctatctttggctccaagactattcatcttaccggaaggagcctgctaccagcacttgaagctgaacccctgtgggccacagtatttggatctcagagccaccacgaggttacaatgagctacccaatgaggtctgtgcagcaccgacacttcaggttagtccacaacctgaattttaaaatgccattcccaatagaccaggatttttacgtgagccctacatttcaggacttgctgaaccggaccacagcaggccagccaaccggctggtacaaagaccttcgtcattactattaccgggccaggtgggaactgtatgatcggagtcgggacccacacgagacacagaacctcgcaaccgatcctcggtttgctcagcttctggaaatgcttagggaccagcttgccaaatggcagtgggagacacacgacccttgggtgtgtgctccagatggagtgttggaggaaaagctgtctcctcagtgccagccacttcacaacgagctg

SEQ ID NO: 4244 - DNA, 1506 bp, Artificial Sequence
  derived and/or modified sequence
atgtcttgccccgttccagcatgctgcgctctgctcctggtcctgggcctgtgtcgcgcacgcccaagaaacgctttgcttttgctagctgacgacggcgggttcgagagcggagcatacaataactccgcaatcgccacaccccacctcgacgccctggctcgcagatcactcttatttaggaatgcttttacgtccgtatcctcatgctcccctagccgcgcatccttattgactggcctgccgcagcaccagaacggcatgtacggtctccatcaagacgtccaccactttaatagttttgataaggtgcggtccttgcccttactgctctcccaggctggtgtcaggacaggcatcattgggaagaaacacgttggccctgaaactgtctaccccttcgatttcgcctacactgaagagaacggcagtgtgttgcaggtgggaagaaacatcaccaggattaagctactggttaggaaattcttgcagacccaggatgatcgtccattctttctgtatgtggcgttccacgatcctcatcggtgcggccattctcagccgcagtatggtaccttctgcgagaaattcggtaatggggaatcaggtatgggccgaatccctgattggactccccaggcttacgatcccctggacgtgttagtcccctactttgtacccaatactcctgcagctagagcagacctggccgcgcagtataccacagtcggcaggatggaccagggcgttgggttggtgctgcaggagctgcgagatgctggcgtgttgaacgacactctcgtcatctttactagcgacaacggcatccctttcccctctggccgaaccaacctgtactggccagggaccgcggagcccttactggtgagctcccctgaacaccctaagcgctggggtcaggtttccgaagcctatgtgagcctgctggacctgactccgactattctggattggtttagcataccttatccttcatacgctatctttgggtctaaaacaatacatttgacgggcagatccctgttgccagcattggaggctgagccactgtgggctaccgtgttcggttcgcagagccaccatgaagtgaccatgagctaccccatgaggtctgtccaacaccgacatttccgtttggtgcataacctgaacttcaaaatgcccttccctatcgatcaggatttctatgttagccccacattccaggacctgttgaatcggaccacagctggtcagccgacgggttggtacaaggaccttaggcactactactatagggcccggtgggagctgtatgaccgctctcgggatccacatgaaacgcaaaacctcgcgactgatccccgctttgcccagctcctggaaatgttaagggatcagctggccaagtggcagtgggagacgcacgatccatgggtctgtgcaccggatggcgtgcttgaggagaaattgtcccctcagtgccaaccgcttcataatgagctg

SEQ ID NO: 4245 - DNA, 1506 bp, Artificial Sequence
  derived and/or modified sequence
atgtcctgtccggtgcccgcctgctgcgcacttctgctggtgctggggctctgtcgcgcacggccacgcaacgctcttctgttactcgcagatgacgggggtttcgagtctggggcttacaataattccgctattgcgacgccccatctggatgctctggccagacgaagcttattgttcagaaatgccttcacttcggtgtcaagctgctccccttctcgggcttctctcctgacgggattgcctcagcatcagaatggcatgtacggactacatcaggacgttcaccactttaattcttttgacaaagtgcgcagtctccccttgttactctcacaggcgggtgtccgtacaggcatcattggaaagaagcatgtgggccccgaaacagtgtacccctttgatttcgcgtacacggaggagaatggatcggtgttgcaggtcgggcgcaatattactagaattaagctgctggtgcggaagttcctccagacccaggacgaccgcccgtttttcctgtatgtggcctttcacgacccccaccgttgtgggcactcccagccacagtacggaacattttgcgagaagtttgggaacggagagtctgggatggggaggattccagattggactccgcaggcatatgaccccttagatgtgctggtgccctacttcgtgccgaataccccagcagccagggccgacctggccgcccagtatactaccgtgggcaggatggatcagggcgtgggcttggtgcttcaggaactgcgggacgcaggcgtgctgaacgacacattggtcatattcactagcgacaacggaataccttttcccagcggccgcaccaacctatattggccagggaccgccgaaccactactggtgagcagccctgaacaccccaaaaggtggggccaggtcagcgaagcctatgtgtccctgctcgatcttacgccaactatactagattggttctctatcccatatccaagctatgctatcttcggctccaagaccatacacctgactggcagatcactcctgcccgccttggaggccgaacccctctgggcaaccgtatttggctcccagagccaccatgaagtgaccatgtcatatccgatgcggtcagtgcaacacaggcattttcgccttgtccataacttaaacttcaaaatgccgtttcccatagatcaggacttctacgttagcccaacatttcaagatctcctgaacagaacgacagcaggccagcccaccggctggtacaaagatctccgtcactactattaccgagcgcgctgggaattgtacgataggtcaagagatccccacgagacgcaaaacctagctactgacccacggtttgcccaactgctggagatgcttagagatcaactggcgaagtggcagtgggaaactcatgacccctgggtgtgcgcccccgatggagttctggaggaaaaattatccccccaatgtcagcctctacataatgagctg

SEQ ID NO: 4246 - DNA, 1506 bp, Artificial Sequence
  derived and/or modified sequence
atgagttgccctgttcctgcgtgttgtgccctcctgcttgtgttgggcctctgcagggctcggcctaggaacgctttgctccttctcgccgacgatggggggtttgaatctggtgcctacaacaactctgctatcgcgaccccccacctagacgccctggcccgccgcagcttgctgtttagaaacgcattcaccagcgtatcctcttgcagtccttcaagggcatcacttcttacaggactcccccagcatcagaacggtatgtacgggctgcatcaggacgtccaccacttcaactcttttgataaggtccggtccctccctctgttgctgtctcaagcaggagtcaggactggcattatcggcaaaaaacacgtcgggcctgaaacggtatacccctttgacttcgcttacactgaggagaatggttcagtgctacaagtgggtcggaatatcacaagaataaagctgttagtgcggaaatttcttcaaacgcaggatgatcgtccattctttctctacgtggcgttccacgacccacacaggtgcggccacagtcaacctcaatatgggaccttctgcgagaaatttggcaacggagagtctgggatgggcaggattccggattggaccccccaggcgtacgatccgctcgatgtcctggtcccttactttgttcccaacactcccgccgcaagggccgatcttgctgcacagtacacaaccgtgggccggatggatcagggcgtggggctcgtccttcaggaacttcgcgacgccggagtgctgaacgacaccctggtgatttttacatctgataacggaataccgttccccagtggccgaacaaatctgtactggcccgggacggctgagcctctcctggttagcagcccggagcatcccaaacgatggggacaggtgagtgaagcctatgtgtcattgctggacctaactccaacaatcctggactggttcagtataccctatccctcctatgccattttcggaagcaaaactatccatttgacaggtagaagtctgctgcccgccctcgaggccgaacctctgtgggcgaccgtgtttggcagccagagccaccacgaagtaactatgtcctaccctatgcggtcggtgcaacatagacactttcggcttgtgcacaatctaaacttcaaaatgcctttcccaattgaccaggatttttatgttagcccgacctttcaagatctccttaaccgtacaaccgcaggtcaacccaccggttggtacaaggatcttcgccattattattatagagcacgctgggagttgtatgataggtccagggatccccacgagactcaaaacctggctactgaccctagattcgcccagctcctggagatgctgcgggatcagctcgcgaagtggcagtgggagactcacgatccctgggtctgcgcacctgatggtgtgctcgaagagaaattgtcaccgcagtgtcagcctcttcacaacgagctg

SEQ ID NO: 4247 - DNA, 1506 bp, Artificial Sequence
  derived and/or modified sequence
atgtcatgccctgtgcctgcttgttgcgcactgctgctggtgctcggactgtgtagagcaagacctcgtaatgccctgctcttgctggcagatgatggcgggttcgagagtggggcatacaataactctgcaattgcaacccctcatctggacgcccttgctaggaggtcacttctgttccggaatgcatttacctccgtgtcatcgtgctccccatcccgtgcctcgctgcttacgggactgccgcaacaccaaaacggaatgtacgggcttcatcaggacgtccatcactttaactcttttgacaaggtcagatctctgccccttcttctttcccaggcgggtgtccggaccggaataatcggtaaaaagcatgtcggtccggaaactgtgtacccattcgatttcgcatacaccgaagaaaacggatccgtccttcaggtgggacgcaacattactcgcataaagctgctggtgagaaagtttctgcagacccaagatgatagaccttttttcctttacgtcgccttccacgatccccatagatgtggtcacagccaaccacaatacggtaccttttgtgagaaattcggaaatggcgaatcgggtatgggccgaatccccgactggactcctcaggcctacgatccacttgatgtcttggttccttatttcgtgccaaataccccggcagctcgtgctgatcttgccgcacaatacactactgtcggacggatggaccaaggagtggggctggttttgcaggaactgagagatgcaggggtcctcaacgatacgctggtcatattcacgtcggataacggaatcccgttcccatcgggtaggacgaatctgtactggcccggcaccgccgaacctctccttgtgtcgagcccggaacatcctaagcgatggggtcaagtgtcagaagcatacgtgtcgctgctcgatctcactcctactattcttgattggttttccattccttatccctcttacgcaattttcggatcgaaaaccattcatcttaccggtcgcagtttgcttccagccctggaagccgaacctctgtgggccacggtgtttggatcacaatcacatcacgaggtcaccatgtcgtaccccatgcggtccgtccaacatagacatttcagacttgtccataatctcaatttcaagatgccatttcccattgatcaggacttttacgtgtcccctacttttcaggacctgctgaacaggaccaccgcaggccagccaactggttggtataaggatcttaggcactactactacagagcgcgctgggagctgtacgataggtcaagagatccacacgagacgcagaacctggcaaccgatccccgcttcgcgcaactgcttgaaatgcttcgagatcaactcgcaaaatggcaatgggagactcatgatccatgggtctgtgcacctgacggcgtgctggaagagaagctctcgcctcaatgtcagcctctccataatgagctg

SEQ ID NO: 4248 - DNA, 1506 bp, Artificial Sequence
  derived and/or modified sequence
atgtcgtgccccgttcctgcatgttgcgcgttgctgctggtgctgggactctgcagagcccgccccagaaacgctctgttgcttttggcggacgatggaggcttcgagtcaggggcctacaacaactcggcaattgcgacgccacatctcgacgccctcgcgcgacgctctttgctcttccgaaacgcctttacctcggtgtcgtcctgttccccttcccgcgccagcctcctgaccggcctgccccagcatcaaaatggaatgtatggactgcatcaggacgtgcaccacttcaacagcttcgataaggtgagatcgctcccactgctgctgtcgcaggctggagtccgcaccggaatcatcggcaagaaacacgttggtccagaaactgtctaccccttcgatttcgcgtacacggaggaaaacggatcagtgctgcaggtgggtcggaatatcaccagaatcaaactgctggtccggaaatttctgcaaacccaggacgaccgtccgttcttcctgtacgtggctttccatgatccgcatcggtgcggccattcgcagccacaatacggtactttctgtgaaaagttcgggaacggagagtcagggatgggacgcattcccgactggacccctcaagcctacgatcccttggatgtcctggtcccgtacttcgtgcccaacactcctgcggcgagagccgatctcgcggcacagtacactaccgttggccgcatggaccagggcgtgggtttggtccttcaagaactgcgggacgctggagtgctcaacgatacgctcgtgatctttacctcagataatggaatcccgttcccgagcggccggactaatctgtactggcccgggactgccgagcctttgttggttagctcgccggagcatccaaagagatggggacaggtgtcagaagcatatgtgagcttgctcgacctgacccctactatcctggattggttttcaattccatacccaagctacgccatcttcgggtccaagaccatccatctcactggacgtagcctgctgcctgcgctcgaggccgaaccgctctgggcgaccgtgttcggatcgcagtcccaccacgaagtgaccatgtcatacccgatgaggagcgtgcagcaccgccacttccggttggtgcacaatctgaactttaagatgccgtttccgatcgatcaagacttttacgtctcaccgacgtttcaggatctgctcaaccgcaccactgcggggcagccgactggatggtacaaagacctgagacactactactaccgcgcccggtgggagctgtacgaccgctcccgggacccgcacgaaacccaaaacctcgctaccgaccctcggttcgcgcaactgctggaaatgttgcgcgatcaactcgcaaagtggcagtgggaaactcatgacccgtgggtgtgcgcgccagacggagtgctggaggaaaagctgtcgccacagtgtcagccgctgcataatgagctg

SEQ ID NO: 4249 - DNA, 1506 bp, Artificial Sequence
  derived and/or modified sequence
atgagctgcccggtcccggcttgctgcgctctcttgctggtcctggggctgtgtagggcacggccccgcaacgcgctcttgctgctcgccgacgatggaggtttcgagagcggcgcctataacaattctgctatagcgactccgcatctcgacgccctcgcgcggcgcagtctgctgttccgcaatgctttcacttccgtatcgagctgttccccatctcgagccagcctcctgaccggactgccccagcatcagaacggcatgtatggactgcaccaggacgtgcatcatttcaacagctttgacaaggtgcgctcactgccgttgctcctctcacaagccggagtgcgcactggcattattgggaagaaacacgtcggcccggagactgtctacccgtttgacttcgcctacactgaagaaaatgggtccgttcttcaggtgggacgtaatatcacccggatcaagctgctggtgaggaaatttctgcaaactcaggatgatcgcccattcttcctgtacgtggcattccacgacccgcatagatgtggacattcccagcctcaatacggtaccttctgcgaaaagttcggaaacggagaaagcggcatgggcaggatcccggattggaccccgcaggcgtacgacccactggacgtgctggtgccttacttcgtgcctaacacccccgcagccagagccgaccttgccgcgcagtacaccaccgttggacgcatggaccagggggtcggacttgtactccaagaactccgggatgctggcgtcctcaacgacacccttgtgatcttcacgtctgataacggcatcccgtttccttcaggacggacgaacctctactggccagggaccgcggaaccgctgctggtatcgtcaccggagcacccgaagcgttggggacaagtctccgaagcctatgtttcgctgctcgacctcaccccaaccatcctggactggttctccatcccatacccatcgtacgcgatcttcggctccaagactatccatctcaccggacgatcgctgctcccagcactggaggcagagccgctgtgggctacggtgttcgggagccaatcacaccacgaggtgacgatgtcgtacccgatgcggtcggtgcagcatagacacttccggctggtgcacaatctgaatttcaaaatgccgtttccaatcgatcaggatttctacgtctcacctacttttcaggatctgctgaacagaactactgcgggtcagcctaccgggtggtacaaggacctcagacactactactacagagctaggtgggaattgtacgaccgcagccgcgacccgcacgaaacccaaaatcttgcgactgacccgcgctttgcccaactgctggaaatgcttcgggatcaactggccaagtggcaatgggaaactcacgatccttgggtgtgcgcaccagatggtgtgctcgaggagaaactttcccctcagtgccagccccttcacaacgagctc

SEQ ID NO: 4250 - DNA, 1506 bp, Artificial Sequence
  derived and/or modified sequence
atgagctgtccagtgcccgcgtgttgtgccctcctccttgttctcgggctgtgccgcgcccgtcctaggaatgcccttcttttgcttgcggatgatggtggatttgagtcgggagcctacaacaattccgcgattgcaacccctcacctggacgcacttgcaagaaggagccttctgttcagaaacgcttttacttctgtctcgtcatgctcgccttcgcgcgcatcactcctcactggcttgccacagcatcaaaacggaatgtacggtctgcaccaagatgtgcaccactttaactcctttgacaaggtccggtccctgcccctgcttctcagccaggctggtgtgagaaccggtatcattggaaagaagcatgtgggacccgagacggtgtacccatttgacttcgcatacactgaggaaaacgggagcgttctccaggtgggaaggaacatcacccgcataaagctcctggttagaaagtttctgcagactcaggacgacaggccgttttttctctacgtggcatttcatgacccacatcgctgtggacattcacaaccacagtacggtactttttgtgagaaattcggaaatggagaatcggggatgggtcggattcccgactggaccccacaagcatacgatccgctcgatgtcctggtgccttacttcgtgcctaataccccagcggcacgagcagatctggcggcacaatacaccaccgtcggaaggatggaccagggagtcggacttgtcctgcaggagctgcgtgatgcaggtgtgttgaacgacacgcttgtgatctttaccagcgacaacgggatcccttttccttccggacgcaccaacctgtactggcctggaactgccgaaccattgttggtatcatccccagaacaccctaagaggtggggccaggtgtcggaagcgtacgtgtcccttcttgatctgactcctactattctcgattggttctccattccttacccatcctatgcaatctttggatcgaaaaccatccatctgacggggaggtcactgcttcctgccctcgaagcagagcctctgtgggcaactgtctttggttcccagtcgcaccacgaagtcactatgtcctaccctatgcgttcagtgcagcacagacactttcgtcttgtccataaccttaactttaagatgccctttccaatcgatcaggacttttatgtcagcccaactttccaagacctgctgaaccggacgactgccggacagccgaccggttggtacaaagacctcaggcactactactacagagcccgttgggagctttatgatcgctcacgtgacccccatgaaacccaaaacctcgcaaccgacccacgctttgcacaattgttggaaatgctgagagatcaactggcaaagtggcaatgggagactcatgatccctgggtgtgtgcacctgatggagtgctggaggaaaaactgtcacctcaatgtcagcctcttcataacgaattg

SEQ ID NO: 4251 - DNA, 1506 bp, Artificial Sequence
  derived and/or modified sequence
atgtcttgccctgtgcctgcgtgctgtgcgctcttgttggtcttgggtttgtgtcgggcgcgtccgcggaatgcacttcttcttcttgctgatgacggaggctttgaatcgggtgcatacaataactccgcaatagccactccacaccttgatgcacttgcaagacggagcttgctgttccgcaacgcgtttacctccgtctcgtcgtgttctccatcgagggctagccttcttactggacttcctcaacaccaaaacggaatgtacggacttcatcaagacgtgcaccactttaacagcttcgacaaggtgcgttcactccccctcttgctgtcacaggcgggagtgcggaccggaatcatcggaaagaaacatgtcgggccagaaactgtctacccttttgatttcgcctatacggaggaaaacggatccgtgttgcaagtgggacggaacataactagaatcaagctgcttgtgagaaaattccttcagacccaagacgaccgaccatttttcctgtacgtcgctttccatgacccacatcgctgcggccatagccaacctcaatacggcacgttttgtgagaagtttggaaatggcgagtcagggatggggagaatacccgactggaccccgcaggcatacgaccctcttgacgtgctggtcccctatttcgtccccaacactccggcagcacgagcagatcttgcagcccaatatacgaccgtgggaaggatggatcaaggggtgggactggttctgcaagaacttagggacgcaggggtcctgaatgataccctggtcatctttacctctgacaacggtattccctttccttcaggccgtactaatctctactggccaggtaccgctgagcctctgctggtcagctcaccggagcatccgaagcgctgggggcaagtttcggaggcatacgtgtcgctgctggatcttactccgaccatcctggattggttcagtattccatatccgtcgtacgcaattttcggctcaaagaccattcatctcactggtcgctcactcctccctgcattggaagcagagcctctgtgggctactgtgtttggttcccagtcacaccatgaagtgacgatgagctaccctatgcggtccgtccagcatagacacttccggttggtgcataaccttaactttaagatgccctttcctattgatcaagacttttacgtcagtccaacgtttcaggatctcctgaacagaaccaccgcaggccagcccactggatggtacaaagatcttagacattactactaccgtgcaaggtgggagctgtacgatcgctcccgcgatccccacgaaactcaaaatctcgccaccgatcctcgtttcgctcaactgctggaaatgttgagagatcaactggcaaaatggcagtgggaaactcatgatccatgggtgtgcgcccccgatggagtgcttgaagaaaagttgagccctcagtgtcagccacttcacaacgaactc

SEQ ID NO: 4252 - DNA, 1506 bp, Artificial Sequence
  derived and/or modified sequence
atgtcctgccccgttcctgcatgctgtgcactcctcctggttctcggcctgtgtagagcgcgacctcgtaacgcactccttctgcttgcagacgatggaggctttgaatctggagcatacaacaacagcgctatcgcaaccccccatctggatgccctggcaaggcgttcgctgctgttccgcaacgcatttacttccgtctcttcatgttcaccttcgcgcgcaagcctccttactggcctccctcagcaccaaaacggtatgtacggactgcaccaagatgtgcaccatttcaattcgtttgacaaggtgagatcccttcccctcttgctcagccaagcaggcgtgagaactggcatcatcggtaaaaagcatgtgggtcctgaaaccgtctacccgtttgattttgcatatactgaggaaaatggaagcgtcctgcaagtgggaagaaacatcacccgcattaaactcctggtcagaaagttcctgcagacccaagacgaccgacctttcttcctctacgtggcttttcatgatccacacagatgtggtcattcgcaaccacaatacggtacgttctgtgagaaattcggcaacggtgaatcaggtatgggaagaataccagattggactccccaagcatacgacccgcttgatgtgcttgtcccttacttcgtgccaaataccccagcagcacgtgccgatcttgccgcacaatacaccaccgtgggtcgaatggatcaaggcgtcggattggtgttgcaagaactccgcgacgctggagtccttaatgacactctggtcattttcacctcggacaacggtattccatttccatcggggcggaccaatctctactggccaggtactgcagaacctctcctcgtctcctcaccagagcatcccaagagatggggtcaggtgtccgaggcatacgtgagccttcttgatctcaccccaaccatccttgactggttctcgatcccatacccgtcgtacgccatttttggatccaagacgattcacctcactggccgatcacttcttcctgcgctggaagccgagccactgtgggcaactgtgtttggatctcagtcacatcatgaagtgacgatgtcctacccaatgagatcagttcaacatagacactttcgtctcgtccataacctgaactttaagatgccgtttccaatcgatcaggatttctacgtctcgcccacctttcaagatctgcttaatagaaccactgcaggccagccaaccggctggtacaaggacctgagacattactactaccgggcgcggtgggagctttacgacagatcgagagatcctcatgaaacccaaaatctggctactgatccgcgcttcgcacaactcctggaaatgcttagggaccagctggcaaaatggcagtgggaaacgcacgacccctgggtgtgcgcacccgatggagtcctggaagaaaaactgtcgccacagtgtcaacccctgcacaacgagctg

SEQ ID NO: 4253 - DNA, 1509 bp, Artificial Sequence
  derived and/or modified sequence
atgagctgccccgtgcccgcctgctgcgccctgctgctggtgctgggcctgtgcagagccagacccagaaacgccctgctgctgctggccgacgacggcggcttcgagagcggcgcctacaacaacagcgccatcgccaccccccacctggacgccctggccagaagaagcctgctgttcagaaacgccttcaccagcgtgagcagctgcagccccagcagagccagcctgctgaccggcctgccccagcaccagaacggcatgtacggcctgcaccaggacgtgcaccacttcaacagcttcgacaaggtgagaagcctgcccctgctgctgagccaggccggcgtgagaaccggcatcatcggcaagaagcacgtgggccccgagaccgtgtaccccttcgacttcgcctacaccgaggagaacggcagcgtgctgcaggtgggcagaaacatcaccagaatcaagctgctggtgagaaagttcctgcagacccaggacgacagacccttcttcctgtacgtggccttccacgacccccacagatgcggccacagccagccccagtacggcaccttctgcgagaagttcggcaacggcgagagcggcatgggcagaatccccgactggaccccccaggcctacgaccccctggacgtgctggtgccctacttcgtgcccaacacccccgccgccagagccgacctggccgcccagtacaccaccgtgggcagaatggaccagggcgtgggcctggtgctgcaggagctgagagacgccggcgtgctgaacgacaccctggtgatcttcaccagcgacaacggcatccccttccccagcggcagaaccaacctgtactggcccggcaccgccgagcccctgctggtgagcagccccgagcaccccaagagatggggccaggtgagcgaggcctacgtgagcctgctggacctgacccccaccatcctggactggttcagcatcccctaccccagctacgccatcttcggcagcaagaccatccacctgaccggcagaagcctgctgcccgccctggaggccgagcccctgtgggccaccgtgttcggcagccagagccaccacgaggtgaccatgagctaccccatgagaagcgtgcagcacagacacttcagactggtgcacaacctgaacttcaagatgcccttccccatcgaccaggacttctacgtgagccccaccttccaggacctgctgaacagaaccaccgccggccagcccaccggctggtacaaggacctgagacactactactacagagccagatgggagctgtacgacagaagcagagacccccacgagacccagaacctggccaccgaccccagattcgcccagctgctggagatgctgagagaccagctggccaagtggcagtgggagacccacgacccctgggtgtgcgcccccgacggcgtgctggaggagaagctgagcccccagtgccagcccctgcacaacgagctgtag

SEQ ID NO: 4254 - DNA, 900 bp, Artificial Sequence
  derived and/or modified sequence
atgggcagaatccccgactggaccccccaggcctacgaccccctggacgtgctggtgccctacttcgtgcccaacacccccgccgccagagccgacctggccgcccagtacaccaccgtgggcagaatggaccagggcgtgggcctggtgctgcaggagctgagagacgccggcgtgctgaacgacaccctggtgatcttcaccagcgacaacggcatccccttccccagcggcagaaccaacctgtactggcccggcaccgccgagcccctgctggtgagcagccccgagcaccccaagagatggggccaggtgagcgaggcctacgtgagcctgctggacctgacccccaccatcctggactggttcagcatcccctaccccagctacgccatcttcggcagcaagaccatccacctgaccggcagaagcctgctgcccgccctggaggccgagcccctgtgggccaccgtgttcggcagccagagccaccacgaggtgaccatgagctaccccatgagaagcgtgcagcacagacacttcagactggtgcacaacctgaacttcaagatgcccttccccatcgaccaggacttctacgtgagccccaccttccaggacctgctgaacagaaccaccgccggccagcccaccggctggtacaaggacctgagacactactactacagagccagatgggagctgtacgacagaagcagagacccccacgagacccagaacctggccaccgaccccagattcgcccagctgctggagatgctgagagaccagctggccaagtggcagtgggagacccacgacccctgggtgtgcgcccccgacggcgtgctggaggagaagctgagcccccagtgccagcccctgcacaacgagctgtag

SEQ ID NO: 4255 - protein, 15 aa, Artificial Sequence
  derived and/or modified sequence
KRKFHEKHHSHRGYC

SEQ ID NO: 4256 - protein, 14 aa, Artificial Sequence
  derived and/or modified sequence
KRKFHEKHHSHRGY

SEQ ID NO: 4257 - protein, 38 aa, Artificial Sequence
  derived and/or modified sequence
DSHEERHHGRHGHHKYGRKFHEKHHSHRGYRSNYLYDN

SEQ ID NO: 4258 - protein, 32 aa, Artificial Sequence
  derived and/or modified sequence
DSHAKRHHGYKRKFHEKHHSHRGYRSNYLYDN

SEQ ID NO: 4259 - protein, 24 aa, Artificial Sequence
  derived and/or modified sequence
DSHAKRHHGYKRKFHEKHHSHRGY

SEQ ID NO: 4260 - protein, 51 aa, Artificial Sequence
  derived and/or modified sequence
MKFFVFALILALMLSMTGADSHAKRHHGYKRKFHEKHHSHRGYRSNYLYDN

SEQ ID NO: 4261 - DNA, 156 bp, Artificial Sequence
  derived and/or modified sequence
atgaagtttttcgtattcgcccttatccttgcgctcatgctctctatgaccggagccgacagccacgcgaaaaggcaccatggctacaagcgaaagttccatgagaagcatcacagtcaccgaggatacagatccaactacctctacgacaattag

SEQ ID NO: 4262 - DNA, 156 bp, Artificial Sequence
  derived and/or modified sequence
atgaagttctttgtgtttgccttaattctcgctttgatgctgtccatgacaggcgccgactctcacgccaagcggcaccacggatataaaaggaaattccacgagaaacatcatagtcatcgcggctaccgatcaaactacctttacgacaactag

SEQ ID NO: 4263 - DNA, 578 bp, Artificial Sequence
  derived and/or modified sequence
gggagatttcaacgtgtttaaatacatcagccatctaggaaaggacatctcttgagacttcacttcagcttcactgacttctggattctcctcttgagtaaaaggactcagccaactatgaagttttttgtttttgctttaatcttggctctcatgctttccatgactggagctgattcacatgcaaagagacatcatgggtataaaagaaaattccatgaaaagcatcattcacatcgaggctatagatcaaattatctgtatgacaattgatatcttcagtaatcacggggcatgattatggaggtttgactggcaaattcgctttggactcgtgtattctcatttgtcataccgcatcacactaccactgctttttgaagaattatcataaggcaatgcagaataaaagaaataccatgatttagtgaattctgtgtttcaggatacttcccttcctaattatcatttgattagatacttgcaatttaaatgttaagctgttttcactgctgtttctgagtaatagaaattcattcctctccaaaagcaataaaattcaagcacattattatgtg

SEQ ID NO: 4264 - DNA, 775 bp, Artificial Sequence
  derived and/or modified sequence
ggacatctcttgagacttcacttcagcttcactgacttctggattctcctcttgagtaaaaggactcagccaactatgaagttttttgtttttgctttaatcttggctctcatgctttccatgactggagctgattcacatgcaaagagacatcatgggtataaaagaaaattccatgaaaagcatcattcacatcgaggctatagatcaaattatctgtatgacaattgatatcttcagtaatcacggggcatgattatggaggtctctgcttgctatctgatctacgacaatcctgacaaaaacaagcaatgggaaaaggatctcctagtcaataaatggtactgggaaaactggctagccatatacagaaaactgaaactggaccccttccttacaccttatacaaaaattaactcaagatggattgaaaattaaatgaaaaacccaaaaccaaaaaaagaccctagaagaaaacctaggtgatatcattcgggacataggcatggacaaagacttcatgaagaaaatgccaaaagcaatggcaacaaaagccaaaattcacaaatgggatctaattaaactaaagagcttctgcacaacaaaagaaactatcatcagagtgaacaggtaacttagagattgggagaaaatttttgcagtctacccatctgacaaaggtgtagtgtccagagtctacaaggaacttaaacaaatttacaagacaaaaacaaaaaacccgtctaaaagtggacaaaggatatgaacagacact

SEQ ID NO: 4265 - DNA, 156 bp, Artificial Sequence
  derived and/or modified sequence
atgaagttctttgtgtttgccctgatcctggccctgatgctgtccatgactggagctgacagccacgccaagaggcaccacggctacaagaggaagttccacgagaagcaccacagccaccggggctaccgcagcaactacctgtatgacaactag

SEQ ID NO: 4266 - DNA, 156 bp, Artificial Sequence
  derived and/or modified sequence
atgaagttcttcgtgttcgccctgatcctggccctgatgctgagcatgactggagccgatagtcacgcaaagcgtcaccacggatacaaacgcaagttccatgagaagcaccactcccatcgtggctaccggagtaattatctgtatgataactag

SEQ ID NO: 4267 - DNA, 156 bp, Artificial Sequence
  derived and/or modified sequence
atgaagttcttcgtgttcgccctgatcctggccctgatgctgagcatgacaggagccgatagccacgctaagaggcaccatggctataaaaggaaattccacgagaaacaccatagtcacagaggctatcgcagcaattacctgtacgacaactag

SEQ ID NO: 4268 - DNA, 156 bp, Artificial Sequence
  derived and/or modified sequence
atgaagttttttgtcttcgctttaatcctagcgctaatgctcagtatgaccggagcagattcacacgccaaaaggcatcacggctacaaaaggaagtttcacgagaaacaccactcacatcggggataccgcagtaattacctttacgacaattag

SEQ ID NO: 4269 - DNA, 156 bp, Artificial Sequence
  derived and/or modified sequence
atgaagttcttcgtttttgcactgatcctggcactcatgctctcaatgactggcgctgactcacacgctaaacggcaccatggttataaaaggaagtttcatgaaaaacatcactcacacagggggtaccggtccaattacctgtatgacaactag

SEQ ID NO: 4270 - DNA, 156 bp, Artificial Sequence
  derived and/or modified sequence
atgaagttcttcgtgttcgccctgatcctggccctgatgctgagcatgaccggcgccgacagccacgccaagagacaccacggctacaagagaaagttccacgagaagcaccacagccacagaggctacagaagcaactacctgtacgacaactag

SEQ ID NO: 4271 - protein, 532 aa, Artificial Sequence
  derived and/or modified sequence
MAPSSPRPALPALLVLLGALFPGPGNAQTSVSPSKVILPRGGSVLVTCSTSCDQPKLLGIETPLPKKELLLPGNNRKVYELSNVQEDSQPMCYSNCPDGQSTAKTFLTVYWTPERVELAPLPSWQPVGKNLTLRCQVEGGAPRANLTVVLLRGEKELKREPAVGEPAEVTTTVLVRRDHHGANFSCRTELDLRPQGLELFENTSAPYQLQTFVLPATPPQLVSPRVLEVDTQGTVVCSLDGLFPVSEAQVHLALGDQRLNPTVTYGNDSFSAKASVSVTAEDEGTQRLTCAVILGNQSQETLQTVTIYSFPAPNVILTKPEVSEGTEVTVKCEAHPRAKVTLNGVPAQPLGPRAQLLLKATPEDNGRSFSCSATLEVAGQLIHKNQTRELRVLYGPRLDERDCPGNWTWPENSQQTPMCQAWGNPLPELKCLKDGTFPLPIGESVTVTRDLEGTYLCRARSTQGEVTRKVTVNVLSPRYEIVIITVVAAAVIMGTAGLSTYLYNRQRKIKKYRLQQAQKGTPMKPNTQATPP

SEQ ID NO: 4272 - protein, 310 aa, Artificial Sequence
  derived and/or modified sequence
MAPSSPRPALPALLVLLGALFPVSEAQVHLALGDQRLNPTVTYGNDSFSAKASVSVTAEDEGTQRLTCAVILGNQSQETLQTVTIYSFPAPNVILTKPEVSEGTEVTVKCEAHPRAKVTLNGVPAQPLGPRAQLLLKATPEDNGRSFSCSATLEVAGQLIHKNQTRELRVLYGPRLDERDCPGNWTWPENSQQTPMCQAWGNPLPELKCLKDGTFPLPIGESVTVTRDLEGTYLCRARSTQGEVTRKVTVNVLSPRYEIVIITVVAAAVIMGTAGLSTYLYNRQRKIKKYRLQQAQKGTPMKPNTQATPP

SEQ ID NO: 4273 - DNA, 1599 bp, Artificial Sequence
  derived and/or modified sequence
atggcacctagtagcccccggcccgccctgcccgctctgctggtattgctgggggctctattcccaggaccagggaacgcccagacatccgtctctccctcaaaggtaatcctcccccggggtgggtcagtgttggtcacgtgctccacttcctgcgatcagcctaagctgctgggaatagagacccctctccccaagaaggaactgctgctgcctggcaacaataggaaagtgtatgaactgtccaacgttcaagaagatagtcagcccatgtgttacagcaattgccctgatgggcagtccaccgcaaagacattcttaaccgtttattggacccctgagcgcgtggaactagccccactgccgtcatggcagccggtgggtaagaatctgactctgcggtgccaagtggagggtggggcccctcgcgctaatcttaccgttgtgctgctgcggggggaaaaagaactgaagagagaacccgcggtgggcgaaccagctgaggtgaccactactgtgctcgttcgacgggaccaccacggtgcgaacttcagctgcagaaccgagctcgaccttagacctcaggggctggaactctttgaaaatacttcggctccttaccagctgcagacttttgtgctccctgccacccccccgcagctggtgagtcctcgagtccttgaagtggatacacaggggaccgtggtctgcagtctcgacgggctgttccccgtatcagaggcacaagtgcatctggcgcttggcgaccagaggctaaaccctaccgtcacgtacgggaacgacagcttttccgccaaagcaagtgtatctgtgacagccgaggatgagggcactcaacgcctgacctgtgctgtaatacttggaaatcagtcgcaggagacgctccagaccgtcaccatatattcttttcctgctccaaacgtaatcctgaccaagccagaggtttcagaaggcaccgaggtgaccgtgaaatgcgaagcacatcctagggcaaaagtcactctgaatggagtgcctgcccagccgttgggcccaagagcacaactcctcctgaaggccactccagaagacaacgggcgaagcttttcatgctctgcaacactagaagtggctggacagctgatccacaagaaccagacccgggaactgcgggtgttatacggcccacgactggatgagagggattgtcctggtaactggacctggcctgagaactcacagcagacaccgatgtgccaggcatggggtaacccactcccagaacttaaatgcctgaaagacggaacatttccgctgcctataggtgagagcgtgaccgtgactcgtgacctggaggggacttatctgtgcagggcgcgctccactcagggcgaggttactcggaaggtgactgtgaacgtgctctccccacgatacgagatcgtgatcatcacggtggtggccgctgccgtcatcatgggtactgctggactgagcacctatctttacaatcgacaacgaaagatcaaaaagtacagactgcagcaagcccagaaaggtactcctatgaagcctaatacacaagctaccccaccttag

SEQ ID NO: 4274 - DNA, 933 bp, Artificial Sequence
  derived and/or modified sequence
atggccccgagtagccccagacccgccctgccagcactgctggtgcttctcggcgcccttttccccgtgtcggaagctcaggttcacttggctctcggcgaccagcggctaaatcccacggttacatatggcaacgactccttttctgctaaggctagcgttagtgtgaccgccgaggacgaggggacccagaggcttacatgcgctgtgattctggggaatcagtcccaggagactctccagaccgtaaccatttattctttccccgctccaaatgtaatactcacaaaacccgaggttagcgaagggaccgaggtaacagtaaagtgtgaagctcacccaagggccaaggtcacgctgaacggcgtgcccgcccagccgctgggaccacgggcccagctgcttctgaaagctacgcccgaggataacggacgctcgttttcttgtagcgctaccttggaggtggctgggcagctgattcataagaaccaaaccagagaattaagggtgctgtatggacctcgcttggacgagcgggactgtcccggaaactggacttggcccgagaacagccagcagacgcctatgtgccaggcgtggggaaatcccctcccagaactgaaatgcctgaaagatgggaccttcccactgccaattggcgagtctgtgactgttacaagggatcttgagggaacctatttatgcagagcccggtccacccagggcgaggtcacacgcaaggtgactgttaacgttctgtccccccgatatgagatcgtgatcatcacagttgtcgccgctgccgtaatcatggggactgcagggttgtccacctacctttacaaccggcaacgaaaaatcaaaaagtaccgccttcagcaggcacagaagggcactccaatgaagcctaatacacaggcgactcctccttag

SEQ ID NO: 4275 - DNA, 3246 bp, Artificial Sequence
  derived and/or modified sequence
caagcttagcctggccgggaaacgggaggcgtggaggccgggagcagcccccggggtcatcgccctgccaccgccgcccgattgctttagcttggaaattccggagctgaagcggccagcgagggaggatgaccctctcggcccgggcaccctgtcagtccggaaataactgcagcatttgttccggaggggaaggcgcgaggtttccgggaaagcagcaccgccccttggcccccaggtggctagcgctataaaggatcacgcgccccagtcgacgctgagctcctctgctactcagagttgcaacctcagcctcgctatggctcccagcagcccccggcccgcgctgcccgcactcctggtcctgctcggggctctgttcccaggacctggcaatgcccagacatctgtgtccccctcaaaagtcatcctgccccggggaggctccgtgctggtgacatgcagcacctcctgtgaccagcccaagttgttgggcatagagaccccgttgcctaaaaaggagttgctcctgcctgggaacaaccggaaggtgtatgaactgagcaatgtgcaagaagatagccaaccaatgtgctattcaaactgccctgatgggcagtcaacagctaaaaccttcctcaccgtgtactggactccagaacgggtggaactggcacccctcccctcttggcagccagtgggcaagaaccttaccctacgctgccaggtggagggtggggcaccccgggccaacctcaccgtggtgctgctccgtggggagaaggagctgaaacgggagccagctgtgggggagcccgctgaggtcacgaccacggtgctggtgaggagagatcaccatggagccaatttctcgtgccgcactgaactggacctgcggccccaagggctggagctgtttgagaacacctcggccccctaccagctccagacctttgtcctgccagcgactcccccacaacttgtcagcccccgggtcctagaggtggacacgcaggggaccgtggtctgttccctggacgggctgttcccagtctcggaggcccaggtccacctggcactgggggaccagaggttgaaccccacagtcacctatggcaacgactccttctcggccaaggcctcagtcagtgtgaccgcagaggacgagggcacccagcggctgacgtgtgcagtaatactggggaaccagagccaggagacactgcagacagtgaccatctacagctttccggcgcccaacgtgattctgacgaagccagaggtctcagaagggaccgaggtgacagtgaagtgtgaggcccaccctagagccaaggtgacgctgaatggggttccagcccagccactgggcccgagggcccagctcctgctgaaggccaccccagaggacaacgggcgcagcttctcctgctctgcaaccctggaggtggccggccagcttatacacaagaaccagacccgggagcttcgtgtcctgtatggcccccgactggacgagagggattgtccgggaaactggacgtggccagaaaattcccagcagactccaatgtgccaggcttgggggaacccattgcccgagctcaagtgtctaaaggatggcactttcccactgcccatcggggaatcagtgactgtcactcgagatcttgagggcacctacctctgtcgggccaggagcactcaaggggaggtcacccgcaaggtgaccgtgaatgtgctctccccccggtatgagattgtcatcatcactgtggtagcagccgcagtcataatgggcactgcaggcctcagcacgtacctctataaccgccagcggaagatcaagaaatacagactacaacaggcccaaaaagggacccccatgaaaccgaacacacaagccacgcctccctgaacctatcccgggacagggcctcttcctcggccttcccatattggtggcagtggtgccacactgaacagagtggaagacatatgccatgcagctacacctaccggccctgggacgccggaggacagggcattgtcctcagtcagatacaacagcatttggggccatggtacctgcacacctaaaacactaggccacgcatctgatctgtagtcacatgactaagccaagaggaaggagcaagactcaagacatgattgatggatgttaaagtctagcctgatgagaggggaagtggtgggggagacatagccccaccatgaggacatacaactgggaaatactgaaacttgctgcctattgggtatgctgaggccccacagacttacagaagaagtggccctccatagacatgtgtagcatcaaaacacaaaggcccacacttcctgacggatgccagcttgggcactgctgtctactgaccccaacccttgatgatatgtatttattcatttgttattttaccagctatttattgagtgtcttttatgtaggctaaatgaacataggtctctggcctcacggagctcccagtcctaatcacattcaaggtcaccaggtacagttgtacaggttgtacactgcaggagagtgcctggcaaaaagatcaaatggggctgggacttctcattggccaacctgcctttccccagaaggagtgatttttctatcggcacaaaagcactatatggactggtaatggttacaggttcagagattacccagtgaggccttattcctcccttccccccaaaactgacacctttgttagccacctccccacccacatacatttctgccagtgttcacaatgacactcagcggtcatgtctggacatgagtgcccagggaatatgcccaagctatgccttgtcctcttgtcctgtttgcatttcactgggagcttgcactatgcagctccagtttcctgcagtgatcagggtcctgcaagcagtggggaagggggccaaggtattggaggactccctcccagctttggaagcctcatccgcgtgtgtgtgtgtgtgtatgtgtagacaagctctcgctctgtcacccaggctggagtgcagtggtgcaatcatggttcactgcagtcttgaccttttgggctcaagtgatcctcccacctcagcctcctgagtagctgggaccataggctcacaacaccacacctggcaaatttgattttttttttttttccagagacggggtctcgcaacattgcccagacttcctttgtgttagttaataaagctttctcaactgcc

SEQ ID NO: 4276 - DNA, 1296 bp, Artificial Sequence
  derived and/or modified sequence
aaaggatcacgcgccccagtcgacgctgagctcctctgctactcagagttgcaacctcagcctcgctatggctcccagcagcccccggcccgcgctgcccgcactcctggtcctgctcggggctctgttcccagtctcggaggcccaggtccacctggcactgggggaccagaggttgaaccccacagtcacctatggcaacgactccttctcggccaaggcctcagtcagtgtgaccgcagaggacgagggcacccagcggctgacgtgtgcagtaatactggggaaccagagccaggagacactgcagacagtgaccatctacagctttccggcgcccaacgtgattctgacgaagccagaggtctcagaagggaccgaggtgacagtgaagtgtgaggcccaccctagagccaaggtgacgctgaatggggttccagcccagccactgggcccgagggcccagctcctgctgaaggccaccccagaggacaacgggcgcagcttctcctgctctgcaaccctggaggtggccggccagcttatacacaagaaccagacccgggagcttcgtgtcctgtatggcccccgactggacgagagggattgtccgggaaactggacgtggccagaaaattcccagcagactccaatgtgccaggcttgggggaacccattgcccgagctcaagtgtctaaaggatggcactttcccactgcccatcggggaatcagtgactgtcactcgagatcttgagggcacctacctctgtcgggccaggagcactcaaggggaggtcacccgcaaggtgaccgtgaatgtgctctccccccggtatgagattgtcatcatcactgtggtagcagccgcagtcataatgggcactgcaggcctcagcacgtacctctataaccgccagcggaagatcaagaaatacagactacaacaggcccaaaaagggacccccatgaaaccgaacacacaagccacgcctccctgaacctatcccgggacagggcctcttcctcggccttcccatattggtggcagtggtgccacactgaacagagtggaagacatatgccatgcagctacacctaccggccctgggacgccggaggacagggcattgtcctcagtcagatacaacagcatttggggccatggtacctgcacacctaaaacactaggccacgcatctgatctgtagtcacatgactaagccaagaggaaggagcaagactcaagacatgattgatggatgttaaagtctagcctgatgagaggggaagtggt

SEQ ID NO: 4277 - DNA, 1599 bp, Artificial Sequence
  derived and/or modified sequence
atggcccccagcagccccaggcctgccctgcctgccctgctggtgctgctgggcgccctcttccctggccctggaaatgcccagacctctgtgagccccagcaaggtgatcctgccccggggcggctctgtgctggtgacctgcagcaccagctgtgaccagcccaagctgctgggcatcgagacccccctgcccaagaaggagctgctgctgcccggcaacaacaggaaggtgtatgagctgagcaatgtgcaggaggacagccagcccatgtgctacagcaactgcccagatggccagagcacagccaagaccttcctgactgtgtactggaccccagagcgggtggagctggcccccctgcccagctggcagcctgtgggcaagaacctgaccctgcgctgccaggtggagggcggggccccccgggccaacctgactgtggtgctgctgcggggggagaaggagctgaagcgggagcctgctgtgggggagcctgctgaggtgaccaccaccgtgctggtgcggcgggaccaccacggggccaacttcagctgcaggacagagctggacctgcggccccagggcctggagctgtttgagaacaccagcgccccctaccagctgcagacctttgtgctgcctgccaccccaccccagctggtgagcccccgggtgctggaggtggacacccagggcaccgtggtgtgcagcctggatggcctcttccctgtgtctgaggcccaggtgcacctggccctgggggaccagaggctgaaccccaccgtgacctatggaaatgacagcttcagcgccaaggcctctgtgtctgtgacagcagaagatgagggcacccagaggctgacctgtgctgtgatcctgggcaaccagagccaggagaccctgcagacagtgaccatctacagcttccctgcccccaacgtcatcctgaccaagccagaggtgtctgagggcacagaggtgacagtgaagtgtgaggcccacccccgggccaaggtgaccctgaatggagtgcctgcccagcccctgggcccccgggcccagctgctgctgaaggccaccccagaagataatggccgctccttcagctgcagcgccaccctggaggtggccggccagctgatccacaagaaccagacccgggagctgcgggtgctgtatggcccccggctggatgagcgggactgccccggcaactggacctggccagagaacagccagcagacccccatgtgccaggcctggggcaaccccctgcctgagctgaagtgcctgaaggatggcaccttccccctgcccatcggggagagcgtgacagtgacccgggacctggagggcacctacctgtgccgggcccggagcacccagggcgaggtgaccaggaaggtgacagtgaatgtgctgagccccaggtatgaaattgtcatcatcaccgtggtggccgccgccgtcatcatgggcacagctggcctgagcacctacctgtacaaccggcagaggaagatcaagaagtaccgcctgcagcaggcccagaagggcacccccatgaagcccaacacccaggccaccccaccctag

SEQ ID NO: 4278 - DNA, 933 bp, Artificial Sequence
  derived and/or modified sequence
atggcccccagcagccccaggcctgccctgcctgccctgctggtgctgctgggcgccctcttccctgtgtctgaggcccaggtgcacctggccctgggggaccagaggctgaaccccaccgtgacctatggaaatgacagcttcagcgccaaggcctctgtgtctgtgacagcagaagatgagggcacccagaggctgacctgtgctgtgatcctgggcaaccagagccaggagaccctgcagacagtgaccatctacagcttccctgcccccaacgtcatcctgaccaagccagaggtgtctgagggcacagaggtgacagtgaagtgtgaggcccacccccgggccaaggtgaccctgaatggagtgcctgcccagcccctgggcccccgggcccagctgctgctgaaggccaccccagaagataatggccgctccttcagctgcagcgccaccctggaggtggccggccagctgatccacaagaaccagacccgggagctgcgggtgctgtatggcccccggctggatgagcgggactgccccggcaactggacctggccagagaacagccagcagacccccatgtgccaggcctggggcaaccccctgcctgagctgaagtgcctgaaggatggcaccttccccctgcccatcggggagagcgtgacagtgacccgggacctggagggcacctacctgtgccgggcccggagcacccagggcgaggtgaccaggaaggtgacagtgaatgtgctgagccccaggtatgaaattgtcatcatcaccgtggtggccgccgccgtcatcatgggcacagctggcctgagcacctacctgtacaaccggcagaggaagatcaagaagtaccgcctgcagcaggcccagaagggcacccccatgaagcccaacacccaggccaccccaccctag

SEQ ID NO: 4279 - DNA, 1599 bp, Artificial Sequence
  derived and/or modified sequence
atggcccccagcagcccccggcccgccctgcccgccctgctggtgcttttaggagccctgtttccaggccctggaaatgctcagaccagcgtgtctccatcaaaggtgattcttcctcgaggaggctccgtccttgtgacctgcagtacaagctgtgatcaaccaaaactcctgggcatcgaaacccccctgcccaaaaaagagctccttctgcccgggaacaaccggaaggtgtacgagttatccaacgtccaggaagatagtcagcctatgtgctacagtaactgtcccgatggccagtcaacagccaagaccttcttaaccgtgtactggacccccgagcgagtcgaattggcccctttaccttcctggcagcctgtcggcaaaaatcttacgttacggtgccaggttgagggaggggcccctcgggcgaatttaaccgtggttctgttgaggggggagaaggaactcaaacgcgagcctgccgtgggagagccggccgaagtcactaccactgttctggtccgcagggaccatcacggagcgaatttcagttgtcggactgaactggatttgagaccacaaggtctggagctgtttgaaaatactagcgcgccataccagttacagacctttgttttgcccgccactcctcctcagcttgtgtctccccgcgtgctggaagttgacacacaaggcacagtggtgtgttccttggacggattattccctgtgagtgaggcgcaggtccacctggcattgggtgatcagcggctaaatcccacagtgacctacggcaacgactctttttctgctaaagcatccgtgtctgtcaccgcggaggacgagggcacacagcgcctgacctgcgcagtcattctgggtaaccagtcccaagagacccttcaaacagtgacaatttactccttcccagcccccaacgtgattcttactaagcccgaggtgtctgagggcacggaagtgactgtgaagtgtgaagcacacccacgggcaaaggttacgctgaatggagtgcccgctcaaccactcggccctagggcacagcttctcctgaaagcaacgcctgaagataatggtaggagtttctcttgcagtgcgacactggaggtcgccggccagttgatccacaaaaaccagacccgcgaactgagggtgctctacgggcctcgtctagatgagcgtgactgcccagggaattggacttggcccgaaaactctcaacagaccccaatgtgccaagcttggggcaatcccctcccagagctgaagtgcctgaaagacggcactttcccactcccaatcggtgaaagcgttaccgtgacacgtgaccttgagggtacttatctttgtagggccaggtcaacccagggtgaagtgactcggaaagtaaccgtgaacgtgctctcccctagatatgagattgtaatcattacagtggtcgctgcagcggtgatcatgggaaccgctggactgagcacgtatctgtataacagacagaggaagattaaaaagtaccgactgcagcaggcccagaaggggacacccatgaagccaaacacacaagctactccgccttag

SEQ ID NO: 4280 - DNA, 933 bp, Artificial Sequence
  derived and/or modified sequence
atggcccccagcagcccccggcccgccctgcccgccctgctggtgctgctgggtgcattattccctgtttctgaagctcaagtccacctggcattaggggatcaaagacttaacccaaccgtgacctacgggaacgatagtttctccgccaaagcctccgtgagcgtcacagctgaggatgaaggtacccagagactcacgtgcgctgttatcctaggaaatcagtctcaggagactctccaaacggttacaatttactcattccctgcgcctaatgttattctgactaaacctgaagtcagcgaaggaaccgaagtgactgtcaagtgcgaggcacaccctagggctaaggtgactctgaatggcgtgccagcccagccactgggtcctagggcccagctcctcctcaaggcaacaccggaggacaacgggcgatcattctcctgtagcgcaacgcttgaggtcgcaggtcagctgatacacaagaaccagacaagagagcttcgagtgctgtatggcccacgactcgatgagcgtgattgccccggaaattggacttggccagaaaactctcaacagaccccaatgtgccaggcttggggtaatccattgcctgagctgaaatgcctgaaagatggtactttcccgcttcccatcggcgaatcagttaccgtcacacgcgacctcgaagggacctatttatgtcgcgcgagatccacgcagggggaagtgacccggaaagtcaccgtgaatgtcctcagcccacgctacgaaatcgtcatcataaccgtggtggccgcagctgttattatgggcacagccggattgagtacctacttgtacaaccgacagagaaaaattaagaaatatagattgcaacaggctcagaaggggaccccaatgaagcctaacacccaggccactcccccttag

SEQ ID NO: 4281 - DNA, 1599 bp, Artificial Sequence
  derived and/or modified sequence
atggccccaagcagcccaagaccggctcttcccgcactgctggtcctgttaggcgcactcttccccggacccggtaacgcacagacaagcgtaagcccaagcaaagtaatccttcccaggggagggagcgtcttggtgacgtgtagtacatcgtgtgaccagccaaagcttctcggtattgagacgccccttccaaaaaaagaactgctcttgccaggaaacaatagaaaagtttatgaactgtccaacgtgcaggaggattcccaacctatgtgttactcaaattgtcctgacggtcaatctacagcgaagacctttttgaccgtctactggaccccggagcgggtcgagttagccccactcccctcctggcagcccgtggggaaaaacctgactctgaggtgccaggtggagggaggcgctcctagagccaacttgacagttgtacttctgaggggggagaaagaattaaagagggaacctgctgtgggcgagccagcagaggtcaccactactgtgttggtccgacgcgatcatcatggggctaacttttcgtgtcgaacagaactggacctccgcccacagggactcgagctgttcgagaacacgtctgctccctatcagctgcaaaccttcgttttaccggctacgccaccccagctggtctcacctcgtgtcctggaggtggacacacagggaaccgtggtttgttccctcgacggtctgtttccggtgtcagaggctcaggtgcacctggcgctgggggatcagaggctgaatccaacagtgacctacggcaatgattcgtttagtgccaaagcttccgtgtctgtgaccgccgaggacgaggggactcagcgattgacttgtgctgttatactgggaaaccagagccaggagacattgcagaccgtcaccatatattcctttccagcccctaatgtcatcctgaccaagccagaagtatcggagggcacggaggtgacagttaagtgtgaagcccatcctcgagcgaaggtcacgctgaacggagtgccagctcaaccactgggcccacgtgcccagctgctgctcaaagccactcctgaagataacggccgaagcttttcctgcagcgctaccctcgaagtcgccggacagctaatacataagaaccagacccgcgaactgagagtcctgtatgggcctaggctggatgagagggactgcccaggcaactggacttggcctgagaattcacagcagactccaatgtgccaggcctggggtaatccactacccgagttaaaatgcctgaaagatggcacattccccctccctattggagagagtgtaaccgtaacgcgggacctggagggaacctacctatgtcgggctcgcagtacgcagggagaggtaactaggaaggtgaccgtcaacgtgctttctccgagatatgagatcgtcatcatcactgttgtcgccgctgctgtgattatgggaacagccggtctcagcacatatctctacaacagacaacgcaagataaagaagtatagactgcaacaggctcagaaaggcaccccgatgaaacccaacacccaggcaaccccaccctag

SEQ ID NO: 4282 - DNA, 933 bp, Artificial Sequence
  derived and/or modified sequence
atggcaccttccagtccccgacccgcactccccgctctgctggttctactgggggcactcttccccgtctccgaagcccaggtccatctggcacttggtgaccaaagactgaatccaaccgtgacgtacgggaatgacagtttcagcgccaaagccagcgtgtccgtcactgctgaagatgagggtactcagcgcctgacttgcgcagtcattctgggcaaccaatcccaagagaccttacagaccgtgaccatttactcttttccggctccaaacgtgatcctgaccaaacctgaggtctcggaaggcacagaagtcacggtgaagtgtgaagcccacccgagggctaaagtgaccctgaatggcgtgccagctcagccacttggacccagggcgcagctcctgctcaaggccacacccgaagacaacggaagaagttttagctgctcggctaccctcgaagtagctggacagctgatacacaagaaccagacaagggagctgcgcgtgctctacgggccaagacttgacgagagggactgcccaggtaactggacatggccagaaaattcacaacagaccccaatgtgccaggcatggggcaaccctctacccgagctaaagtgcctcaaagatggtacattccctcttccaattggtgagagcgtgaccgtgacccgggacctggagggcacttatttgtgtcgggcacgaagtacacagggagaagtaacccggaaagtgactgtaaacgtgctatcaccccgttacgagatcgtgatcattacggtggtcgcagcagcagttattatgggcaccgccggactcagcacttacttatacaatagacagcggaagatcaagaaatacagacttcagcaggcccagaaaggcacgccgatgaaacccaatactcaggccacgcctccatag

SEQ ID NO: 4283 - DNA, 1599 bp, Artificial Sequence
  derived and/or modified sequence
atggcccccagcagccccagacccgccctgcccgccctgctggtgctgctgggcgccctgttccccggccccggcaacgcccagaccagcgtgagccccagcaaggtgatcctgcccagaggcggcagcgtgctggtgacctgcagcaccagctgcgaccagcccaagctgctgggcatcgagacccccctgcccaagaaggagctgctgctgcccggcaacaacagaaaggtgtacgagctgagcaacgtgcaggaggacagccagcccatgtgctacagcaactgccccgacggccagagcaccgccaagaccttcctgaccgtgtactggacccccgagagagtggagctggcccccctgcccagctggcagcccgtgggcaagaacctgaccctgagatgccaggtggagggcggcgcccccagagccaacctgaccgtggtgctgctgagaggcgagaaggagctgaagagagagcccgccgtgggcgagcccgccgaggtgaccaccaccgtgctggtgagaagagaccaccacggcgccaacttcagctgcagaaccgagctggacctgagaccccagggcctggagctgttcgagaacaccagcgccccctaccagctgcagaccttcgtgctgcccgccacccccccccagctggtgagccccagagtgctggaggtggacacccagggcaccgtggtgtgcagcctggacggcctgttccccgtgagcgaggcccaggtgcacctggccctgggcgaccagagactgaaccccaccgtgacctacggcaacgacagcttcagcgccaaggccagcgtgagcgtgaccgccgaggacgagggcacccagagactgacctgcgccgtgatcctgggcaaccagagccaggagaccctgcagaccgtgaccatctacagcttccccgcccccaacgtgatcctgaccaagcccgaggtgagcgagggcaccgaggtgaccgtgaagtgcgaggcccaccccagagccaaggtgaccctgaacggcgtgcccgcccagcccctgggccccagagcccagctgctgctgaaggccacccccgaggacaacggcagaagcttcagctgcagcgccaccctggaggtggccggccagctgatccacaagaaccagaccagagagctgagagtgctgtacggccccagactggacgagagagactgccccggcaactggacctggcccgagaacagccagcagacccccatgtgccaggcctggggcaaccccctgcccgagctgaagtgcctgaaggacggcaccttccccctgcccatcggcgagagcgtgaccgtgaccagagacctggagggcacctacctgtgcagagccagaagcacccagggcgaggtgaccagaaaggtgaccgtgaacgtgctgagccccagatacgagatcgtgatcatcaccgtggtggccgccgccgtgatcatgggcaccgccggcctgagcacctacctgtacaacagacagagaaagatcaagaagtacagactgcagcaggcccagaagggcacccccatgaagcccaacacccaggccacccccccctag

SEQ ID NO: 4284 - DNA, 933 bp, Artificial Sequence
  derived and/or modified sequence
atggcccccagcagccccagacccgccctgcccgccctgctggtgctgctgggcgccctgttccccgtgagcgaggcccaggtgcacctggccctgggcgaccagagactgaaccccaccgtgacctacggcaacgacagcttcagcgccaaggccagcgtgagcgtgaccgccgaggacgagggcacccagagactgacctgcgccgtgatcctgggcaaccagagccaggagaccctgcagaccgtgaccatctacagcttccccgcccccaacgtgatcctgaccaagcccgaggtgagcgagggcaccgaggtgaccgtgaagtgcgaggcccaccccagagccaaggtgaccctgaacggcgtgcccgcccagcccctgggccccagagcccagctgctgctgaaggccacccccgaggacaacggcagaagcttcagctgcagcgccaccctggaggtggccggccagctgatccacaagaaccagaccagagagctgagagtgctgtacggccccagactggacgagagagactgccccggcaactggacctggcccgagaacagccagcagacccccatgtgccaggcctggggcaaccccctgcccgagctgaagtgcctgaaggacggcaccttccccctgcccatcggcgagagcgtgaccgtgaccagagacctggagggcacctacctgtgcagagccagaagcacccagggcgaggtgaccagaaaggtgaccgtgaacgtgctgagccccagatacgagatcgtgatcatcaccgtggtggccgccgccgtgatcatgggcaccgccggcctgagcacctacctgtacaacagacagagaaagatcaagaagtacagactgcagcaggcccagaagggcacccccatgaagcccaacacccaggccacccccccctag

SEQ ID NO: 4285 - protein, 550 aa, Artificial Sequence
  derived and/or modified sequence
MPPPRTGRGLLWLGLVLSSVCVALGSETQANSTTDALNVLLIIVDDLRPSLGCYGDKLVRSPNIDQLASHSLLFQNAFAQQAVCAPSRVSFLTGRRPDTTRLYDFNSYWRVHAGNFSTIPQYFKENGYVTMSVGKVFHPGISSNHTDDSPYSWSFPPYHPSSEKYENTKTCRGPDGELHANLLCPVDVLDVPEGTLPDKQSTEQAIQLLEKMKTSASPFFLAVGYHKPHIPFRYPKEFQKLYPLENITLAPDPEVPDGLPPVAYNPWMDIRQREDVQALNISVPYGPIPVDFQRKIRQSYFASVSYLDTQVGRLLSALDDLQLANSTIIAFTSDHGWALGEHGEWAKYSNFDVATHVPLIFYVPGRTASLPEAGEKLFPYLDPFDSASQLMEPGRQSMDLVELVSLFPTLAGLAGLQVPPRCPVPSFHVELCREGKNLLKHFRFRDLEEDPYLPGNPRELIAYSQYPRPSDIPQWNSDKPSLKDIKIMGYSIRTIDYRYTVWVGFNPDEFLANFSDIHAGELYFVDSDPLQDHNMYNDSQGGDLFQLLMP

SEQ ID NO: 4286 - protein, 153 aa, Artificial Sequence
  derived and/or modified sequence
MDLVELVSLFPTLAGLAGLQVPPRCPVPSFHVELCREGKNLLKHFRFRDLEEDPYLPGNPRELIAYSQYPRPSDIPQWNSDKPSLKDIKIMGYSIRTIDYRYTVWVGFNPDEFLANFSDIHAGELYFVDSDPLQDHNMYNDSQGGDLFQLLMP

SEQ ID NO: 4287 - protein, 339 aa, Artificial Sequence
  derived and/or modified sequence
MKTSASPFFLAVGYHKPHIPFRYPKEFQKLYPLENITLAPDPEVPDGLPPVAYNPWMDIRQREDVQALNISVPYGPIPVDFQRKIRQSYFASVSYLDTQVGRLLSALDDLQLANSTIIAFTSDHGWALGEHGEWAKYSNFDVATHVPLIFYVPGRTASLPEAGEKLFPYLDPFDSASQLMEPGRQSMDLVELVSLFPTLAGLAGLQVPPRCPVPSFHVELCREGKNLLKHFRFRDLEEDPYLPGNPRELIAYSQYPRPSDIPQWNSDKPSLKDIKIMGYSIRTIDYRYTVWVGFNPDEFLANFSDIHAGELYFVDSDPLQDHNMYNDSQGGDLFQLLMP

SEQ ID NO: 4288 - DNA, 5876 bp, Artificial Sequence
  derived and/or modified sequence
agaacccgccccggaggggagggacgcagggaagagtcgcacggacgcactcgcgctgcggccagcgcccgggcctgcgggcccgggcggcggctgtgttgcgcagtcttcatgggttcccgacgaggaggtctctgtggctgcggcggcggctgctaactgcgccacctgctgcagcctgtccccgccgctctgaagcggccgcgtcgaagccgaaatgccgccaccccggaccggccgaggccttctctggctgggtctggttctgagctccgtctgcgtcgccctcggatccgaaacgcaggccaactcgaccacagatgctctgaacgttcttctcatcatcgtggatgacctgcgcccctccctgggctgttatggggataagctggtgaggtccccaaatattgaccaactggcatcccacagcctcctcttccagaatgcctttgcgcagcaagcagtgtgcgccccgagccgcgtttctttcctcactggcaggagacctgacaccacccgcctgtacgacttcaactcctactggagggtgcacgctggaaacttctccaccatcccccagtacttcaaggagaatggctatgtgaccatgtcggtgggaaaagtctttcaccctgggatatcttctaaccataccgatgattctccgtatagctggtcttttccaccttatcatccttcctctgagaagtatgaaaacactaagacatgtcgagggccagatggagaactccatgccaacctgctttgccctgtggatgtgctggatgttcccgagggcaccttgcctgacaaacagagcactgagcaagccatacagttgttggaaaagatgaaaacgtcagccagtcctttcttcctggccgttgggtatcataagccacacatccccttcagataccccaaggaatttcagaagttgtatcccttggagaacatcaccctggcccccgatcccgaggtccctgatggcctaccccctgtggcctacaacccctggatggacatcaggcaacgggaagacgtccaagccttaaacatcagtgtgccgtatggtccaattcctgtggactttcagcggaaaatccgccagagctactttgcctctgtgtcatatttggatacacaggtcggccgcctcttgagtgctttggacgatcttcagctggccaacagcaccatcattgcatttacctcggatcatgggtgggctctaggtgaacatggagaatgggccaaatacagcaattttgatgttgctacccatgttcccctgatattctatgttcctggaaggacggcttcacttccggaggcaggcgagaagcttttcccttacctcgacccttttgattccgcctcacagttgatggagccaggcaggcaatccatggaccttgtggaacttgtgtctctttttcccacgctggctggacttgcaggactgcaggttccacctcgctgccccgttccttcatttcacgttgagctgtgcagagaaggcaagaaccttctgaagcattttcgattccgtgacttggaagaggatccgtacctccctggtaatccccgtgaactgattgcctatagccagtatccccggccttcagacatccctcagtggaattctgacaagccgagtttaaaagatataaagatcatgggctattccatacgcaccatagactataggtatactgtgtgggttggcttcaatcctgatgaatttctagctaacttttctgacatccatgcaggggaactgtattttgtggattctgacccattgcaggatcacaatatgtataatgattcccaaggtggagatcttttccagttgttgatgccttgagttttgccaaccatggatggcaaatgtgatgtgctcccttccagctggtgagaggaggagttagagctggtcgttttgtgattacccataatattggaagcagcctgagggctagttaatccaaacatgcatcaacaatttggcctgagaatatgtaacagccaaaccttttcgtttagtctttattaaaatttataattggtaattggaccagttttttttttaatttccctctttttaaaacagttacggcttatttactgaataaatacaaagcaaacaaactcaagttatgtcatacctttggatacgaagaccatacataataaccaaacataacattatacacaaagaatactttcattatttgtggaatttagtgcatttcaaaaagtaatcatatatcaaactaggcaccacactaagttcctgattattttgtttataatttaataatatatcttatgagccctatatattcaaaatattatgttaacatgtaatccatgtttctttttcaaatctaaagttaaaaaaaaatagcagaagccagtgtcttaaagtctatcttttgtttctaagaccatgggatttcataatctcaagataaaatatgtatgaagtaattaatgtagaatttttacaccaaataataaataatgcttaataaactagagatatgagatgtgtaggaaatttggttaaacttttttcagatactttctggcccaaataataatttgttagcaaataatatgacccttgaactcaatggccatctattaaaagactgttgttcacactggaaaacatttaaagatgtgactatatccatgggtggattgaatcactcaaaatatattagtatccttctttagggatggttggttacagacatgtatttattcaggaggcagaaaatattccattttaattgcttattaaagaaaacattaaattctaaattattttgaggactgtgaagacttttcattagtgtaatattaggtcattgtcaatctcccagaatgtagttctatattctctaaatatgaaagtatccagaaaggccagtggtagtaaaaagcttagtgtatataatctcaaaagggatggaatatttacagctcatatttataacatgttgaatcttctcagttatcagtagtcatcagaagtgtcaatagctttctaaataaatattaaatatctactgtcctgtagtgaaggagtaatttttagtaattttctctttacaaagtctccagtgtttccaggtaaatatttgtgaaacaaaatacagcaaactacattgttacttcagtgtattgttgccaaaaatgacaagatattatattaaaatcagtaaattttagacagattttaaaaattaattagcctacaatagaggttatatggtaacacggtgatcttctaagcagttaagtgactgactgttctggcaacaacgacttctccgtgactgaagggccctgttcatttcctgatcctgaagctcgtctctcttttgagcctccgcttgctttggtcgatggtttccctcagctttttctttgctgttcttcatcctcgttgttgctgtcatcatgttcactgtggcttttacaatacagcctgtaaattccttatgacatagttcagtgcatttggctttatcgcctgctccacagttctttacctttacttggcttagagaaactgtatctttgttgcttcatataacctttccccaaccccactaagctggacataacttattagtggtcctcccgtcactttatttgtagaaatctctctttcacatgagcaggggttctttcatgtggtttagctgacagcagaactagtgattctagacattttgcatggccctcattcagtggctcacaaacatgagggagcatcagaactacttgaggggcttgttaaaacccagtgcgttagaagtcggatgcggtggctcacacctgtaatcccagcactttgggaggcccaggcaggcggatcacttgaggttaggagttcaagaccagcctggccaacatggtgaaaccccgtctctactaaaaatacaaaagttagccgggtgtggtggtgcatgcctgtaatcccagcttcttgggaggccaaggcacaagaatcgcttgaaccaggagacggaggtttcagtgaatgaagatcgtgccattgtattccagcctcggcaacacagcaggactgtgattttctttggagactcctagattttctgtggttttgaactgaatttgttggatgttggcaagtgcctcttatgagctgtttctttatcctgcatttgccccacaaagacttatctggaggtgagcaaagtatgtttggtagtgaggtcacaaaggcaatcagccccttcctccccactcccattgccatcttctcagtccttctccctttctttccaagtagtttacccacccctcctctttcctcccctgtccctaaaataatccacgtgtcttcctaaaatctctctttgatcctgtcctttgataacaccgtcagtgcctactactgggtctagacagacctctgttgagcagtcagagtcttccctgactccacaatgcccctttccttggctgaccagtatgactactggtccccacctttcccttgcctatccctacctccctcctactaggttgtcccatccctctcttcacccattcattcatgaccatttttcactaccaagctccccccctcccgaaggaggctgaggtttttgtgactctctagactctattgtgggatggaatgaacattgctaaagaatcttgtgttcgctttactttaaaaaggtatttttttcctaattataaaactgatgtgtcagttacggaaaaattagaaatgcagcacaaatacatgaatattttaccacgaaattgccatataatatcttgtcttttttgggggtgtgaattttttgcattgttctgatcatattctttatcatgtaatttatgttcttttttactaagtattatgtgtggttattatagattttcacaaagatatattgctggtaatatattttattgtgtagtcttataatttacttaaccttctttcaattgttagaaatttaggctatttccagattttcagtattgtaaataatgctgtgatgaccaattttgtgaataaaatgtttttatgtatttcagattattcccttaggatagtctctcagtgccaagttgtcaaaaacatctctattttgcttatcttcctgctctcttgctgccttagggggtagtaaactgaaacataaagtaaacatgcatacaaataaaaaacataaaacaaaaataagcaacctgatggtaataggtgaaagtggtaacctgttttaactttgaattcttgccgggcgcggtggctcacgcctgtaatcccagcactttgggaggctgaggcgggtggatcacgaggtcaggagttcaaaaccagcctggccaagatggtgaaatcccgtctctactaaaaatacaaaaattagccgggcgtggtggcgggcgcctgtaatcccagctacttgggaggctgaggcagagaattgcttgaacccaggaggcggaggttgcagtgagccaagatcgcgccactgcactccagcctgggtgacagagcgagactccgtctcaaataaaaaacaacaaaaaacaaaaaaaacttaaaattctttgcttgttagtgaccttgatcatggttctctttgtacgatagttgggcatctgtatttccacttgtgtgaatttgcctttaaattttggttatgggtttcaccttttaaaataatcaaacatatttatcttttcctgtgtgataggtttttttctgtatcttttcctgttaaacacacagacccctccccaatctggacattgaataaatattcattttcctttgcattgttaaaaaaaaaaaaaaaaaaaaaaaa

SEQ ID NO: 4289 - DNA, 1796 bp, Artificial Sequence
  derived and/or modified sequence
gggaaataagagagaaaagaagagtaagaagaaatataagagccaccatgccgcctccacgaacggggagaggattgctgtggctgggactggtattgtcatccgtatgcgtggcccttggatcagaaacccaggccaacagcacgaccgatgccctcaatgtattgttgattatcgtcgatgacctcaggccctcccttgggtgttacggggacaagttggtcagatcgcccaatattgaccaactcgcgtcgcattcgctcttgtttcagaatgcctttgctcagcaggcagtgtgcgccccaagccgggtgtcctttttgaccggacgcaggccagatacaacgcgcctgtatgacttcaattcctactggagggtacatgcgggtaatttctcgacaatcccacagtatttcaaggaaaacggttatgtaacgatgtcagtggggaaggtgtttcaccctggtatctcgagcaaccacaccgacgattcaccctactcgtggtcctttcctccctatcatccctcctcggagaaatacgagaacactaagacttgtagaggccccgatggggagctgcacgctaacttgctgtgccccgtggacgtactggatgtcccagaaggaacattgccggacaaacagtcaacagagcaggcgattcagttgcttgaaaagatgaaaacgtcagcgtcgcctttcttcctcgcggtcggatatcataagcctcacatcccttttcggtatccaaaagagttccagaaattgtacccgctcgaaaacattactcttgcgcccgaccccgaggtgccagacggacttccccctgtagcatacaatccctggatggacatccggcagcgggaggacgtccaggcacttaacatctccgtcccgtatggtccgatcccggtggatttccagcgaaagattagacagagctatttcgccagcgtgtcgtacttggatacccaagtgggtaggctgctttccgccctcgatgatctgcagctcgcaaattcaacaattatcgcgttcacgtcagaccatgggtgggcgctcggagaacatggcgagtgggccaagtattccaacttcgacgtagctacacacgtccctctgattttctacgtgcccggacgcacggcgtcgctccccgaggcaggggagaaactgttcccttacttggacccgttcgactcagcctcacagcttatggaacccgggagacagagcatggatcttgtggagctcgtctcgctctttccgacacttgcgggccttgcggggctccaagtgccaccgcgctgtcccgtgccgtcgtttcacgtcgaactgtgcagagagggtaaaaacttgctgaagcattttcggttccgggatctcgaagaagatccctatctccccggaaatccgcgagagctgatcgcatactcccagtacccacgcccctccgacatccctcaatggaactcggacaagcccagccttaaagacatcaagattatgggctattcgatcaggactattgattacagatacacggtctgggtcggctttaacccggatgaatttctcgctaacttctcagacatccacgctggtgagctgtattttgtggattcagacccgctccaagatcacaatatgtacaacgatagccaaggaggggatctttttcagttgttgatgccgtgataagctgccttctgcggggcttgccttctggccatgcccttcttctctcccttgcacctgtacctcttggtctttgaataaagcctgagtaggaag

SEQ ID NO: 4290 - DNA, 1653 bp, Artificial Sequence
  derived and/or modified sequence
atgcccccccccagaaccggcagaggcctgctgtggctgggcctggtgctgagcagcgtgtgcgtggccctgggcagcgagacccaggccaacagcaccaccgacgccctgaacgtgctgctgatcatcgtggacgacctgagacccagcctgggctgctacggcgacaagctggtgagaagccccaacatcgaccagctggccagccacagcctgctgttccagaacgccttcgcccagcaggccgtgtgcgcccccagcagagtgagcttcctgaccggcagaagacccgacaccaccagactgtacgacttcaacagctactggagagtgcacgccggcaacttcagcaccatcccccagtacttcaaggagaacggctacgtgaccatgagcgtgggcaaggtgttccaccccggcatcagcagcaaccacaccgacgacagcccctacagctggagcttccccccctaccaccccagcagcgagaagtacgagaacaccaagacctgcagaggccccgacggcgagctgcacgccaacctgctgtgccccgtggacgtgctggacgtgcccgagggcaccctgcccgacaagcagagcaccgagcaggccatccagctgctggagaagatgaagaccagcgccagccccttcttcctggccgtgggctaccacaagccccacatccccttcagataccccaaggagttccagaagctgtaccccctggagaacatcaccctggcccccgaccccgaggtgcccgacggcctgccccccgtggcctacaacccctggatggacatcagacagagagaggacgtgcaggccctgaacatcagcgtgccctacggccccatccccgtggacttccagagaaagatcagacagagctacttcgccagcgtgagctacctggacacccaggtgggcagactgctgagcgccctggacgacctgcagctggccaacagcaccatcatcgccttcaccagcgaccacggctgggccctgggcgagcacggcgagtgggccaagtacagcaacttcgacgtggccacccacgtgcccctgatcttctacgtgcccggcagaaccgccagcctgcccgaggccggcgagaagctgttcccctacctggaccccttcgacagcgccagccagctgatggagcccggcagacagagcatggacctggtggagctggtgagcctgttccccaccctggccggcctggccggcctgcaggtgccccccagatgccccgtgcccagcttccacgtggagctgtgcagagagggcaagaacctgctgaagcacttcagattcagagacctggaggaggacccctacctgcccggcaaccccagagagctgatcgcctacagccagtaccccagacccagcgacatcccccagtggaacagcgacaagcccagcctgaaggacatcaagatcatgggctacagcatcagaaccatcgactacagatacaccgtgtgggtgggcttcaaccccgacgagttcctggccaacttcagcgacatccacgccggcgagctgtacttcgtggacagcgaccccctgcaggaccacaacatgtacaacgacagccagggcggcgacctgttccagctgctgatgccctag

SEQ ID NO: 4291 - DNA, 1653 bp, Artificial Sequence
  derived and/or modified sequence
atgcccccacccagaaccggccgcggcttactttggctcggactcgtgctcagtagcgtttgcgtcgcccttggctcggaaacccaggcaaactctactaccgatgctttaaatgttctgctgatcatagttgacgacctccgtccaagccttggttgctatggagacaaactggttcgctctcccaacatcgaccagctcgccagccacagtctgctgttccaaaacgccttcgctcagcaagccgtgtgtgctccctcaagagtctctttcttaacaggacggagaccagatacaacaaggctgtatgactttaactcctattggagagtgcatgcaggtaactttagtactattccacaatacttcaaggagaacgggtacgttactatgtccgtcggcaaggtcttccaccccggcattagttcaaatcataccgatgattctccttatagctggagcttcccaccgtaccacccgtcgagcgaaaagtatgaaaataccaagacctgtcgggggcccgatggggaactgcacgctaatctgttgtgtcctgtggacgtgctggatgtcccagagggcaccctccccgacaaacagtctacagaacaagctattcagttgctcgagaaaatgaagacatctgcctctccttttttcctggcagtaggctaccataagcctcatattcctttccgctatccaaaggaatttcagaaattgtacccactggaaaatatcaccttggctcccgatcctgaggtcccagatggactgccacctgtcgcctataatccttggatggacataagacagcgtgaggacgtacaggccttgaacatcagtgtcccctatggcccgatccctgttgacttccaacgcaagatacggcaatcgtactttgcctccgtctcatacctagacacccaggtaggtagattgcttagtgccctggacgacctccagttggcgaacagcaccatcatcgcgtttacatctgatcacggatgggctttaggcgagcacggtgagtgggcgaagtacagtaactttgacgttgccacccatgtgcctcttatcttctacgtgcctggaaggactgcttctcttcccgaggctggtgaaaaactgttcccttatctggatcctttcgactcagccagccagttaatggagcccggccgtcaaagcatggatcttgtggaactggtgtcattgtttcccactttagcgggactggccggtcttcaggtccctcctaggtgccccgtgcctagttttcatgtcgaactgtgtcgcgagggcaagaaccttctgaaacacttccgttttcgcgacctggaagaggatccttaccttcccgggaacccgagggaactgattgcttatagccagtatccacgcccaagtgacatacctcagtggaactctgacaagccgtccctgaaagacattaagatcatgggctactccatacggaccatagattatagatacacagtgtgggtaggctttaatccggacgagtttcttgccaactttagcgatattcacgcgggggagctctactttgtagattccgatcctcttcaggatcacaacatgtacaacgatagccaaggcggagatttgttccagttgttaatgccctag

SEQ ID NO: 4292 - DNA, 1653 bp, Artificial Sequence
  derived and/or modified sequence
atgcccccacccaggacaggccggggcctgctgtggctgggcctggtgctgagctctgtgtgtgtggccctgggcagcgagacccaggccaacagcaccacagatgccctgaatgtgctgctgatcatcgtggatgacctgcggcccagcctgggctgctacggggacaagctggtgcgcagccccaacatcgaccagctggccagccacagcctgctcttccagaatgcctttgcccagcaggccgtgtgtgcccccagccgggtgtccttcctgactggaagaagaccagacaccacccggctgtatgacttcaacagctactggagggtgcatgctggcaacttcagcaccatcccccagtacttcaaggaaaatggctacgtgaccatgtctgtgggcaaggtgttccaccctggcatcagcagcaaccacacagatgacagcccctacagctggagcttccccccctaccaccccagcagcgagaagtatgagaacaccaagacctgccggggcccagatggagagctgcacgccaacctgctgtgccctgtggatgtgctggatgtgcctgagggcaccctgcctgacaagcagagcacagagcaggccatccagctgctggagaagatgaagaccagcgccagccccttcttcctggccgtgggctaccacaagccccacatccccttccgctaccccaaggagttccagaagctgtaccccctggagaacatcaccctggccccagaccctgaggtgcctgatggcctgccccctgtggcctacaacccctggatggacatccggcagcgggaggatgtgcaggccctgaacatctctgtgccctacggccccatccctgtggacttccagaggaagatccggcagagctactttgcctctgtgtcctacctggacacccaggtgggccgcctgctgagcgccctggatgacctgcagctggccaacagcaccatcatcgccttcaccagtgaccacggctgggccctgggggagcacggggagtgggccaagtacagcaactttgatgtggccacccacgtgcccctcatcttctacgtgcccggccgcacagccagcctgcctgaggccggggagaagctgttcccctacctggacccctttgacagcgccagccagctgatggagcccggccggcagagcatggacctggtggagctggtgtccctcttccccaccctggccggcctggccggcctgcaggtgcccccacgctgccctgtgcccagcttccacgtggagctgtgccgggagggcaagaacctgctgaagcacttccgcttccgggacctggaggaggacccctacctgcccggcaacccccgggagctgattgcctacagccagtacccccggcccagcgacatcccccagtggaacagcgacaagcccagcctgaaggacatcaagatcatgggctacagcatccgcaccatcgactaccgctacacagtgtgggtgggcttcaacccagatgagttcctggccaacttcagtgacatccatgctggggagctgtactttgtggacagcgaccccctgcaggaccacaacatgtacaatgacagccagggcggggacctcttccagctgctgatgccctag

SEQ ID NO: 4293 - DNA, 1653 bp, Artificial Sequence
  derived and/or modified sequence
atgccccccccccggaccggccggggcctgctgtggctgggcctggttctcagcagcgtatgtgtagcattgggctccgagacacaagcaaactccaccacagacgccctgaacgtgctgctgataatcgtggacgatcttcgtccttctctgggatgttacggagataagttagtgaggtcacccaatattgatcagttggcgtctcacagtctgctgttccagaatgcgtttgcccaacaggcagtgtgtgccccttcccgagtctcattcctcacaggaaggcgtcctgacactactcggctgtatgattttaacagttattggcgcgtccacgctggtaatttctctaccataccccagtactttaaggaaaatggctatgtcaccatgtcggtgggaaaagtgttccacccaggcatttccagcaatcacacggatgactctccttactcctggtcctttccgccctatcatccatcctccgagaagtatgaaaatacgaagacctgcagaggcccagatggagagctgcacgccaaccttctctgccccgtagacgtgctagatgtgcctgaaggcaccctgcccgacaaacagagcacagagcaggctattcagctcctggagaagatgaagaccagcgccagcccgtttttcctagccgtcgggtatcacaagccccatataccctttagatatcccaaagaattccaaaaactgtatccgctggagaatattacactagctccggaccccgaggtcccagacgggttaccacccgtagcctacaatccctggatggatatcaggcagcgggaggacgtgcaggcactaaatatcagcgtgccttatggccccattcctgtggacttccaaagaaagattaggcaatcttactttgcttcagtgtcgtacctcgatacgcaggtggggcggctactgagcgcccttgacgacctgcaactggcaaacagcacaatcatcgcatttaccagcgatcacggctgggccctgggggaacatggtgagtgggctaagtacagcaacttcgacgtcgccacccatgtgccccttatcttctacgtgcctggacggacggcgagcctcccggaagccggagagaagctgtttccctacctggatcccttcgactcagcctcacagctaatggagcctggcagacagtctatggacctggtcgaactggtgagtcttttcccaaccttggctggactggctgggctacaggtacctccgcggtgccctgtgcctagcttccacgtcgagttgtgcagagagggaaaaaacctcctcaagcattttagatttagagacttagaagaggatccctacctgccgggtaaccctagagaactcattgcttattctcagtacccccggccttccgatattccccaatggaattctgacaagccctctctcaaagatatcaagatcatggggtattctatcaggactattgattaccgatacaccgtttgggtgggattcaatcctgatgagtttttagctaatttctcagacatccacgctggggagctttactttgtggattctgaccccctgcaggaccataacatgtataatgacagccagggcggagatttgttccagctgttaatgccttag

SEQ ID NO: 4294 - DNA, 1653 bp, Artificial Sequence
  derived and/or modified sequence
atgcctcctcctcggacaggccgaggtctgctgtggctggggctcgttctgagctccgtgtgcgtcgctctgggctctgagacgcaggccaattcaaccactgatgcactcaatgtactcctgatcatcgtggacgatctgcgtccttcacttggctgttatggcgataaactggtccgtagccctaacatcgaccagcttgcttctcactcattattgtttcagaatgccttcgcccagcaggctgtttgtgccccatcaagagtcagttttctcacagggagaaggcccgatacaacacgtttgtacgactttaatagttactggcgcgtacacgcaggcaacttttcaacaattccacagtatttcaaggagaacgggtacgtaaccatgtccgtggggaaagtcttccatcctggcatatcttctaaccacaccgatgattccccatactcctggagcttcccaccttaccacccatcctcagaaaagtatgagaatactaagacctgtcggggacccgatggtgagctgcacgcgaatctgctgtgtcccgtcgacgtgttggatgtgccggaaggcacactgcctgacaagcagtccacagagcaggctatccagcttctggaaaaaatgaagacaagcgccagtccatttttcctggctgtggggtaccacaaaccgcacattcctttccggtaccctaaggagtttcagaagctctaccctctggagaatatcacactggccccagatcctgaagtccctgacggtcttcccccagtggcctacaacccttggatggatattcgccagagagaggatgttcaggcactgaacattagtgtcccctacggacccattccggttgattttcaacgtaagatccgacagagttactttgccagcgtgtcttacctggatactcaggtgggccgtctgctgtccgctctggatgatctgcagttggccaactctaccattatagccttcaccagcgatcacggctgggcactcggtgagcacggagagtgggcgaagtactcgaacttcgacgttgctactcacgttccgcttattttttatgtacctggaagaacagcttcactgccggaagccggtgaaaaactgttcccctacctggacccattcgattcagcatcacagctaatggagccgggtagacagagcatggatctcgtggaactggtgtctctgttcccaacactcgctggattagctgggctacaggtaccccctagatgccccgttccatcttttcacgtcgagttgtgcagagaaggtaagaacttgctgaagcattttaggtttcgcgacctggaagaggacccttacctgcccggtaacccacgggagctgatcgcgtactcacaataccctcggccaagtgacatcccccaatggaacagtgataagccctcactgaaagacattaagatcatgggctactccattagaacaatcgactacagatacacagtgtgggtcggcttcaaccctgatgagtttctcgcgaatttctctgacatccacgcgggtgagttgtacttcgtggattccgatcctctgcaggaccataatatgtacaatgatagccagggaggtgatctcttccaattgctgatgccctag

SEQ ID NO: 4295 - DNA, 7619 bp, Artificial Sequence
  derived and/or modified sequence
gccccggaggggagggacgcagggaagagtcgcacggacgcactcgcgctgcggccagcgcccgggcctgcgggcccgggcggcggctgtgttgcgcagtcttcatgggttcccgacgaggaggtctctgtggctgcggcggcggctgctaactgcgccacctgctgcagcctgtccccgccgctctgaagcggccgcgtcgaagccgaaatgccgccaccccggaccggccgaggccttctctggctgggtctggttctgagctccgtctgcgtcgccctcggatccgaaacgcaggccaactcgaccacagatgctctgaacgttcttctcatcatcgtggatgacctgcgcccctccctgggctgttatggggataagctggtgaggtccccaaatattgaccaactggcatcccacagcctcctcttccagaatgcctttgcgcagcaagcagtgtgcgccccgagccgcgtttctttcctcactggcaggagacctgacaccacccgcctgtacgacttcaactcctactggagggtgcacgctggaaacttctccaccatcccccagtacttcaaggagaatggctatgtgaccatgtcggtgggaaaagtctttcaccctgggatatcttctaaccataccgatgattctccgtatagctggtcttttccaccttatcatccttcctctgagaagtatgaaaacactaagacatgtcgagggccagatggagaactccatgccaacctgctttgccctgtggatgtgctggatgttcccgagggcaccttgcctgacaaacagagcactgagcaagccatacagttgttggaaaagatgaaaacgtcagccagtcctttcttcctggccgttgggtatcataagccacacatccccttcagataccccaaggaatttcagaagttgtatcccttggagaacatcaccctggcccccgatcccgaggtccctgatggcctaccccctgtggcctacaacccctggatggacatcaggcaacgggaagacgtccaagccttaaacatcagtgtgccgtatggtccaattcctgtggactttcagcggaaaatccgccagagctactttgcctctgtgtcatatttggatacacaggtcggccgcctcttgagtgctttggacgatcttcagctggccaacagcaccatcattgcatttacctcggatcatgggtgggctctaggtgaacatggagaatgggccaaatacagcaattttgatgttgctacccatgttcccctgatattctatgttcctggaaggacggcttcacttccggaggcaggcgagaagcttttcccttacctcgacccttttgattccgcctcacagttgatggagccaggcaggcaatccatggaccttgtggaacttgtgtctctttttcccacgctggctggacttgcaggactgcaggttccacctcgctgccccgttccttcatttcacgttgagctgtgcagagaaggcaagaaccttctgaagcattttcgattccgtgacttggaagaggatccgtacctccctggtaatccccgtgaactgattgcctatagccagtatccccggccttcagacatccctcagtggaattctgacaagccgagtttaaaagatataaagatcatgggctattccatacgcaccatagactataggtatactgtgtgggttggcttcaatcctgatgaatttctagctaacttttctgacatccatgcaggggaactgtattttgtggattctgacccattgcaggatcacaatatgtataatgattcccaaggtggagatcttttccagttgttgatgccttgagttttgccaaccatggatggcaaatgtgatgtgctcccttccagctggtgagaggaggagttagagctggtcgttttgtgattacccataatattggaagcagcctgagggctagttaatccaaacatgcatcaacaatttggcctgagaatatgtaacagccaaaccttttcgtttagtctttattaaaatttataattggtaattggaccagttttttttttaatttccctctttttaaaacagttacggcttatttactgaataaatacaaagcaaacaaactcaagttatgtcatacctttggatacgaagaccatacataataaccaaacataacattatacacaaagaatactttcattatttgtggaatttagtgcatttcaaaaagtaatcatatatcaaactaggcaccacactaagttcctgattattttgtttataatttaataatatatcttatgagccctatatattcaaaatattatgttaacatgtaatccatgtttctttttcaaatctaaagttaaaaaaaaatagcagaagccagtgtcttaaagtctatcttttgtttctaagaccatgggatttcataatctcaagataaaatatgtatgaagtaattaatgtagaatttttacaccaaataataaataatgcttaataaactagagatatgagatgtgtaggaaatttggttaaacttttttcagatactttctggcccaaataataatttgttagcaaataatatgacccttgaactcaatggccatctattaaaagactgttgttcacactggaaaacatttaaagatgtgactatatccatgggtggattgaatcactcaaaatatattagtatccttctttagggatggttggttacagacatgtatttattcaggaggcagaaaatattccattttaattgcttattaaagaaaacattaaattctaaattattttgaggactgtgaagacttttcattagtgtaatattaggtcattgtcaatctcccagaatgtagttctatattctctaaatatgaaagtatccagaaaggccagtggtagtaaaaagcttagtgtatataatctcaaaagggatggaatatttacagctcatatttataacatgttgaatcttctcagttatcagtagtcatcagaagtgtcaatagctttctaaataaatattaaatatctactgtcctgtagtgaaggagtaatttttagtaattttctctttacaaagtctccagtgtttccaggtaaatatttgtgaaacaaaatacagcaaactacattgttacttcagtgtattgttgccaaaaatgacaagatattatattaaaatcagtaaattttagacagattttaaaaattaattagcctacaatagaggttatatggtaacacggtgatcttctaagcagttaagtgactgactgttctggcaacaacgacttctccgtgactgaagggccctgttcatttcctgatcctgaagctcgtctctcttttgagcctccgcttgctttggtcgatggtttccctcagctttttctttgctgttcttcatcctcgttgttgctgtcatcatgttcactgtggcttttacaatacagcctgtaaattccttatgacatagttcagtgcatttggctttatcgcctgctccacagttctttacctttacttggcttagagaaactgtatctttgttgcttcatataacctttccccaaccccactaagctggacataacttattagtggtcctcccgtcactttatttgtagaaatctctctttcacatgagcaggggttctttcatgtggtttagctgacagcagaactagtgattctagacattttgcatggccctcattcagtggctcacaaacatgagggagcatcagaactacttgaggggcttgttaaaacccagtgcgttagaagtcggatgcggtggctcacacctgtaatcccagcactttgggaggcccaggcaggcggatcacttgaggttaggagttcaagaccagcctggccaacatggtgaaaccccgtctctactaaaaatacaaaagttagccgggtgtggtggtgcatgcctgtaatcccagcttcttgggaggccaaggcacaagaatcgcttgaaccaggagacggaggtttcagtgaatgaagatcgtgccattgtattccagcctcggcaacacagcaggactgtgattttctttggagactcctagattttctgtggttttgaactgaatttgttggatgttggcaagtgcctcttatgagctgtttctttatcctgcatttgccccacaaagacttatctggaggtgagcaaagtatgtttggtagtgaggtcacaaaggcaatcagccccttcctccccactcccattgccatcttctcagtccttctccctttctttccaagtagtttacccacccctcctctttcctcccctgtccctaaaataatccacgtgtcttcctaaaatctctctttgatcctgtcctttgataacaccgtcagtgcctactactgggtctagacagacctctgttgagcagtcagagtcttccctgactccacaatgcccctttccttggctgaccagtatgactactggtccccacctttcccttgcctatccctacctccctcctactaggttgtcccatccctctcttcacccattcattcatgaccatttttcactaccaagctccccccctcccgaaggaggctgaggtttttgtgactctctagactctattgtgggatggaatgaacattgctaaagaatcttgtgttcgctttactttaaaaaggtatttttttcctaattataaaactgatgtgtcagttacggaaaaattagaaatgcagcacaaatacatgaatattttaccacgaaattgccatataatatcttgtcttttttgggggtgtgaattttttgcattgttctgatcatattctttatcatgtaatttatgttcttttttactaagtattatgtgtggttattatagattttcacaaagatatattgctggtaatatattttattgtgtagtcttataatttacttaaccttctttcaattgttagaaatttaggctatttccagattttcagtattgtaaataatgctgtgatgaccaattttgtgaataaaatgtttttatgtatttcagattattcccttaggatagtctctcagtgccaagttgtcaaaaacatctctattttgcttatcttcctgctctcttgctgccttagggggtagtaaactgaaacataaagtaaacatgcatacaaataaaaaacataaaacaaaaataagcaacctgatggtaataggtgaaagtggtaacctgttttaactttgaattcttgccgggcgcggtggctcacgcctgtaatcccagcactttgggaggctgaggcgggtggatcacgaggtcaggagttcaaaaccagcctggccaagatggtgaaatcccgtctctactaaaaatacaaaaattagccgggcgtggtggcgggcgcctgtaatcccagctacttgggaggctgaggcagagaattgcttgaacccaggaggcggaggttgcagtgagccaagatcgcgccactgcactccagcctgggtgacagagcgagactccgtctcaaataaaaaacaacaaaaaacaaaaaaaacttaaaattctttgcttgttagtgaccttgatcatggttctctttgtacgatagttgggcatctgtatttccacttgtgtgaatttgcctttaaattttggttatgggtttcaccttttaaaataatcaaacatatttatcttttcctgtgtgataggtttttttctgtatcttttcctgttaaacacacagacccctccccaatctggacattgaataaatattcattttcctttgcattgtttggggtttggttttatgcttactgtgtctctccaccccattatcagagtaatatatgctcattgcataaaatctggaacatgtgaaaactggagatgaaaagaagcccagcatttgagacatacccactgctgacatttgtatatttcctttcattcttttacctgcctaaagacatatatgcagatatggacatatttagctttacatacatgcagactaccacatataatctatatcttgtttttttgatctaacacaatgttagcttggttttttatgtcattgacagttcttgattaacagctgtaatggctgcacagccctgcttcattaatttttttttttggactgaaatgtatgtaccacgttccgcttatccattcatccaccagtgaccacttgggtcatttctaccttttggccattgcaataatgttgctgtcaacaaggatgtacaaatatctgttcgagtccctgctcttaattgttttgggtatacacccaacctacattaatctttaatcacttaagatgttggggtttgtgctgggaggtaaccaagtgactctggagcagcctcaccctagctacagagggaaactgactcttccctctctgcccaatcttttgccgcctgtcaggttcccaagctgtccataccttactgtgtgaagcgctttgggtataaactcccaaatagaggctcagccccttttcctttcccaagtccatcctgcaggttatagctcttcagaggaatctcttgaattctggcctgggatctgggattaaagtagaacccagggtgtcccttggggccttaggcatagcccgttgtggtggaacctgccatcagccccactgcactcagtggtcccctggtacttcaggacagtttctctcttctgcacatgagaacttcaagcagagaggactgtcagttgttgccttcacatcaccaatcgtttggccataatggccaagagccctcactgctcttgggtcttgcctttccacatgttactgaaagctcccgttggtgtccctgtccactaactcacctgatgggacagatgccactttcctctgagtgtctgataaaacacagtctgttgtggggagcccacgctcaagggttttctttgggatcagagtttcccggctattactccatgccctgcctgacatcactgtcatgtatggtgctaatcaccaaaggatgcccttgtttgattctggattctaggtgatagtccttatcctctgatgggggaagagtttgggtgggagagaacaaaccgacaagttggttccagatgaggtggctgggagccaaccctcaggtacttggctctgagtaatgtgacggcccaggcaagagggctcccactgccaatgaggaacaaaagctcaaggtctagtagtgtattcagcacatgctaggaaacaagagttgggacgtggacaaggagaggagcaaaggccaggggttaactgcttttggtttttcctctataaaagtcagggactatgatttatatgggtgagaaggtttggagtaggactgaagctgccatttacaaaccccttgccctaatttattgtagttttgggtgtgtttctgaaagaaccttttgcaggtgatttttattcagtactcattaacttacagcttttatgaattcacatcttctacactattgaaaaacataagtttgtattgtgttaagtgcagcatgagttattatatgaataaatcacattaaatttgc

SEQ ID NO: 4296 - DNA, 1653 bp, Artificial Sequence
  derived and/or modified sequence
atgccgcctcctagaaccggtagaggactgttgtggttgggactcgtcttatcctcagtttgcgtcgccctggggtccgaaacacaggccaatagcacgactgacgcactcaacgtcctgctgattattgtagatgatcttcgtccaagcctggggtgctacggtgataagctggtgaggagccctaatatcgatcagctggccagtcattcacttctgttccagaatgcatttgcccagcaagcagtttgcgctccaagtcgcgtgagcttcctgactggtaggcggcccgacactactcgactatatgattttaattcatactggcgcgtacatgcaggtaacttcagcaccatcccacaatatttcaaggagaacggatacgttaccatgtccgtcggtaaggtgttccatcctggaatatcctccaatcacaccgatgattccccgtattcgtggagcttcccaccctatcaccccagctctgaaaaatacgagaacaccaagacttgcagaggcccagacggagagctgcatgctaacctgttgtgtcccgtggacgtgcttgatgtgcctgaaggaacactacctgacaagcaatccacggagcaagctatccagctgttggagaaaatgaaaaccagcgccagccctttcttcctggctgtaggttatcataaaccgcatattccttttcgctatccaaaggaatttcagaaactctatcctctcgagaacatcacattagcaccggaccctgaagtacccgacggcttacctcctgttgcttacaatccctggatggacattcgacagcgcgaagacgtgcaagcgctgaatattagtgtgccctatggacccattcctgtggatttccagcgaaagatccggcagagttattttgcatctgtttcatatttagatacccaagttggccgactgctcagtgctttagacgatctccaacttgccaacagcaccatcatcgcttttaccagcgaccatggctgggcactgggcgagcacggggaatgggctaagtactctaactttgatgttgctacccacgttccccttattttttacgtccccggccggacagcttctcttcctgaagctggtgagaagctgtttccatacctcgacccattcgattctgccagtcagctcatggaacccggcaggcagtctatggatctagtggagctggtgtcattatttcctacactcgccggactggctggtttacaggttcctccccgctgcccagttcctagcttccacgtggagctttgtcgcgagggtaagaacttacttaagcacttccgctttagagaccttgaagaggacccctatctcccaggaaaccctagggagctgatcgcatactcacagtacccgcgcccatcagatattccccaatggaattcagataagccctcgctgaaagatataaagatcatgggttatagtattcgcacgatcgattataggtatactgtgtgggtgggctttaatccagatgagtttctggctaactttagcgatattcatgcgggggagctatatttcgtagactcagatcccctccaggatcacaatatgtacaacgactcccagggaggagacctcttccagctacttatgccatag

SEQ ID NO: 4297 - DNA, 1653 bp, Artificial Sequence
  derived and/or modified sequence
atgcctcctccacgcactggcaggggactgttgtggctgggtctagttctgagttctgtatgcgtagcactcggatcagaaacacaggccaactcaactactgatgcccttaacgtcctgctgattattgtggacgacttgcggcccagcctagggtgttacggagacaaactggtaaggtcacccaatatagatcaattagcatcccactctctcttgttccagaatgcctttgcccaacaagccgtgtgcgccccatccagagtgtcctttttgaccggccgtcgccccgataccacacgactatacgatttcaattcatattggcgcgtacatgccgggaatttcagtaccatcccgcagtacttcaaagagaatggatacgtaacaatgagtgttgggaaggtttttcacccagggatttcaagtaaccacactgatgactccccatatagttggagcttccctccttatcacccatcaagcgaaaagtacgagaacactaaaacatgtcgtggacccgatggtgaactccacgcaaacctcttgtgtccagtggacgtcctagatgtacctgagggaacattacctgacaaacagtcaacagaacaggcaatacagctgcttgaaaagatgaagacaagtgcatcccccttctttctcgccgtaggctatcataagccccacattccgtttcggtacccgaaggaatttcaaaagctgtaccctttagagaacataaccctcgcccccgatcctgaagtaccagatggcctgcctcccgtcgcttataacccatggatggatatccgccagcgcgaagatgtccaagcactcaatattagcgtgccttatggccctatccccgtagatttccaacgcaagatacgtcagtcatatttcgcctctgtgtcctatcttgatacacaggtagggagactactttccgcactagatgacttgcaactcgctaactccaccattatagcctttacaagtgaccacggctgggccctgggagagcatggcgaatgggccaaatactcgaatttcgatgtcgccacacacgtgccattaattttctacgtgccaggacgtactgcctctctccccgaagccggagaaaagctcttcccctacctggacccctttgacagcgcctcgcaactgatggaacccgggcggcaaagtatggatttggtggagctggtgtccttattccccacactcgccggacttgctgggctgcaggtgcccccaagatgccccgttcctagtttccacgtggagctatgcagggaggggaaaaacttactgaaacacttccgatttagggaccttgaggaagacccctacttacccggtaacccaagagagctaatagcatattcacagtatccgcgaccatccgatatcccacaatggaactccgataaaccctctctgaaagacatcaagatcatgggctactcaatccgcacaatcgactataggtacactgtgtgggtgggatttaacccagatgaattcttagcaaacttttctgatattcatgcaggagaattatactttgtcgattccgatcctctccaggaccacaacatgtacaacgatagccagggcggcgatctctttcaattactcatgccgtag

SEQ ID NO: 4298 - RNA, 1796 nt, Artificial Sequence
  derived and/or modified sequence
gggaaauaagagagaaaagaagaguaagaagaaauauaagagccaccaugccgccuccacgaacggggagaggauugcuguggcugggacugguauugucauccguaugcguggcccuuggaucagaaacccaggccaacagcacgaccgaugcccucaauguauuguugauuaucgucgaugaccucaggcccucccuuggguguuacggggacaaguuggucagaucgcccaauauugaccaacucgcgucgcauucgcucuuguuucagaaugccuuugcucagcaggcagugugcgccccaagccggguguccuuuuugaccggacgcaggccagauacaacgcgccuguaugacuucaauuccuacuggaggguacaugcggguaauuucucgacaaucccacaguauuucaaggaaaacgguuauguaacgaugucaguggggaagguguuucacccugguaucucgagcaaccacaccgacgauucacccuacucgugguccuuuccucccuaucaucccuccucggagaaauacgagaacacuaagacuuguagaggccccgauggggagcugcacgcuaacuugcugugccccguggacguacuggaugucccagaaggaacauugccggacaaacagucaacagagcaggcgauucaguugcuugaaaagaugaaaacgucagcgucgccuuucuuccucgcggucggauaucauaagccucacaucccuuuucgguauccaaaagaguuccagaaauuguacccgcucgaaaacauuacucuugcgcccgaccccgaggugccagacggacuucccccuguagcauacaaucccuggauggacauccggcagcgggaggacguccaggcacuuaacaucuccgucccguaugguccgaucccgguggauuuccagcgaaagauuagacagagcuauuucgccagcgugucguacuuggauacccaaguggguaggcugcuuuccgcccucgaugaucugcagcucgcaaauucaacaauuaucgcguucacgucagaccaugggugggcgcucggagaacauggcgagugggccaaguauuccaacuucgacguagcuacacacgucccucugauuuucuacgugcccggacgcacggcgucgcuccccgaggcaggggagaaacuguucccuuacuuggacccguucgacucagccucacagcuuauggaacccgggagacagagcauggaucuuguggagcucgucucgcucuuuccgacacuugcgggccuugcggggcuccaagugccaccgcgcugucccgugccgucguuucacgucgaacugugcagagaggguaaaaacuugcugaagcauuuucgguuccgggaucucgaagaagaucccuaucuccccggaaauccgcgagagcugaucgcauacucccaguacccacgccccuccgacaucccucaauggaacucggacaagcccagccuuaaagacaucaagauuaugggcuauucgaucaggacuauugauuacagauacacggucugggucggcuuuaacccggaugaauuucucgcuaacuucucagacauccacgcuggugagcuguauuuuguggauucagacccgcuccaagaucacaauauguacaacgauagccaaggaggggaucuuuuucaguuguugaugccgugauaagcugccuucugcggggcuugccuucuggccaugcccuucuucucucccuugcaccuguaccucuuggucuuugaauaaagccugaguaggaag

SEQ ID NO: 4299 - RNA, 1653 nt, Artificial Sequence
  derived and/or modified sequence
augccgccuccuagaaccgguagaggacuguugugguugggacucgucuuauccucaguuugcgucgcccugggguccgaaacacaggccaauagcacgacugacgcacucaacguccugcugauuauuguagaugaucuucguccaagccuggggugcuacggugauaagcuggugaggagcccuaauaucgaucagcuggccagucauucacuucuguuccagaaugcauuugcccagcaagcaguuugcgcuccaagucgcgugagcuuccugacugguaggcggcccgacacuacucgacuauaugauuuuaauucauacuggcgcguacaugcagguaacuucagcaccaucccacaauauuucaaggagaacggauacguuaccauguccgucgguaagguguuccauccuggaauauccuccaaucacaccgaugauuccccguauucguggagcuucccacccuaucaccccagcucugaaaaauacgagaacaccaagacuugcagaggcccagacggagagcugcaugcuaaccuguugugucccguggacgugcuugaugugccugaaggaacacuaccugacaagcaauccacggagcaagcuauccagcuguuggagaaaaugaaaaccagcgccagcccuuucuuccuggcuguagguuaucauaaaccgcauauuccuuuucgcuauccaaaggaauuucagaaacucuauccucucgagaacaucacauuagcaccggacccugaaguacccgacggcuuaccuccuguugcuuacaaucccuggauggacauucgacagcgcgaagacgugcaagcgcugaauauuagugugcccuauggacccauuccuguggauuuccagcgaaagauccggcagaguuauuuugcaucuguuucauauuuagauacccaaguuggccgacugcucagugcuuuagacgaucuccaacuugccaacagcaccaucaucgcuuuuaccagcgaccauggcugggcacugggcgagcacggggaaugggcuaaguacucuaacuuugauguugcuacccacguuccccuuauuuuuuacguccccggccggacagcuucucuuccugaagcuggugagaagcuguuuccauaccucgacccauucgauucugccagucagcucauggaacccggcaggcagucuauggaucuaguggagcuggugucauuauuuccuacacucgccggacuggcugguuuacagguuccuccccgcugcccaguuccuagcuuccacguggagcuuugucgcgaggguaagaacuuacuuaagcacuuccgcuuuagagaccuugaagaggaccccuaucucccaggaaacccuagggagcugaucgcauacucacaguacccgcgcccaucagauauuccccaauggaauucagauaagcccucgcugaaagauauaaagaucauggguuauaguauucgcacgaucgauuauagguauacugugugggugggcuuuaauccagaugaguuucuggcuaacuuuagcgauauucaugcgggggagcuauauuucguagacucagauccccuccaggaucacaauauguacaacgacucccagggaggagaccucuuccagcuacuuaugccauag

SEQ ID NO: 4300 - RNA, 1653 nt, Artificial Sequence
  derived and/or modified sequence
augccuccuccacgcacuggcaggggacuguuguggcugggucuaguucugaguucuguaugcguagcacucggaucagaaacacaggccaacucaacuacugaugcccuuaacguccugcugauuauuguggacgacuugcggcccagccuaggguguuacggagacaaacugguaaggucacccaauauagaucaauuagcaucccacucucucuuguuccagaaugccuuugcccaacaagccgugugcgccccauccagaguguccuuuuugaccggccgucgccccgauaccacacgacuauacgauuucaauucauauuggcgcguacaugccgggaauuucaguaccaucccgcaguacuucaaagagaauggauacguaacaaugaguguugggaagguuuuucacccagggauuucaaguaaccacacugaugacuccccauauaguuggagcuucccuccuuaucacccaucaagcgaaaaguacgagaacacuaaaacaugucguggacccgauggugaacuccacgcaaaccucuuguguccaguggacguccuagauguaccugagggaacauuaccugacaaacagucaacagaacaggcaauacagcugcuugaaaagaugaagacaagugcaucccccuucuuucucgccguaggcuaucauaagccccacauuccguuucgguacccgaaggaauuucaaaagcuguacccuuuagagaacauaacccucgcccccgauccugaaguaccagauggccugccucccgucgcuuauaacccauggauggauauccgccagcgcgaagauguccaagcacucaauauuagcgugccuuauggcccuauccccguagauuuccaacgcaagauacgucagucauauuucgccucuguguccuaucuugauacacagguagggagacuacuuuccgcacuagaugacuugcaacucgcuaacuccaccauuauagccuuuacaagugaccacggcugggcccugggagagcauggcgaaugggccaaauacucgaauuucgaugucgccacacacgugccauuaauuuucuacgugccaggacguacugccucucuccccgaagccggagaaaagcucuuccccuaccuggaccccuuugacagcgccucgcaacugauggaacccgggcggcaaaguauggauuugguggagcugguguccuuauuccccacacucgccggacuugcugggcugcaggugcccccaagaugccccguuccuaguuuccacguggagcuaugcagggaggggaaaaacuuacugaaacacuuccgauuuagggaccuugaggaagaccccuacuuacccgguaacccaagagagcuaauagcauauucacaguauccgcgaccauccgauaucccacaauggaacuccgauaaacccucucugaaagacaucaagaucaugggcuacucaauccgcacaaucgacuauagguacacugugugggugggauuuaacccagaugaauucuuagcaaacuuuucugauauucaugcaggagaauuauacuuugucgauuccgauccucuccaggaccacaacauguacaacgauagccagggcggcgaucucuuucaauuacucaugccguag

SEQ ID NO: 4301 - protein, 653 aa, Artificial Sequence
  derived and/or modified sequence
MRPLRPRAALLALLASLLAAPPVAPAEAPHLVHVDAARALWPLRRFWRSTGFCPPLPHSQADQYVLSWDQQLNLAYVGAVPHRGIKQVRTHWLLELVTTRGSTGRGLSYNFTHLDGYLDLLRENQLLPGFELMGSASGHFTDFEDKQQVFEWKDLVSSLARRYIGRYGLAHVSKWNFETWNEPDHHDFDNVSMTMQGFLNYYDACSEGLRAASPALRLGGPGDSFHTPPRSPLSWGLLRHCHDGTNFFTGEAGVRLDYISLHRKGARSSISILEQEKVVAQQIRQLFPKFADTPIYNDEADPLVGWSLPQPWRADVTYAAMVVKVIAQHQNLLLANTTSAFPYALLSNDNAFLSYHPHPFAQRTLTARFQVNNTRPPHVQLLRKPVLTAMGLLALLDEEQLWAEVSQAGTVLDSNHTVGVLASAHRPQGPADAWRAAVLIYASDDTRAHPNRSVAVTLRLRGVPPGPGLVYVTRYLDNGLCSPDGEWRRLGRPVFPTAEQFRRMRAAEDPVAAAPRPLPAGGRLTLRPALRLPSLLLVHVCARPEKPPGQVTRLRALPLTQGQLVLVWSDEHVGSKCLWTYEIQFSQDGKAYTPVSRKPSTFNLFVFSPDTGAVSGSYRVRALDYWARPGPFSDPVPYLEVPVPRGPPSPGNP

SEQ ID NO: 4302 - DNA, 2203 bp, Artificial Sequence
  derived and/or modified sequence
gtcacatggggtgcgcgcccagactccgacccggaggcggaaccggcagtgcagcccgaagccccgcagtccccgagcacgcgtggccatgcgtcccctgcgcccccgcgccgcgctgctggcgctcctggcctcgctcctggccgcgcccccggtggccccggccgaggccccgcacctggtgcatgtggacgcggcccgcgcgctgtggcccctgcggcgcttctggaggagcacaggcttctgccccccgctgccacacagccaggctgaccagtacgtcctcagctgggaccagcagctcaacctcgcctatgtgggcgccgtccctcaccgcggcatcaagcaggtccggacccactggctgctggagcttgtcaccaccagggggtccactggacggggcctgagctacaacttcacccacctggacgggtacctggaccttctcagggagaaccagctcctcccagggtttgagctgatgggcagcgcctcgggccacttcactgactttgaggacaagcagcaggtgtttgagtggaaggacttggtctccagcctggccaggagatacatcggtaggtacggactggcgcatgtttccaagtggaacttcgagacgtggaatgagccagaccaccacgactttgacaacgtctccatgaccatgcaaggcttcctgaactactacgatgcctgctcggagggtctgcgcgccgccagccccgccctgcggctgggaggccccggcgactccttccacaccccaccgcgatccccgctgagctggggcctcctgcgccactgccacgacggtaccaacttcttcactggggaggcgggcgtgcggctggactacatctccctccacaggaagggtgcgcgcagctccatctccatcctggagcaggagaaggtcgtcgcgcagcagatccggcagctcttccccaagttcgcggacacccccatttacaacgacgaggcggacccgctggtgggctggtccctgccacagccgtggagggcggacgtgacctacgcggccatggtggtgaaggtcatcgcgcagcatcagaacctgctactggccaacaccacctccgccttcccctacgcgctcctgagcaacgacaatgccttcctgagctaccacccgcaccccttcgcgcagcgcacgctcaccgcgcgcttccaggtcaacaacacccgcccgccgcacgtgcagctgttgcgcaagccggtgctcacggccatggggctgctggcgctgctggatgaggagcagctctgggccgaagtgtcgcaggccgggaccgtcctggacagcaaccacacggtgggcgtcctggccagcgcccaccgcccccagggcccggccgacgcctggcgcgccgcggtgctgatctacgcgagcgacgacacccgcgcccaccccaaccgcagcgtcgcggtgaccctgcggctgcgcggggtgccccccggcccgggcctggtctacgtcacgcgctacctggacaacgggctctgcagccccgacggcgagtggcggcgcctgggccggcccgtcttccccacggcagagcagttccggcgcatgcgcgcggctgaggacccggtggccgcggcgccccgccccttacccgccggcggccgcctgaccctgcgccccgcgctgcggctgccgtcgcttttgctggtgcacgtgtgtgcgcgccccgagaagccgcccgggcaggtcacgcggctccgcgccctgcccctgacccaagggcagctggttctggtctggtcggatgaacacgtgggctccaagtgcctgtggacatacgagatccagttctctcaggacggtaaggcgtacaccccggtcagcaggaagccatcgaccttcaacctctttgtgttcagcccagacacaggtgctgtctctggctcctaccgagttcgagccctggactactgggcccgaccaggccccttctcggaccctgtgccgtacctggaggtccctgtgccaagagggcccccatccccgggcaatccatgagcctgtgctgagccccagtgggttgcacctccaccggcagtcagcgagctggggctgcactgtgcccatgctgccctcccatcaccccctttgcaatatatttttatattttattattttcttttatatcttggtaaaaaaaaaaaaaaaaaa

SEQ ID NO: 4303 - DNA, 1959 bp, Artificial Sequence
  derived and/or modified sequence
atgaggcccctgcgaccccgcgctgcattgctggccctgctagcctccttgctggccgcgccaccggtcgccccggcggaggcgccccacctggtccatgttgatgctgctcgcgccctttggccactaagacggttctggcggagcacaggcttctgtcctcctctgcctcactcccaggccgatcaatacgtcctgtcatgggatcagcagcttaacttggcctacgtcggcgcggtccctcatcggggtataaaacaggttagaacacattggctgttagagttggtcacaacacgtggttcaactgggcggggtttatcgtataatttcacccacctcgacggctacctcgacctcctgcgggaaaaccaactgttgccgggctttgaactcatggggtccgcaagcggccacttcaccgattttgaagataaacagcaggtgttcgagtggaaagatctcgttagttcccttgcgaggcggtatattgggagatatggactcgcccacgtaagtaaatggaactttgaaacctggaatgaaccggatcatcacgacttcgataatgtttccatgaccatgcagggatttttgaactactacgacgcgtgctcggaaggtttgcgtgccgctagcccggctctgcggttaggcgggcctggcgacagcttccatacccctcctcggagtccactttcttggggacttttgaggcattgccatgacggcacaaacttttttaccggagaggccggcgtacgcttggactatatttctttacacaggaaaggcgcgcggtcatcaataagcatattagaacaggagaaagtggtggcacaacagatccgccagctcttcccgaaattcgcggacacgcccatttataatgacgaggccgacccactcgtgggttggtcacttccgcagccctggagagccgatgtcacgtatgcggcaatggtcgtaaaggtgattgcgcagcaccagaatcttctcttagccaatacaacaagcgcctttccatatgccttactgagcaatgataatgccttcctaagctaccaccctcacccgttcgcccaacgcactttgacggcccggttccaggtgaacaatacccggccgcctcacgtgcaacttctccggaagccagtattgacagcaatgggcctgctggccctgcttgatgaggaacagctgtgggccgaggtaagccaggccgggaccgttctggatagcaaccacaccgtgggtgtgctagcatcagcgcatcggccccaaggccctgccgacgcctggagagccgccgttcttatctacgcatcagatgatacccgagcacaccccaacagatctgtggcagttacccttagactccggggcgtaccgcccggaccaggcctagtatatgtgaccaggtacttggataatgggctgtgttcccccgacggcgaatggcggcgcctaggacgcccggttttccccaccgcggagcagttccgcagaatgcgagctgctgaagacccggtggccgctgcaccaaggcccctcccagcaggaggcaggctcacactccggcctgcgctaagactccccagcctgttgttggtgcatgtgtgcgcaaggcccgagaagcctcccggccaagtgacgcgcctgagggccctacctctcacacagggccagctggtgctcgtgtggagcgacgagcatgtaggaagcaagtgtctgtggacctacgagatccagttctcacaggatgggaaggcgtatactcctgtgtcgagaaagcccagcacctttaacctgtttgtcttctcacccgataccggggccgttagcgggtcctaccgagtccgagcccttgactattgggctaggccagggcctttctcggatccggtgccatacctggaggtccctgtcccaaggggcccaccaagccctggtaatccc

SEQ ID NO: 4304 - DNA, 1959 bp, Artificial Sequence
  derived and/or modified sequence
atgcggcctctccggccccgggccgccctccttgcactccttgcatctctactagcagctccacctgtggcccctgccgaagctccccatctggttcatgtggatgcagcaagagcactctggcccctacggcgcttctggcggtcaactgggttctgtcctccccttcctcactcacaggccgaccagtatgttttgtcatgggatcagcagcttaacctggcctatgtgggagctgttccccacagggggatcaaacaggtaaggactcactggctgctcgaactggtcactacacgggggtctacagggcgcggactgtcttataacttcacacatctcgacgggtatttagacctgctgagagaaaatcagctcctccccgggtttgaactcatgggatccgcttcaggacattttactgactttgaagataaacagcaggtcttcgaatggaaagatctcgtgagttctctcgcccggcggtatattggaaggtatgggttagcccatgtgtcaaaatggaacttcgagacttggaacgagcctgatcatcacgatttcgacaatgtctccatgactatgcaagggttcctgaattattatgatgcttgttctgaaggattaagagccgccagtcccgcccttcgtctcggagggcctggggactcattccacacacccccgcgctctccactatcctggggactgctacggcattgtcacgatgggactaacttcttcacaggagaggcaggagtgcggttggactatatatccctgcatcggaaaggagcccgttcatcaatttctatcctggaacaggaaaaagtcgtggcacagcagatcagacagcttttccccaaatttgctgatactccaatctataatgatgaggcagacccactcgtaggatggtctctccctcaaccctggcgggccgatgtgacgtatgccgctatggtggtgaaagtaatcgctcagcatcagaatcttctgctcgctaatactactagtgccttcccatatgctcttctttctaacgataacgccttcctgtcttatcatcctcatcctttcgcacagaggacactgacagcccggttccaggtcaacaatacaaggccacctcatgttcaattactgcggaaacccgtgctgacagccatgggactcctagccctattagatgaagagcagttatgggccgaagtgtctcaggccgggactgttcttgactctaaccacactgtaggggtgctggcatcagctcataggccacagggaccagctgatgcctggcgagctgccgtcctgatctatgccagtgatgatacaagagcacaccctaatcgatcagtagcagtgacacttaggctgcgcggggtccctcctgggcctgggctcgtctatgtgacacgatacttagataatggactctgctcccccgacggggaatggcgaagattaggacggcccgtctttccaactgctgaacagtttaggaggatgcgggccgccgaagatcccgtcgctgctgcccccaggcccttgcccgccggagggcggctcactctccggcccgccctcagactcccttctctgctcttagtgcatgtatgtgcccgacccgaaaaacccccaggacaggttacgaggctgagggctctgccactcacacaggggcagctcgtgctggtctggtccgatgaacatgttgggtccaaatgcctctggacatatgaaatacaattttctcaggatgggaaagcttacacacccgtctcaagaaaaccctcaactttcaatcttttcgtattcagtccagatacaggagctgtatccggatcatatcgggtgagggctctcgactattgggccaggcccgggcccttctccgatcccgtaccctatttagaagttccagtgccaagagggccccccagtcctgggaatcca

SEQ ID NO: 4305 - DNA, 1959 bp, Artificial Sequence
  derived and/or modified sequence
atgcgcccattgcgcccccgggccgctctcctcgccctcttggcctcactcctcgccgctccacccgtggctccagccgaggccccccacctggttcatgtcgacgccgcccgtgctctgtggcccctgaggcggttttggcgttctaccgggttttgtcctcccttacctcactctcaggctgatcagtacgtactgtcatgggatcagcaactgaacctggcttacgtgggtgcagtgcctcacaggggcatcaagcaagtgcgaacccattggttgttagagcttgtcacaacaagaggaagtaccgggcggggtctgagttacaacttcacccacctcgatggatacctggacttgcttagggagaaccagctgctgcccggatttgagctcatggggagcgcctcagggcatttcacggatttcgaagacaagcagcaggtatttgagtggaaggacctggtttccagtctcgccagaaggtatatcggccgctatggcctcgcccacgtgagtaagtggaattttgagacatggaatgagcccgaccaccatgattttgacaatgttagtatgaccatgcagggatttctcaattactacgatgcctgttccgaaggcctgcgtgctgcaagcccggcactgcggctgggtggacccggggactcttttcacacccccccacgatctcccctatcttggggacttcttcgacactgccatgacggcactaacttcttcaccggcgaggctggcgttcgtctggattacatttcactccacagaaaaggagccagaagcagcatcagcatccttgagcaggagaaggttgtcgctcagcagatcagacagctgttccccaaatttgcagatactccaatatataatgacgaggctgacccacttgtggggtggagcctcccacagccttggcgggccgacgttacctacgcagccatggttgttaaggtgatagcacagcatcaaaatctgctgctcgctaacacaacctctgccttcccttatgcactgctgtcaaatgataacgccttcttgagctaccatccacaccccttcgcgcaacgcacccttaccgccagattccaagtgaacaatacaaggccccctcacgtacagctcctgaggaagcctgtgctcacagccatggggttactagcactgcttgatgaggaacagctctgggcggaggtctcccaagccgggacggttctggactccaaccacaccgtcggggtgttagcctccgcccatcgtccacaaggacccgctgacgcatggcgcgcggccgtcttaatctatgcgagcgatgacacccgtgcacatccaaatagatctgtcgcagtcaccctgcggttacgcggtgtgccaccaggcccaggactggtttatgtcacccgctacctggataatggcctctgttctcccgacggcgaatggcgacgcctcggcagacctgtctttcctaccgcggagcagttcagacggatgcgggcagccgaggacccagtcgccgcagctcccagaccgctgcccgcgggtggacgactgacgttgcgaccggctctgcgactgccctcgctgctgctggtgcatgtatgcgcaaggcctgagaagccccccggccaggttacaagactgcgggcgctgccgctcacccaaggccagcttgtgctggtatggtctgatgagcacgtgggctctaaatgtctctggacttatgagatccagttcagccaggatgggaaagcctatacacccgtgtcccggaagccttcaaccttcaacctgttcgtattttctccagacaccggcgccgtgtcaggcagctacagggtgcgcgccttggactattgggccaggccgggtccctttagtgatccagtgccgtatctggaagtgcctgtacccagaggacccccaagccctgggaaccca

SEQ ID NO: 4306 - DNA, 1959 bp, Artificial Sequence
  derived and/or modified sequence
atgaggcctctgcggcctcgcgccgccctcctcgcactgctggcctcactcttagctgccccaccagtcgcccccgccgaagcaccccacttagtgcatgtcgacgccgcccgggctctgtggcccctcagaagattctggcgcagcaccggcttttgtcctcccctgcctcactcgcaagcagatcagtacgtgctgtcctgggatcaacagctgaacctggcctacgtaggagcagtgccgcaccggggcatcaaacaggtccgcacccactggctgctggaactggtaaccacgcgaggatccacgggtaggggactttcctacaattttacacacctggatgggtacttggatcttttgcgagaaaaccaactgctaccagggttcgaactgatggggagcgccagcggccattttaccgactttgaagataagcagcaagttttcgagtggaaggacctagtttcttccttggcacgaaggtatatcgggagatatggactggcccatgttagcaagtggaatttcgaaacctggaacgaacctgatcaccacgacttcgacaatgtgtctatgactatgcaagggttcctcaactattacgacgcgtgttccgagggtctaagggctgcctccccagctttgaggctgggaggccctggcgatagtttccatactccccctaggtccccgctttcctggggactgttgcgtcattgtcacgacggaacaaatttctttactggggaggcaggagtgagactggattatatttccttgcatagaaagggtgcaagatcctccatatccatcttggagcaggaaaaagtcgtagcccagcagattcggcagctattcccgaaatttgctgacacacctatatacaatgatgaagcagatcctttggtcggatggtctctgccccaaccttggagagccgatgtgacttatgctgcaatggtcgtgaaggtcatagcccagcaccaaaatcttcttctagctaataccacttccgcttttccatacgcgctcctctctaatgataatgcgttcttgagctaccaccctcatccctttgcacagcggacacttaccgcaaggtttcaggtgaataatactcgacctccacacgtgcaactcttgagaaagccagtgttgaccgccatgggcctgctggctctgctcgatgaagaacagctgtgggcggaggtcagccaggcagggactgtcctagactctaatcacactgtgggcgttctggctagcgctcaccggccccagggacccgctgacgcctggcgcgcggctgttttaatatacgcaagcgacgacaccagggctcatcccaatcgctctgtggcagtgaccctccgcctcaggggcgttccgcccggcccagggttggtgtatgtgacccgctacttggataacggcctgtgtagccccgacggagagtggcgacggctgggacgtcccgtgttccctactgccgagcagttccggcgcatgcgggcggccgaagaccccgtcgccgccgcaccacggccactgcctgctgggggccggcttactttgcgcccggccctcagattaccgagtctactcctggtgcatgtctgcgcacggcctgaaaaacccccgggtcaggtgactaggttgcgcgcccttccgctcacccagggccagctcgtcctggtgtggagtgacgagcatgttggctccaaatgcctctggacttacgagatccagttctcccaagatggaaaggcctacacccctgtctcaagaaagccttcgacattcaatttgtttgttttcagcccagacaccggtgccgtcagcgggtcatatcgggtgcgtgcgctcgattattgggccaggccaggtccatttagcgatccagttccgtatcttgaggtcccggtgccccgagggccaccttctcccggtaaccca

SEQ ID NO: 4307 - DNA, 1959 bp, Artificial Sequence
  derived and/or modified sequence
atgcggcccctaaggccacgtgcagccctgttagctctgctcgcaagccttctggctgccccacctgtagcaccagccgaggccccccatctggtgcatgtggatgctgcccgagcactctggcctctgcgtcgattttggcgttctactgggttctgccctccgttgcctcacagtcaggcagaccagtatgtgctgtcgtgggaccaacagctgaacctggcttatgtgggtgccgtcccccatagaggcattaaacaggtgcgcactcactggctgcttgagctcgttactacccggggctcgaccggacgtggcctgagctacaacttcacccaccttgacggttacctcgacttgctgagagagaatcagctgctgccaggctttgagttaatgggcagtgcctctggccattttacagacttcgaggataagcagcaggtcttcgagtggaaggatctcgtctccagtttggctcggagatatatcggacggtatgggttggcccacgtctctaagtggaacttcgaaacttggaacgagccagatcaccacgacttcgacaacgtttcaatgaccatgcaggggttcttaaactattatgatgcttgctcagaaggcttgcgtgccgccagcccggcccttcgcctggggggaccaggagattcattccatacaccgccaagatcacccctctcttggggcttactgaggcactgccacgacggaactaattttttcaccggggaagcgggggttaggctggactacatctccctgcatcgcaaaggagctcgaagcagcatttccatcctcgagcaggagaaagttgttgcacagcagatacgccagttatttcctaagttcgccgatacccccatttataacgatgaggccgaccctcttgtaggctggtcattacctcagccttggcgggccgacgttacttacgccgccatggtggttaaagtgatagcccagcaccagaacctgctcttggcgaacactacttcagcattcccctatgcactcctatccaacgacaacgcttttttgagctaccatccccacccgtttgcacaacgcacactcactgctagatttcaagttaacaacactcgcccaccccatgtccagctgctgcgaaagcctgtactgaccgccatggggctgttggcactcctggacgaggaacaactgtgggctgaagtttcgcaggctgggacggtgttggattctaatcacacagttggtgtgctcgcttctgcgcataggccacaggggcccgccgatgcctggagagccgccgtcctgatctacgccagcgacgacacacgggcccaccccaaccggtccgttgccgtcaccctcagactgagaggcgtcccccctgggccgggactcgtgtatgtgactaggtacctcgataatggtctgtgctcaccggatggagaatggcgacgactggggaggccagtgttcccgacagcagagcagttcagaaggatgcgtgccgcggaagatcctgtagctgcggcccccagacccctgcccgcagggggccggttgaccttgcggcccgcactgcggttgcctagcctgcttctggtccacgtctgcgcaagaccagaaaagccgcctgggcaggttactcggctccgggccctacctctcacgcaggggcagctagtattggtgtggagcgacgagcacgtgggcagtaagtgcctatggacttacgaaatccagttttcccaggacggaaaagcatacactccagtgtcccgcaagccgtctaccttcaacctgtttgtcttctctcccgacacgggggctgtgtccggatcctacagggtgcgagccctggattactgggcaaggcccggtccattctcggatcctgtgccctatctggaagtccctgtgccgcgcggacctcctagcccagggaatcca

SEQ ID NO: 4308 - DNA, 1959 bp, Artificial Sequence
  derived and/or modified sequence
atgcgaccgctccgccctagggcagccctgctggcgctgctcgccagcctgctcgccgctcccccagtggctccggccgaggctccgcacctcgttcacgtggacgccgcgcgggcgctgtggcctctgcgcagattctggagatcgaccggattctgtccaccactgccacattcccaggccgatcagtatgtgctcagctgggaccagcaactgaatctggcctacgtgggggccgtgccacacaggggaattaagcaggtgcggacgcactggctgcttgaacttgtcactacccgggggtcgactggaaggggactctcctacaatttcacccacctcgacggttacctggatctgctgagggaaaaccagctgctgccgggctttgaattgatgggttcggcctcgggccacttcacggatttcgaggataagcaacaagtgttcgaatggaaggacttggtgtcctccctggcaaggcgctacatcggacgttacggtctggctcatgtctccaagtggaattttgagacgtggaatgagccggaccaccatgatttcgataacgtgtcaatgactatgcagggattcctgaactactatgacgcgtgttctgaaggcctgagagcggcttccccggccctcagattgggtggcccgggagattcattccatactccaccccggtcgccgctgtcctgggggctgctccggcattgtcacgatggaaccaatttcttcactggagaggcaggagtgaggctggactatatctcactgcaccgcaagggagcgcggtcatccatctcaatcctggaacaagagaaagtcgttgctcaacaaatccggcaactcttcccgaagttcgccgacaccccgatttacaacgacgaggccgatcctctggtgggttggtcactgccgcagccgtggcgggccgacgtgacttacgcggcgatggtcgtcaaggtcatcgcccaacaccaaaacctcttgctggcaaataccacttccgccttcccgtacgctctcctctcgaacgataacgctttcttgagctaccacccccacccgtttgctcaacggacgctgactgcccggttccaagtcaataacactcggccaccgcatgtccaactcctgcgcaaaccggtcttgactgccatggggctgctcgctctcctggacgaagaacagctctgggcggaagtgtcgcaggcaggaaccgtgctggactcgaaccacactgtgggagtgcttgcctcggctcaccgaccgcagggaccggccgacgcctggcgggcggctgtgctgatttacgcgtccgatgacactcgagctcacccgaaccggtctgtcgccgtcactctgcggctcagaggtgtcccacccgggccgggccttgtgtacgtgacgagatacctcgataacggactgtgctcgccagacggagagtggcgccggcttggacgcccggtgttcccgactgccgaacagttcagacggatgcgcgccgcagaagatcctgtggctgcagccccaagaccactccctgccggaggaagattgactctgcggcctgcactccgcctcccaagcctcctgcttgtccacgtttgcgcacgtccggaaaagccgccggggcaggttacccgccttcgggcgctgccgctgacccagggccagctcgttctggtgtggtccgacgaacacgtgggatccaagtgcctctggacgtacgagatccagttctcgcaagacggtaaagcctacactccggtgtcgagaaaaccatccacttttaaccttttcgtgttttcccccgatactggagccgtgagcggatcctaccgcgtgcgggcccttgactactgggccaggcccggcccattctcggaccctgtcccgtacctggaggtgccggtgccccggggacccccctcgccgggaaacccg

SEQ ID NO: 4309 - DNA, 1959 bp, Artificial Sequence
  derived and/or modified sequence
atgaggccgcttaggcccagggctgccctgcttgccctgctggcctcactcctggctgctcctcctgtggcacctgcagaggctccccacctggtgcatgtggatgctgccagagcactttggccactacggcgattttggagaagtaccggattctgcccccccctgccccatagccaggccgaccagtacgtcctaagctgggaccaacagttgaacctggcctatgtcggggctgtcccacacaggggcatcaaacaagttcgcacccactggctgctggaactggtcacgacacgaggaagcaccggacgcggactttcctacaacttcacgcatctcgacgggtatcttgaccttctgcgcgagaatcagctcctgcccggcttcgagctgatggggagtgcctccgggcattttaccgactttgaagataagcaacaagtttttgagtggaaggacttggtgtcttccctggcgagacggtacattggacggtatgggctagctcatgtgtccaaatggaacttcgagacctggaatgagcctgaccaccacgacttcgacaacgtgtccatgactatgcagggcttcttgaattactacgacgcctgtagtgagggacttagggccgcaagccctgcactccggctcggagggccgggcgactctttccacacccccccaagatctcccctgtcttggggtctactgaggcactgccacgacggcactaacttttttactggagaggctggagtgcgactagactatatctcacttcaccgtaagggcgctaggtcttctatctcaatcttggaacaggaaaaagtggtcgctcagcagattcggcagctgtttcctaaattcgccgacacccccatttacaatgatgaagctgatccactagtaggctggtctctcccccagccatggcgtgcggatgtcacctacgccgctatggtcgtgaaggttattgcccagcaccagaacctgctccttgcaaacactaccagtgcgtttccctatgccctgctgtcaaacgacaacgccttcctgagctatcatccccatccttttgcgcaaagaactttgactgctcggtttcaggttaataacacacgacctccgcatgttcagctgttgcggaagcctgtcctgacagcaatggggctgctagccttgctggacgaggaacagctttgggcagaggtgagccaggcaggaaccgtgctggacagtaaccatactgtaggggtgctggcaagcgcgcaccgtccacagggcccagctgacgcttggcgggctgcagtactaatctacgccagtgatgacacacgggcacatccaaatcggagcgtagccgtgacattaaggctgcggggggtgccacccggccccgggctcgtctatgtgactcggtatcttgacaacggcttgtgttcccccgacggggagtggcggagactcggccgaccagtgttcccaaccgccgagcagtttagaaggatgcgggcagctgaggacccagttgccgctgcacctagaccactcccagctggcggcagacttacgttgcggcctgctctcagactgccttctctattgctggtccacgtctgtgctcgacccgagaagccccccggccaagtgacccgcctccgggctttgcctttgactcaaggccagctcgtcttggtgtggagcgatgaacacgtgggttctaagtgtctttggacttacgaaatacagttttcccaggatggcaaggcctacacccccgttagtagaaaaccctccactttcaatctctttgtttttagccctgacacaggggccgttagcgggtcctatcgggtgcgcgcactcgattattgggcgaggcccgggcctttttcagatcccgtgccctatctcgaggtgccggtgcctcgcggaccaccaagtccaggcaaccct

SEQ ID NO: 4310 - DNA, 1959 bp, Artificial Sequence
  derived and/or modified sequence
atgaggccgcttagaccgagagcagcactgctcgcactgcttgcatcactgcttgccgcacctccagtagcgcccgcagaggcccctcatctcgtacacgtggatgccgcacgcgccctgtggcccctgcggagattctggcgatcgaccggcttttgtcctcctcttccccattcgcaggcggaccaatacgtgctttcctgggatcaacagctcaacctggcttacgtgggagctgtgccccaccggggaatcaagcaagtgagaacgcattggcttcttgaattggtcactacccggggttcaaccggtagagggttgagctataacttcactcatcttgatggctacctggacctgcttagagaaaaccaactgctgcccgggtttgaacttatgggtagcgcatccggacattttaccgattttgaggacaagcaacaggtgttcgagtggaaagatctcgtgtctagcctggcaagaagatacattggtcgctacggtctggcccatgtgtccaagtggaactttgaaacctggaacgaacctgatcaccacgatttcgacaacgtcagcatgaccatgcaaggattcttgaactactacgatgcatgttccgaaggtctgagagccgcatccccagcccttagacttggaggcccaggtgattcctttcataccccacctcgaagcccgctttcctggggtttgttgagacactgccatgatggtaccaacttctttaccggagaggctggggtgcggcttgattacatctccctgcatagaaagggagctagatcctccatttcaattcttgaacaagaaaaggtggtcgcccaacaaattagacagctgtttccaaagtttgcggataccccaatttacaatgatgaggccgaccctctggtgggttggtcgctgccccagccctggcgggccgacgtgacctacgcagcaatggtcgtcaaggtcatcgcgcaacatcaaaatctgcttcttgcaaacactacttccgcattcccttacgcactgctctcaaatgacaatgcatttctttcgtatcatcctcatccatttgcccagcgcactctgaccgcgcggtttcaagtgaacaatacccgtcccccacatgtgcagctgctgcgtaagcctgtgcttaccgcgatgggacttctcgcacttctcgacgaagaacagctgtgggcggaagtctcgcaagcaggaaccgtcctcgattcgaaccataccgtgggcgtcctggccagcgcacaccgccctcaaggtcctgcggatgcctggagggcggcagtgctcatttacgcatcagacgatactcgggcacaccctaataggtccgtggccgtgactcttcggctgcgaggcgtccccccgggaccggggctggtgtacgtgacgcgttacctcgataacggactttgcagcccggacggtgaatggagacgattgggtagacccgtgtttccgactgctgagcagtttagaagaatgcgggcggcagaagatcctgtggcagcagcccctaggccgctgcctgcagggggcagacttacgctcagaccagcgcttagactgccatcgcttcttcttgtgcatgtctgtgcaaggcccgaaaagcccccgggccaagtgaccaggcttagggcacttcccctgacccaaggccaactggtgctcgtctggtcagacgaacacgttggatccaagtgtctgtggacttatgagattcagttttcacaggatgggaaagcatacacgcccgtgtcgaggaagcccagcactttcaacctttttgtgttctctccagacaccggcgcagtctcaggttcgtaccgggtgcgcgcacttgactattgggcgcgccccggaccgttttccgatcccgtgccatacctggaggtcccagtgcctcgcggcccaccgtctcctggtaatcct

SEQ ID NO: 4311 - DNA, 1959 bp, Artificial Sequence
  derived and/or modified sequence
atgcggcctcttcgaccccgcgcagctcttctggctcttctggcgtctttgctagcagcccctcctgttgctccagctgaagccccccacctggttcacgtggacgctgcaagggcgctgtggcccctccgacggttctggcggagtaccggtttctgccccccactaccgcactcacaggctgaccagtacgttctttcctgggatcagcagttgaacctagcatatgtgggcgccgtgccacaccggggcatcaaacaggtgaggacacattggctgctcgagctggttaccacccgaggttccaccggaaggggcctctcctataatttcacacatctggacgggtacctcgacctcctacgagaaaaccagctcctacccggatttgagctcatgggaagcgcaagtggccatttcactgacttcgaggacaagcagcaggtgttcgaatggaaagaccttgtctcaagtctggcacggcgatacatcgggcgatatggcctcgctcatgttagcaaatggaacttcgaaacctggaacgagcctgaccaccacgatttcgataatgtcagcatgactatgcaggggttccttaattactatgacgcttgctccgaggggctgcgggcagcatctcctgccctgaggcttggcggtccaggagattcattccatacgccccctcgctctcccctgtcatggggtctgctgaggcactgtcacgacggaacaaatttcttcaccggcgaagctggcgtgcggttagattacatttccctccatcgcaaaggcgctcgcagcagtatctcaatacttgaacaggagaaagtagtcgctcagcagatcagacagctctttcctaagtttgctgacacacctatctataatgacgaagccgacccactggtgggatggtccctgccacaaccgtggagagcagatgtcacatatgccgctatggtggtcaaggttatcgcccagcatcagaacctgctcctagcaaacacaacctcagcctttccgtacgcactgctgtcaaatgataacgcatttctttcataccaccctcaccccttcgcacagaggaccctaaccgcccgatttcaggtgaacaatacaaggcctccacacgtgcaactgctgcgtaaacctgtactcactgcaatgggactgctggctctattggatgaggaacagctctgggctgaagtttcccaagccggaaccgtgctcgactccaatcatactgtaggcgtgttagcatcagcgcacagaccccagggaccagccgacgcctggagagctgcagttctcatttacgcatcagatgacaccagagcccaccctaataggtctgtggcagtaaccctaaggctacgcggagtgccaccgggccctggattggtgtacgtgactagatacctggataacggcctgtgcagccccgatggggagtggcggcgcttaggacggcctgtgtttccgaccgcagagcaattccggaggatgagagcagctgaggaccctgtcgcagccgcaccgcggcccttgccagccggcggaaggcttacgctgagacccgccttgcgtctcccttcgctgctgctggtgcacgtgtgcgccaggcccgagaagccgccgggacaggtcacacgtcttcgggctcttccgttgacgcagggacagttagtgttggtgtggagtgatgaacacgttgggtctaagtgtttgtggacttatgagatacagttcagtcaggacggaaaggcctatacccctgtttcaaggaagccgtcgacatttaacctgtttgtgttttctcccgatacgggtgctgtgtctggttcttaccgggtccgagctctggattattgggcgaggcccggtccgttcagcgaccccgttccttacctcgaggtccctgtcccgcgcggccctccgtcgccaggcaatcct

SEQ ID NO: 4312 - DNA, 1959 bp, Artificial Sequence
  derived and/or modified sequence
atgcgccctctgcggcctagggcggcgcttctggcactgctggcatcactcctggcggcgcccccggtggctccggccgaagccccacatctcgtgcacgttgacgctgcccgggccctctggccgctccgcaggttctggagatctaccggcttctgcccgcccctgcctcattcccaagcggaccagtacgtgctgagctgggatcaacaattgaacctggcctacgtgggagcggtgccccatcggggcatcaagcaggtccggactcactggttgctggagctggtcactacccggggttcaacgggacgcggactgtcctacaactttacccacctcgatggctacctggatctgctgcgagaaaaccagttgctgccggggtttgaactgatgggatccgcttcgggacacttcaccgatttcgaggacaaacaacaagtattcgagtggaaggatctggtatcctccctcgcacgccgctacatcgggcggtatggacttgcgcacgtgtcaaagtggaatttcgagacttggaatgaaccagaccatcacgacttcgacaacgtgagcatgaccatgcaggggtttctgaactactacgatgcttgctcggaaggattgcgcgctgcctcgccggccctgagacttggtggacccggcgactccttccatactcccccgcgatcgccactgtcgtggggattgctgcgccactgtcatgacggcactaactttttcaccggggaagccggggtgcggctcgattacatctcactgcaccggaagggcgcgaggtctagcatctccatcctggagcaagaaaaggtggtggctcaacaaatccggcagcttttcccgaagtttgccgataccccgatctacaacgatgaggcggaccccctggtggggtggtcgttgccacagccttggcgcgccgacgtgacctacgccgcgatggtcgtcaaggtgatcgcccaacatcagaacctgctcctggcgaacaccacgtctgccttcccctacgccctgctgtcaaacgacaacgccttcttgtcataccatccacatccattcgcacaacgcaccctgactgcccggttccaagtgaataacacgcggccgcctcacgtgcagctcctgaggaaaccagtcttgaccgctatgggacttcttgcactcctggatgaagagcagctgtgggccgaggtgtcccaggccggaactgttctcgactcgaatcacactgtgggagtcctcgcatcagcccaccggccgcaggggcctgccgacgcgtggcgcgcggcggtgttgatctatgcttcagatgacacccgggcgcacccaaacaggtccgtggccgtcaccctgcgcctgagaggtgtgccgccaggcccaggtttggtgtacgtgacgagatacctggacaacggattgtgcagcccagacggcgagtggcgccgcttgggaaggccagtgttccctactgcggaacagtttcgccgaatgcgcgcggctgaagatcctgttgccgcggctccgcgcccgctcccggccggaggaaggctgactctgaggcctgcgcttcgactgccgtcgctgctgctcgtccatgtgtgcgcacgtccggaaaaaccgccgggccaagtgactagactgagagccctccccctcacgcaggggcaactggtgctcgtgtggtcggacgagcatgtgggatcaaaatgtctgtggacttacgagatccagttttcccaggatggtaaagcctacacccctgtcagcagaaagccctcgacctttaacttgttcgtgttcagccctgacacgggagccgtgtcgggatcataccgcgtgagggccttggattactgggctcggccgggacctttctccgacccggtgccgtacctcgaggtgcctgtgccgaggggccctccgtcgcccgggaatcca

SEQ ID NO: 4313 - DNA, 1959 bp, Artificial Sequence
  derived and/or modified sequence
atgcggcctctccggcctagggcggccttgttggctctcctcgcttcgctgctggccgctccgcctgtcgccccggccgaagcaccgcatctcgtccatgtggacgccgctagggccttgtggccactgcggaggttttggcggtctactgggttttgtcctcctctgccccactcccaagccgatcagtacgtcctgtcgtgggatcagcaactgaacttggcgtatgtgggcgcggtgccacatagaggcatcaagcaggtgaggacccactggctgcttgagttggtgactacgagaggctccaccggaagagggctctcgtacaacttcacccatctcgatggatacttggatctcctccgggagaatcagcttctgccaggtttcgagctgatgggctccgcctcgggacactttactgatttcgaggacaagcagcaagttttcgaatggaaggatctggtatcatcactggcacgccggtacatcggtcgctacgggttggctcatgtttcaaagtggaattttgaaacctggaacgagccggaccatcacgatttcgacaatgtgtcgatgacgatgcaaggcttcctgaattactacgacgcatgcagcgaaggtctgcgggcggcctcgccagccttgcgccttggagggcctggagactcgttccacaccccacccagatcgccgctttcatggggattgctgcgccattgccacgacgggaccaactttttcactggcgaagctggggtcagacttgactacatttccctgcacagaaagggagcccgctcctcgatctccatcctggaacaagaaaaggtggtcgcccaacagattcgccagctcttccctaagttcgcagataccccaatctacaatgatgaagcggaccctctggtggggtggtcactcccacaaccgtggcgcgccgacgtgacctacgcagcgatggtggtgaaggtgatagcacaacaccagaatctgttgttggcgaacactacttctgcgtttccttacgccctcctttccaatgacaacgcgttcctgagctaccacccgcacccattcgcccaaaggacgctcacggcgcggtttcaggtgaacaacacgcgccctccacacgtgcagctcctgaggaaaccggtgctcaccgcaatgggattgctggcgctgctggatgaggagcagctgtgggccgaagtttcacaggcgggtaccgttctggactcgaaccatactgtgggagtgttggcctccgctcaccggccgcaaggccccgccgatgcatggcgcgcagctgtgctcatctatgcctcggacgatacccgcgcacacccgaatcggagcgttgcggtgaccctcaggctccggggagtccccccgggacccggcctggtatacgtcactcggtacctggacaacggactctgcagcccggacggcgagtggcggcggctgggacgcccagtgttccccactgctgaacagttcaggcggatgcgcgctgctgaggacccggtcgcggccgcacccaggccactgccggccgggggccgcctcactctcaggccggcactgcggctgcccagtttgctcttggtccatgtatgtgcacggcctgaaaagccacccggacaggtgacgagactgagagctctccctctgactcagggacagctggtgctggtgtggtcggacgaacatgtgggatcgaagtgcctgtggacctacgagatccaattctcgcaggacgggaaagcctacacccccgtctcgcggaagccatcaactttcaacctgttcgtctttagcccggacaccggagccgtgtccggttcctatagagtgagagcgctggattactgggcgcgcccgggaccgttctccgaccctgtgccataccttgaagtccccgtgcctcgcgggccaccgagcccggggaacccg

SEQ ID NO: 4314 - DNA, 1959 bp, Artificial Sequence
  derived and/or modified sequence
atgaggccccttcggcctagagccgccctgctcgccctgctggcctccctcctggccgcgccaccagtcgcccctgcagaggcgccgcatctggtccatgtcgatgcggccagagcactgtggccgttgcgccgcttctggaggtcaactggattctgcccgcccctgccacacagccaggccgaccagtacgtgcttagctgggaccagcagttgaacctggcgtacgtgggggcggtgccgcacagagggatcaagcaagtgcgcacccactggttgcttgaactggtgactacccggggatccaccggaaggggactgtcctataacttcacgcacctggacggttacctggatctgctgagagagaatcagctgctgccggggtttgaactgatgggatcagcatcgggacattttacggatttcgaagataaacaacaagtattcgagtggaaggacctggtgagctccctggcccgtcggtacatcggccgatacggcctcgcgcacgtgtccaaatggaacttcgaaacctggaatgaacctgaccatcacgacttcgacaacgtcagcatgaccatgcagggcttcttgaattactacgatgcctgctcggagggtctgcgcgcggcatcgccggcattgcggctcggcggccctggagactcgttccatactccgccacggagcccacttagctggggactcctgagacactgccacgacggcaccaacttcttcactggagaagcgggcgtcagactggactatatctcactgcaccgcaagggcgctcggtcatccatctccattctggaacaagagaaagtcgtggcgcagcaaatcagacagttgtttcctaagttcgcggacacccccatctataacgacgaggctgatccgctggtcggctggtcgctgccgcagccgtggcgggctgacgtcacgtacgcggccatggtcgtgaaggtgatcgcgcagcaccagaatcttctgctggcgaacaccacgtcggctttcccttacgccctcctgtccaacgacaacgcattcctgtcgtaccatcctcaccctttcgcccagcgcaccttgactgctcggttccaagttaacaacacccgcccgccgcatgttcagttgctccgcaagcctgtgctcaccgccatggggcttctggctctccttgatgaagagcagctgtgggctgaggtgtcccaggccggaaccgtgctcgacagtaatcatactgtcggggtgctcgcgagcgctcatcgtccccaaggacccgccgacgcgtggcgggccgcagtgctgatctacgcgtcggatgacacccgcgctcacccgaaccggtccgtggcagttaccctgcgcctccgcggtgtgcccccgggaccaggactggtgtacgtcactaggtacctggacaacggactttgctcaccggacggcgagtggcggcgccttggtcgcccggtgttccccaccgcagaacagttccgcagaatgcgggcagcagaagatccggtcgcagccgctccgcgaccgctgccggctggaggaaggctgactctgcgcccggcactccgcttgccttccctgctgctcgtgcatgtgtgcgcgcggccggagaaacccccgggacaagtgaccagactgagagcactgccgcttacccaaggacagctcgtgttggtgtggtccgatgaacatgtgggaagcaagtgtttgtggacctacgaaatccagttttcacaagacgggaaggcatacaccccagtcagcagaaagccttcgacttttaacctgttcgtgttctcgcctgataccggcgctgtgtcaggatcctacagagtgcgggctctggattactgggccaggccgggcccattctcggatccggtgccatacctcgaagtgcccgtcccgcggggaccgccgtcaccgggtaatccg

SEQ ID NO: 4315 - DNA, 1959 bp, Artificial Sequence
  derived and/or modified sequence
atgcgcccactgagacccagggctgcattgctggctctgctggccagcctcctggctgcaccacccgtggctcccgctgaggcaccacacttagttcacgtggatgcagccagggctctgtggccactgcgcaggttttggagatctacaggcttctgccctcctctgcctcattcccaggccgaccagtacgtcttatcttgggaccagcagctgaacctcgcttacgtgggcgctgtccctcaccgcgggatcaaacaagtgaggactcactggcttctggaacttgtgactacaagagggtccaccggacgtggtcttagctacaatttcactcatctcgacggatacctggacctactgcgagagaatcagctgctgccaggctttgaactgatgggcagcgctagcgggcacttcacagactttgaggacaaacagcaggtcttcgagtggaaagacctagtcagttccctggccagacgctacatcggccgctatggcttagcccatgtgagcaagtggaacttcgaaacttggaatgagcctgaccaccatgacttcgacaatgtgtcaatgacaatgcaaggattcctgaactattacgacgcctgcagcgaaggactgagagcagccagcccagcacttaggttaggggggcccggggattccttccatactccccctcgctcacctctcagctgggggctgctcaggcattgtcatgatggcaccaacttctttactggcgaggccggcgtgagactggactacatttctctgcataggaaaggggctcgcagcagcatctccattctcgagcaagaaaaggtggtggctcagcagatccgacagttatttccaaagttcgccgacacccctatctataatgatgaggcagatccattagtgggttggagcttgcctcagccctggcgagccgacgtgacctatgccgccatggtggttaaggttatcgcccagcaccagaatctactactagctaatactacctcagcttttccctacgctctgctctcaaacgacaacgcctttctaagttaccacccacacccttttgctcagagaacattgaccgcccgcttccaggtgaacaacactcgccctcctcacgtgcagttactacgcaagcctgtcctcaccgctatgggtctactggctctgctcgacgaggagcaactgtgggcagaagtgagccaggctggcacagtgctagacagcaaccacactgttggtgtgctcgctagcgcccatagaccacaggggcctgccgatgcctggagagctgccgtcctgatttatgcaagcgatgatacccgtgctcatcccaataggagtgtggccgtgaccctgcgactccgcggcgtgcctcctgggcccggactggtgtacgtgaccagatatctggataatggcctatgctctccagatggggagtggcgaagactgggcagaccagtgtttccaaccgccgaacagttccggcggatgcgcgcagccgaagacccagttgccgctgcccctagaccactgccagctggcggcagactaaccctgaggcctgctttaagactgccatccctgctcttagttcacgtgtgtgctcggcccgagaagcctccagggcaggttacccggctgagggcactacctctcacccaaggccagctcgttttagtatggagtgatgagcacgtgggttccaagtgcctatggacatatgaaattcagttctcccaagacgggaaggcctataccccggttagccgtaagccaagcactttcaacctgtttgtgttttctcctgatactggcgccgtatccggctcttacagagttcgggccctggactactgggcccgaccaggccccttcagcgaccctgtgccctatctggaggttccagtgcccaggggccctccttcccctggcaatcca

SEQ ID NO: 4316 - DNA, 1959 bp, Artificial Sequence
  derived and/or modified sequence
atgagaccgctgcgcccacgagctgccctcctggctcttttggccagtctgctggcagcaccccctgtggcccccgccgaggccccccacttggtacacgttgacgcagcccgagcgctctggccacttagaaggttttggcgtagtaccggcttctgtcctcctctgccccatagccaggccgatcagtacgtactgagctgggaccagcagttgaatctggcctatgtgggcgctgttcctcacagggggatcaaacaggtgaggacccattggcttcttgaacttgtgacaactcgaggctctaccggaaggggcctgtcctacaatttcacacatctcgacggctatctggatctcctacgagaaaaccaactcttgcctgggttcgagctgatgggttcagccagcggacactttactgactttgaggacaagcagcaagtgttcgaatggaaagatctagtgtccagccttgcgcggcgttacattgggagatacggcttggcacacgtgtctaagtggaattttgaaacgtggaatgagcctgaccaccacgacttcgataatgtgtctatgaccatgcaagggttccttaactattatgacgcctgttccgagggcctcagggctgccagcccagcactgaggctaggcggaccaggggactctttccatacccctccaagatctccactgtcctgggggcttctgcggcactgtcacgacggaacaaacttctttactggtgaagccggagtgcgactcgattacattagcctacacaggaagggcgcccgaagctccatcagtatcctagagcaggagaaggtcgtcgcacaacagataaggcagctcttccccaaattcgccgacaccccaatatataatgacgaagcggatcctctggtgggatggtcccttcctcaaccctggagggcagatgtaacttatgccgccatggtggtcaaggtgatcgcccaacaccagaatctgcttctggcaaacaccactagtgcctttccatatgctttgctttcaaacgataatgcattcctgtcgtatcatccccaccctttcgcacagcgtacactgactgccagattccaggtgaacaatacccgacctccacacgtgcagctgctcagaaaaccagtcttgactgccatgggccttttagccctgttggacgaggagcagctctgggcagaggtctctcaggctggaaccgtactcgactctaaccacactgtgggagtacttgcgtccgctcacagaccccagggccctgcggacgcatggcgggctgcagtgctaatatacgccagtgacgatacaagagcacatccgaaccggtcagttgcggtgaccttgcggttgagaggcgtacccccaggaccgggattggtttacgtcacccggtacctggataatgggttgtgttcacctgatggggaatggcggcgcctggggcgtcccgtgttcccgactgctgagcagtttcggcgcatgagggccgctgaggacccagtggctgccgcaccccgtccgcttcccgcggggggaaggctgaccctcaggcctgcccttaggcttccctcactcttactcgtgcacgtgtgtgcgcgccctgagaagcctcctggccaagtgacacgtctgcgagcattgcccctcactcaagggcagttggttctcgtctggtcagatgaacatgtgggttcgaaatgtctgtggacctatgaaatacagttctctcaggacggcaaggcatacactcctgtcagtcggaagccctccactttcaatctcttcgtattctcccccgatacgggagcagtgagcggctcatacagggtgcgtgcactggattactgggcccgtccggggccattttctgatcctgtcccatacttggaagtgccggttccccggggccccccttctccagggaacccc

SEQ ID NO: 4317 - DNA, 1959 bp, Artificial Sequence
  derived and/or modified sequence
atgagacctctgcgtcctagggccgctcttctggcactactggcctcactgctggccgctccgccagtcgcgccagctgaggccccgcatctcgtgcacgtggacgccgccagagcactgtggccacttaggcgattttggcggtccaccggattctgccctccactcccccactctcaggctgatcaatacgtactgtcgtgggaccagcagttaaatctcgcatatgtcggagctgtgcctcatagggggattaagcaggtgcgaacccattggctgctcgaactggtcactacccgtggctccactgggagaggtctgagctacaatttcactcacttggatgggtatctggaccttttacgagagaaccaactgctgcctggatttgagcttatgggctcagcctcaggccatttcacggactttgaggacaaacagcaggtgtttgagtggaaagatctggtgtctagcctggctcgacgatacatagggcgatacggcctggcccacgtcagcaagtggaactttgagacatggaatgagccagatcaccatgattttgataatgttagcatgactatgcaaggattcctgaactattacgacgcctgctcagaggggctgcgggccgccagccctgctctgagactgggagggccaggtgattccttccacaccccaccacgttctcctctctcttggggcctgctgagacattgccacgacggcacaaatttctttactggcgaggctggggtgagacttgactacatttcccttcataggaagggcgcccgaagtagcatcagcatccttgagcaagaaaaggttgtggcacagcaaattcgacagctattcccgaaatttgccgatacacctatatataatgatgaggcagatccactggttggatggtctctacctcagccatggagggctgacgtgacatatgcggccatggtggtgaaggtgatcgcacagcatcaaaaccttttgttggctaatacgacgtctgccttcccatacgcactgcttagtaacgacaatgccttcctatcgtatcacccccacccattcgcccagaggactctaaccgcacgatttcaggttaacaatacgcgcccgccccatgtgcaactgctccgaaagcctgttttgacagccatgggattactggcgctgctagatgaagaacagctgtgggcggaggtgtcacaggctggaaccgtgctggactccaatcataccgtgggtgtattggcctcagcacataggccacaaggccccgcagacgcatggagagctgccgtgctgatttatgcatcagatgatacccgagcacaccctaacagatccgtggctgttacgctgcgccttagaggagtgccccccggcccaggactagtctatgtaactagatatctagacaatgggttgtgtagtcccgacggcgagtggagacgtctgggacgtcctgtgttccctacagcagagcagttcaggagaatgcgtgcggctgaagatcccgtggcggccgctcctagacccctgccagcaggcggccgactgactctgcgaccagccttgaggttgccgtctctccttctggtacacgtgtgcgctaggccagagaagccccctggacaggttactagattgagggccctgcctctgacacagggccagctggtgctggtgtggtcggacgagcacgttggctcaaagtgcctgtggacctatgaaatccagttctcacaggacggcaaagcctacactcccgtgtcaagaaagccatccacatttaatttattcgttttttcacccgacactggggccgtctccggatcctacagagtgcgagctctcgactactgggcacgacctggtcctttctcagatccagtaccctacctggaggtccctgtacctcgtgggccaccctcccccgggaatccc

SEQ ID NO: 4318 - DNA, 1959 bp, Artificial Sequence
  derived and/or modified sequence
atgcgacctttgcgccctcgggcagccctccttgctctgctcgcgtcgctgctggcggccccaccagtcgcgccggccgaggcaccacacctggtgcatgtggacgccgcccgggccctgtggccactccgcagattttggagaagcactggattctgcccacctctcccgcactcccaggccgaccagtacgtgttgtcctgggaccaacagctgaatctcgcctacgtgggtgcagtcccccaccgcggtatcaagcaggtgcggacccattggttgctcgagctcgtgaccaccaggggcagcactggccgcggactgtcctacaatttcactcacctcgatggttacctggacctccttcgcgaaaatcaactgctgccgggcttcgagctgatgggatctgcatcaggacacttcactgatttcgaggataagcaacaagttttcgaatggaaggacctcgtctcgtccctcgcaagaagatacatcggccggtacggactggcgcacgtctccaagtggaacttcgaaacctggaacgaaccggatcaccatgatttcgataacgtttcaatgactatgcaaggatttctgaactattacgatgcctgtagcgagggcttgagagccgcatcccccgcgctgaggcttggaggaccaggagactcgttccatacccctcctcgctcgccactctcgtggggactgctgcggcactgtcatgacggcaccaatttctttacgggggaagccggtgtgaggctcgactacatcagcctgcaccggaagggggcgcgttcctccatcagcattctcgaacaagaaaaagtggtggcccagcaaattcgccagctgttcccgaagttcgcggacacccctatctataatgacgaggccgatccgttggtcggatggtcgctcccgcagccgtggcgcgctgacgtcacttacgccgcgatggtggttaaggtgatcgctcagcaccagaacttgctgttggctaataccacctccgccttcccatacgcgctcctgtcaaacgataacgcattcctgtcctaccacccgcacccattcgcgcagagaaccctcaccgcgagattccaggtcaacaacacccggcccccgcatgtacagctgctgcgcaagcctgtgctgactgctatgggtcttttggccctgctggacgaagaacagctgtgggccgaggtgagccaggcaggaacggtgctggactcaaaccacactgtgggagtcctcgcttcagcgcatcggccgcaaggaccggccgacgcctggcgggcagccgtgctgatctacgcttcagacgatactagagcgcatcccaaccggtcggtcgccgtgactctgcggctcaggggcgtgcccccgggaccggggctggtctacgtgacccgctacctggacaacggtctttgctcgcccgacggggagtggcgaaggttgggacgccctgtctttccaactgcagaacaattccgccgtatgcgcgctgctgaagatccggtcgcagccgcgccgcggccactgcctgctggagggcgcctgactctgaggccggcgctgcgcctgccttcactgcttctcgtgcatgtgtgcgctcggccggaaaaaccgccaggccaggtgacccggcttcgcgccctgccactgacccagggccagctggtgctggtgtggagcgatgagcacgtggggagcaaatgcctttggacgtacgaaatccaattttcgcaggacggaaaggcatacacgcccgtgagccgcaaaccatccacttttaacctcttcgtgttctctcctgacaccggagcagtgagtggatcatacagggtcagagccctcgactactgggccagacctggaccgttttcggatccggtgccgtatctcgaggtgcccgtcccgcggggcccgccgtcgccgggcaatcca

SEQ ID NO: 4319 - DNA, 1959 bp, Artificial Sequence
  derived and/or modified sequence
atgcggcccctgagaccccgagccgcactgttagccctgttagctagccttttagcagctcccccagtcgctcctgctgaggctccacatctggtgcatgtggatgctgcacgggcactgtggcctttgcggaggttctggcgtagtaccggcttttgcccccccctgccccactcacaagcagatcaatacgtgcttagttgggaccagcagctgaacttagcatacgtcggggctgtgccacaccggggaataaagcaggtcaggacccattggcttctggagttggtgaccacacgcgggagcacaggacgtggcctctcttacaattttacacatttagatggctacttagacctgttgagagaaaaccaattgcttcccgggttcgagctgatgggctccgcaagcggacacttcacagattttgaggataaacagcaagtgttcgagtggaaagacctggtctcatctttggctcggcgatacatcggtagatatggccttgcacacgtcagcaaatggaacttcgagacctggaacgagcccgatcatcacgacttcgataacgtcagcatgacaatgcagggttttctgaattactacgacgcttgttctgaaggtcttagagctgcttctcctgcattgcggcttggcggcccgggggacagcttccacacaccaccaaggagcccacttagctggggtctgttgagacactgccatgatgggacgaactttttcactggcgaggccggcgtcagactggattacatctcactgcacagaaagggcgcacgctcatccatttcgattctggaacaggaaaaagtggtggcccagcaaattaggcagcttttccccaaattcgctgacacaccaatatataacgacgaggctgacccactggtgggatggagcctgccacaaccctggagggcagatgtgacgtacgctgctatggtcgtaaaagtcatcgcacagcatcagaatttgctccttgctaacactacatccgcctttccttacgcactcctgagcaacgataacgcattcctctcttaccaccctcacccttttgctcagagaacactgactgcgcgctttcaggtgaacaatacaagacctccacacgtccaacttttgaggaagccagtgctgactgccatgggactgcttgctttgttagacgaagagcagttgtgggctgaggtctcacaggctggtaccgttctcgacagcaaccacactgtgggcgtgctggcatccgctcatcgccctcaggggccagcggacgcctggcgcgctgcagtgctcatttatgccagcgacgatacaagggcgcaccccaaccggagcgtggctgtgacccttagactgaggggcgtacctcctggccccgggctcgtttacgtcacccgatatcttgacaatggcttgtgcagtcctgatggcgagtggagacgactggggagacctgtgtttcctacagcagaacaatttaggaggatgcgtgccgccgaggacccggtggcggcggcgccccgccctctgcctgccggaggccgcctcacactcagaccagcgctgcggctgccgtcgttgttgctggtgcatgtctgcgctcgccccgagaaaccaccaggacaggtcactcgacttcgcgctctccctctgactcaaggacaactggtgctggtctggtcagacgagcatgttggatcaaagtgtctttggacctacgagatccaatttagccaggatggcaaagcatacacacccgtatcaagaaagccctctacattcaacctgtttgtattttcacctgatactggagccgttagtggatcctaccgcgtaagggcattggactattgggctagacccggacctttttcagaccccgtcccgtacctcgaggtgcctgttcctcgtggtcctccaagccccggcaaccca

SEQ ID NO: 4320 - DNA, 1959 bp, Artificial Sequence
  derived and/or modified sequence
atgcgtcccctccggccgagagcggccctgctggcccttctcgcgtcgctcctggccgctccaccggtcgcgccggccgaggcgcctcatctggtccacgtcgacgccgcgcgcgcactgtggccgctgcggcgcttttggcggtcaactggtttttgcccgccgctgccgcactcccaggccgaccagtacgtgctttcctgggaccagcagttgaatttggcttacgtgggagctgtgccgcataggggaatcaagcaggtccggacccactggctgcttgagctggtcactaccagaggctcaaccgggcgcggcctctcgtacaacttcacgcacctcgatggatacctcgacctcctgagggaaaaccagttgctgccaggattcgaactgatgggatcagcgtccggacacttcactgatttcgaggacaagcaacaagtgtttgagtggaaggacctcgtctcaagcctggctcgccggtacatcggccgctacggactggctcatgtgagcaaatggaatttcgaaacctggaatgaacccgaccatcatgacttcgacaacgtgtcgatgactatgcagggcttcctgaattactacgacgcttgctcagaaggattgcgtgcagcctctccggctctgcgcctgggtggaccgggagattcgttccacacccctccccgctcccctctgtcttggggactgctgcgccattgccatgatggaaccaatttcttcaccggcgaggcaggagtgcgcctggattacatctccctccacagaaaaggagcacggtcctccatctcgatcttggagcaggaaaaggtcgtggcacagcagatcaggcaactgttccctaagttcgcggatacccctatatacaacgacgaggccgaccccctcgtggggtggagcctgccgcagccgtggcgggctgacgtgacctacgccgcaatggttgtcaaagtgattgcgcagcaccagaacctgctcctcgcgaacaccacgtccgcattcccatacgctcttctctcgaatgacaacgcgttcctgtcctatcatccccacccgttcgctcaacgcactctgactgcccggtttcaggtcaacaacactcgaccgccccacgttcagctgctccgcaagcctgtgctgaccgctatgggactcctcgcactgttggatgaagaacaactgtgggccgaggtgagccaagcgggcaccgtgctcgactcgaatcacaccgtgggagtgctggcctcggcccatagaccacagggcccggccgatgcttggcgcgccgcggtgctcatatacgcctctgatgatactagggctcaccctaacagatccgtggccgtcactctgcgcctgcggggagtcccgccagggcccgggcttgtctacgtaacccgctatctcgacaacggcctgtgtagcccggacggggagtggcgccggctcggacggccggtctttcctactgccgaacagttccgtaggatgagggcagcagaagatccagtggccgcagcgccgcgcccattgcctgcgggaggccggctcactcttcggcctgccctgcgtctgccatccctgttgctggttcacgtctgtgcccgacctgaaaagccacctggtcaagtgaccagactcagggccctgccactcactcaaggtcaacttgtacttgtgtggtcggatgagcacgtgggatcaaagtgcttgtggacttacgaaatccaattctctcaagacggtaaagcctatacgccggtgtcccgcaagccatccaccttcaacctcttcgtgttttcacccgacacgggggccgtgtcaggaagctacagagtgagggcgttggattactgggcaagaccaggtccattttcagacccagtgccgtacctggaagtgccggtcccgcgggggcctccgtctccaggtaacccg

SEQ ID NO: 4321 - DNA, 1959 bp, Artificial Sequence
  derived and/or modified sequence
atgcggccgctccgtcctcgggctgctctgctggcacttcttgcctcattgcttgccgcaccgccggtggcgccagctgaggcaccacatttggtgcacgtggatgcagcacgagccctgtggccactccggcggttttggcgctcgaccggattctgtcctccacttccccattcgcaagccgaccaatacgtcttgtcctgggatcagcagctgaacctggcctacgtgggagccgtgccacacaggggcatcaagcaagtgcgcactcattggcttcttgagctggtgactactcgggggtccacgggacgcgggctgtcctacaactttacccacctggacgggtatctggatctgctgagagaaaatcaactgctgcctggatttgagctgatgggatcagctagcggacacttcactgactttgaagataaacagcaagttttcgaatggaaggatctcgtctcctcactcgcccggcgttacattggaagatacgggcttgcacatgtgtccaaatggaattttgaaacttggaacgaaccggaccatcacgactttgataatgtgagcatgaccatgcagggcttcctgaattactatgatgcctgctcagaaggcctgcgcgccgcatcacctgcacttaggcttggcggtccgggagacagctttcataccccacctagatcccctctcagctggggccttcttaggcattgtcacgacggaaccaacttcttcactggagaagcaggtgtgcgtcttgattacatttcgcttcatcgcaagggcgcaagatcctcaatttctatactggagcaggagaaggtggttgcacagcaaatccggcaacttttcccaaaattcgcggacactccaatctacaacgacgaggcagatcctctcgtcggttggtcgctgccccagccttggcgtgccgacgtcacctacgcggcgatggtggtcaaagtgatagcacaacaccagaatcttctgctggcaaacaccactagcgctttcccatacgccctcctgtccaacgataatgcattcctgtcttaccatcctcatccttttgcacagagaaccctgactgcaagatttcaagtgaacaacacccgcccacctcacgtgcagcttctgagaaagcccgttctgaccgcaatgggcctccttgcgctccttgacgaagaacagctctgggcagaagtttcacaagcagggaccgtccttgattcgaaccatactgtgggcgtcctcgcatcggcgcatagacctcagggtcccgccgatgcctggcgagccgcagtgctgatttacgcatcggatgacacgcgcgcccatccgaatcgctcggtggccgtgactcttcggctcaggggagtcccacctggaccaggactggtgtacgtcaccagataccttgacaacggcctttgcagccctgatggggaatggagacgcttggggcgacctgtgtttcccaccgccgaacagtttcgtcgtatgcgtgctgcagaggatccggtcgcagctgcacccagaccgctgccagctggaggacgactgaccctcagaccggcgcttagattgccttcgctgttgctggtgcatgtctgtgcaagaccagaaaagccaccaggtcaagtcacccggcttagggctcttcctcttacccaaggacaactggttctggtctggtccgatgaacatgtcggctccaagtgtctgtggacttatgagatccagttttcacaagatggaaaggcatacacgcctgtctcgaggaagccgtcgacttttaacctgtttgttttttcgcctgatactggggcggtgtcaggatcgtaccgcgtgcgcgctctggattactgggcaagaccaggtccgtttagcgatccagtgccctatctggaggtgccggtgcccaggggtccgccttctcctggtaatcct

SEQ ID NO: 4322 - DNA, 1959 bp, Artificial Sequence
  derived and/or modified sequence
atgcggccactcagaccacgggctgctctcttggcccttctcgcctcgctgttggccgccccaccggtggcacctgcggaagcaccgcatctcgtacacgtggacgccgctcgagccctctggccacttcgaaggttctggcgctcgactggattctgcccgccactgccgcacagccaagccgatcagtacgtgctgagctgggatcaacagctgaatctggcttacgttggtgccgtgccccaccgtggaatcaagcaggtgcgcacgcactggctcctggagctcgtgaccactcgcggatcaactggtcgaggactgtcgtacaactttacccatttggacggctacctcgatctgttgagagaaaatcaacttctcccgggttttgagcttatgggctccgcgagcggacatttcacggatttcgaggacaaacagcaagtgtttgaatggaaagatctcgtcagctctctcgccagaaggtatatcgggaggtacggactcgcgcacgtgtctaaatggaacttcgaaacttggaacgaacctgatcaccacgactttgacaatgtgtcgatgaccatgcaaggattcctcaactactatgatgcctgcagcgaagggctgagagccgcgtcaccggctctcagactggggggtcctggtgactcgtttcacactcctccgaggagcccactgtcgtggggcctgctccggcattgtcacgatggtaccaatttcttcaccggtgaggcaggagtccgccttgactacatctcattgcaccgaaagggtgcacgttcctctatcagcatcctcgagcaggagaaggtcgtggcgcagcagatcagacaactgttcccgaagttcgccgacactcctatctacaatgacgaagccgaccctttggtggggtggtcgttgccgcagccatggcgcgctgacgtcacttacgcagcgatggtggtgaaggtgatcgcgcaacaccagaatctgcttctcgccaacactaccagcgcctttccatacgcccttctgagcaacgataacgctttcttgtcttaccacccgcatcctttcgcgcaaagaactctgactgcccggttccaggtgaacaacacccggccgccgcatgtgcagctcctgcggaagcctgtgctgaccgcaatgggactgctggcccttctggacgaagagcaactttgggcggaagtctcacaggctggaactgttctcgatagcaaccacacggtgggggttctggcatccgcacatcggcctcagggtccggctgacgcgtggcgcgccgctgtgctgatttacgcctcggatgacacccgggcacaccctaaccggtcagtggcagtcaccctgcggctgcgaggagtccctccgggcccaggactggtttacgtgacccggtacttggacaatggcctttgctcaccagacggtgaatggcggaggcttggtaggccagtgttcccaaccgccgagcaattccggcgcatgcgcgccgcagaggaccctgtggccgcggccccgcgcccgctgccggcgggaggaaggctgaccctcagacctgcactgagactcccgtcactgctgctggtgcatgtgtgcgcccgccccgagaagccgccaggacaggtcactcgccttagggctctgcccctgacccaaggccagctggtcctcgtgtggagcgatgagcatgtgggctccaaatgtctctggacttatgaaattcagttctcgcaggatgggaaggcgtacactccggtgtcccggaagcctagcacgttcaacctctttgtgttttcccccgacaccggtgcggtgtcagggtcgtaccgggtacgggccctcgactactgggcgcgcccgggaccattctcggatccggtgccttatctggaagtgcccgtgccgcgcggcccgccgtccccaggtaatccc

SEQ ID NO: 4323 - DNA, 1959 bp, Artificial Sequence
  derived and/or modified sequence
atgcgaccgcttcgcccaagggctgcccttcttgccctcctagctagtttgctcgcggccccaccagttgctccagcagaagcaccacatttggttcatgtcgatgctgcccgtgcgttgtggcctcttagaagattctggcgttcaaccggattctgcccaccacttccgcacagtcaggctgatcaatacgtgctcagctgggaccaacagcttaatcttgcatacgtgggagcagttccacatcgtggaattaagcaagttcgaacccattggcttctggaactggtcaccactagaggttccacaggtcgaggattatcttataactttactcacttagatggatacttggatttattgcgagagaatcaactcctgccaggattcgagctgatggggtcagctagcggacattttaccgactttgaggacaagcaacaagttttcgagtggaaggatctcgtctccagtctagcccgtagatatatcggtaggtatggacttgcgcacgttagcaaatggaattttgaaacctggaacgagccagatcatcatgatttcgataacgtttccatgacaatgcagggtttcttgaattattatgacgcgtgctcggaaggactgcgagcggcctccccagccctcagactcggcgggccaggggattccttccacactccgccacggtcaccgctctcatgggggctgcttcgtcattgccacgatggaacgaacttcttcacaggggaggcgggagtaaggctcgattacatctcactccatcgtaagggagctcgctcaagtatttcgatactggagcaagaaaaggttgtagcacaacaaattcgacaacttttcccaaaattcgccgatactccaatatataatgatgaagctgacccattggtcggctggagtttgccacaaccctggcgtgcagatgtaacatatgccgctatggttgtaaaggtaattgcacaacaccaaaatttgttactagctaatacgacgtctgccttcccatatgcacttctttcgaatgacaacgcttttctgtcgtatcacccgcatccatttgctcaacgtacactcaccgccagattccaagtaaacaacacccgccccccacacgtccagctactacggaaacctgtactcacagctatgggactacttgctcttcttgatgaagaacagctttgggccgaggtctcacaagcgggaacagtcttggattcgaaccacactgttggtgttttagcctccgctcatagaccacaagggccggcagacgcatggagagcggctgttctcatttacgcaagcgacgataccagagcgcatccgaatcgttcagtcgctgtaacactgcgtttgcgaggagtacctccgggtcccggacttgtttacgtcacacgatacttggataatggtctgtgcagtccggacggagagtggcggcgactgggaagaccagtcttcccaaccgctgaacaatttcgtcggatgcgagctgccgaagacccggtcgcggccgcacctagaccccttcctgctggcggacgacttaccctacgacctgctttgcgactgccatctcttttacttgtccacgtatgtgctcgtccggaaaaaccaccgggccaagtaactagactgcgcgcattaccactaacacagggacaattggttctcgtgtggtcggatgaacacgttggatctaaatgtctgtggacgtacgaaatccagttctcacaagacggaaaagcatacacaccagtttcgcgaaagcccagcactttcaatctcttcgtttttagtccagataccggagcagtctcaggaagctatcgcgttagggcccttgattattgggcgaggccaggaccattctccgatccagttccttatttggaggtcccagttcctcgaggaccgccaagtcctgggaatcct

SEQ ID NO: 4324 - DNA, 1959 bp, Artificial Sequence
  derived and/or modified sequence
atgaggccactcaggccaagagcagcgcttctcgccctgctggcatccttattggctgctcctcccgtggcccccgccgaggcgccccatcttgtgcatgtggacgcggcccgcgcactgtggcccctgaggcgcttctggagatctaccggcttctgccctcccctgccccactcgcaagctgaccagtatgtgctcagttgggaccagcaactgaacttggcatacgtgggagccgtccctcacaggggcataaagcaggtaagaacacactggctgttagagctggtgaccacacggggaagcaccggtcgtgggttaagctacaattttacgcacctcgatggctacttggatttgctgagggaaaatcagctcctgccaggctttgagctgatgggcagcgcctctggacacttcaccgacttcgaggataagcagcaggtctttgagtggaaagatttggtgtcaagccttgcacgccgctatattgggcggtacgggttagcacatgtgtcaaaatggaactttgagacctggaacgagccggatcatcacgacttcgataatgtgtccatgacaatgcagggatttctgaattactacgatgcatgcagtgaaggactgcgagccgccagcccggctctcaggttgggcggcccaggcgactccttccacacacctccaagaagccctctgagctggggcctgctgcggcactgccacgacggcacaaacttctttaccggagaggccggcgttaggttagattacatatcacttcacaggaaaggcgctcggtcatcaattagcatcctggagcaggaaaaagtcgtcgcccagcagattagacagctgtttcctaagttcgctgatacacccatctataatgatgaggcagatccactcgtcggatggtcactcccacagccctggagagccgacgtgacgtatgcagcgatggtggttaaagttattgcacaacaccagaacctcctgttggcaaacactacctccgcatttccatatgctttgctgtccaacgataacgcatttctgagctaccatccccatccatttgctcagagaacactcactgccagatttcaggtgaacaatacccgacctccacacgtacaacttctcagaaagccagtcctcacagccatggggctgctcgcgctgttagatgaggagcagttatgggcagaggtgtctcaggcagggactgtccttgattctaaccacacagtaggtgtcctggcctctgcacacagacctcagggccctgccgacgcgtggagagctgccgtgctaatttacgcttctgacgatacccgtgcgcatccgaatcgtagcgtcgccgtgaccctccggctcagaggggtgccccccggccctggcctggtgtatgtgactcgatatctggacaacggactgtgcagcccggatggtgaatggcggaggttgggcaggccagtgtttcctacagccgagcaatttcggcgaatgagagctgccgaagaccccgtagccgccgcgccaaggccgctgccagcaggaggcagactcacactgcgacctgcgctacgattaccctctctcctcctcgtacacgtgtgcgcacgcccggagaagcctcccggacaggtgaccagattgcgtgcactccctctgacacagggacagctggtactcgtctggtccgatgagcacgtgggctccaaatgtttgtggacctacgaaatccagtttagccaagacggtaaagcctacacacccgtgtccagaaagccctctacctttaatctgtttgtctttagtccagacacaggcgccgtgtcgggttcatatagagttcgcgccctggactactgggcccgaccagggcctttctctgaccctgtgccctatctggaggtccccgtccctcggggccccccgagcccgggcaatccc

SEQ ID NO: 4325 - DNA, 1959 bp, Artificial Sequence
  derived and/or modified sequence
atgcgcccgctccggccaagagcagcccttctcgcattgcttgcatcgcttctggccgcaccaccggtggctcctgcagaggcacctcatctggtccatgtggatgcggcaagggccctgtggcctctgcgccgattctggagatccactggcttctgtccccctctgcctcatagccaggcggaccagtacgtgctttcgtgggatcaacagcttaacctggcctacgtcggggctgtgccgcaccggggcattaagcaggtgagaacccattggctgcttgaactggtgacgacgcgcggctccactggaagaggcctgtcgtacaactttacgcatcttgacggctacctggacctgctgcgggaaaaccagctgctgcccgggtttgaactgatgggcagcgcatccggacactttactgactttgaggacaaacaacaagtgtttgaatggaaagacctggtgtcctccctcgctcgacgatacatcggcagatacggactggctcatgtgtcgaaatggaactttgagacttggaatgaaccggaccaccatgactttgataatgtatcgatgaccatgcaggggtttctgaactactacgacgcctgctcagaaggtcttagagcagcaagccctgcactcaggctgggaggtcctggtgattcattccacactccgcctagatctcctctgagctgggggctgctccgacactgccatgacggaaccaactttttcaccggcgaagcaggggtcagacttgattacattagcctgcaccggaagggtgctcgcagctcaatttcgatcctcgagcaggagaaggtcgttgcacaacagatccgtcagctcttccctaagttcgcggatacgcctatttacaacgacgaagccgatccgcttgttggatggtcactcccccaaccctggcgcgccgacgtgacttacgcagccatggtggtgaaggtaattgcacaacaccagaatctgctgctcgccaataccacctcagcatttccttacgccctcctgtcgaacgataatgcattcctgtcctaccatccccacccttttgcacaacgaaccttgactgcccggttccaggtcaacaacaccagaccaccgcacgtgcaacttcttcggaagcccgtcctcactgcaatgggtttgctggcccttcttgatgaagaacagctgtgggcagaggtgtcccaagccgggacggtgcttgacagcaaccacaccgtgggtgtcctcgcatcagcacaccgcccccagggtccagctgatgcctggagggcagccgtgctcatttatgcctcagatgacactagggcacatcctaataggtcggtcgccgtcactctgaggctcaggggtgtgcctcctggtcctggactcgtgtacgtgacgcgctacttggacaacggactttgtagccccgatggcgaatggagaaggcttggacgcccagtgtttcctaccgccgagcaatttcgacgcatgagggcggccgaagatccagtcgcagcggcacctcgaccactccccgcggggggcagactgactctgcgtccagcccttaggcttccttcgcttttgttggtgcatgtctgtgcgaggcccgagaagcctcccggccaagtgacccgacttcgtgccctgcctctcacccagggtcagctcgtcctggtgtggtccgatgaacatgtgggatccaaatgtctctggacctacgagattcagttctcccaagatgggaaggcttacactccggtgtcgagaaagccctccacctttaatctcttcgtgttctcaccagatacgggtgcagtctcgggttcgtacagagtcagggcgctggattactgggcccgtcctggaccattttcagacccagtgccgtacttggaggtgccggtgcctcggggtcctccctcacctggaaaccct

SEQ ID NO: 4326 - DNA, 1959 bp, Artificial Sequence
  derived and/or modified sequence
atgcgtccactgagaccgagagccgcactgttagcacttcttgcctctttactggccgcgcctccagtagctcccgccgaggccccccacctagtccatgtagacgccgcccgcgcactgtggcctttgaggcgcttctggagatctaccggtttctgtccgccgcttcctcatagccaagcagaccagtacgtgctgtcctgggatcaacagttgaacctcgcttatgttggcgcggtcccccataggggaatcaaacaggtgcgaactcactggctgctggagctggtaactacgagggggtcgactgggagaggcctgtcctacaatttcacccacctggatggatatctcgacctgttgcgcgagaaccagttgctgcccgggttcgaacttatgggatccgcatcgggtcactttacggacttcgaagataagcaacaggtctttgaatggaaagacctggtgtccagcctcgcccgcagatacatcgggcggtatggactcgcacacgttagcaaatggaatttcgagacttggaatgagcccgaccatcacgacttcgacaatgtgtctatgaccatgcaggggtttctgaattactatgatgcttgctctgagggtctgagagcggcctcccccgcgctgcgtttgggcggccccggagattcattccacactcctcctaggtcacccctgtcttgggggctgctgaggcactgtcatgatggcactaatttcttcacaggtgaagccggagtccggttggactacatcagcctgcatcgcaagggcgcgcggtcaagtatttctatcctcgagcaggagaaagtggttgcccagcaaattcgtcagctgttcccaaaattcgcagacacccctatctataacgatgaggcggacccgctggtcgggtggtccctgccccaaccatggcgcgccgatgtgacatatgccgccatggtggtgaaagtcatcgcccagcaccaaaacctcctattggccaacacaacatccgccttcccctacgccctgctgtctaacgacaatgctttcctcagctatcaccctcacccttttgctcagcgcacactgacggcgcgatttcaggtaaacaatacacgaccgccacatgtgcaactgctgcggaagcctgtgttgaccgcgatgggcctgctggccttgctcgacgaggaacagctgtgggcagaagtctcccaggctgggaccgtgctggactctaaccacactgtgggtgtcttggcaagcgcccatcgccctcagggccccgcagacgcatggagggcagctgtcctgatctatgcctccgacgacacacgtgcccatcctaatcgctctgtggcagtgactctcaggctgaggggcgtgcctcccggcccaggtctggtgtatgtcacgcgctacttggataatggactctgcagcccagatggcgagtggagaaggctcggacggcccgttttcccaaccgccgaacagttcaggcgtatgagagctgccgaggaccccgttgccgccgcccccagacctctgccagccggcggacggcttacgctgagacccgcactccgactcccgtccctccttctggttcacgtctgcgccagacccgaaaaaccccccggccaggtaacacgcctcagggcactgccacttactcaggggcaactggtgctggtgtggtctgatgagcacgtggggagtaaatgtctgtggacctatgagattcagttctctcaggatgggaaggcgtacacccctgttagtcgaaagccctccacattcaatctgttcgtctttagccctgacactggagctgtgagcgggtcctatcgggttcgcgccttagactactgggcacgcccaggtcccttttccgaccccgtgccctacctggaggtgcctgtacctcggggcccccctagccctggcaaccct

SEQ ID NO: 4327 - DNA, 1959 bp, Artificial Sequence
  derived and/or modified sequence
atgagaccgttgcggccacgtgctgccttacttgctctgcttgcttctctgctggccgctcctccggttgccccagctgaggctccacaccttgtgcatgttgatgctgctcgtgccctgtggccacttagacgtttctggaggtcaaccggattctgcccaccacttcctcattcccaggcagatcagtacgtcttgagttgggaccaacagctgaacctcgcttatgttggtgcagtgcctcatcgcgggataaaacaagttagaacccattggcttcttgagctggtgacaactcgtggaagtactggcagaggccttagctataatttcactcaccttgatggctacctcgatctccttcgtgagaaccaactgttgcctggatttgaactgatgggttccgctagtggtcactttactgatttcgaagataagcagcaagttttcgagtggaaggatcttgtctcttcacttgctaggaggtacatcggacgctatggtctcgcacatgttagcaaatggaattttgagacttggaacgaacctgatcatcacgatttcgataacgtctcaatgacaatgcaaggattccttaattattacgatgcctgttctgagggattgagggcagcgagccctgctctgcgtttgggggggcctggtgatagttttcatactcctccccgatcccccctgtcatggggattgttaagacattgtcatgatggtacaaactttttcactggtgaggcgggcgtcagattagactacatctctctacacaggaagggtgcaagatcgtctatcagcattctagagcaagagaaggtagtggcccaacaaatccgtcaactttttccaaagtttgccgatacccctatttataacgatgaggccgatcctttggtcggatggtcgcttccacaaccctggcgagcagatgttacgtacgcagctatggtagtaaaggtgatagcccaacatcaaaaccttttgttggccaatacgactagcgctttcccatatgccttgctctcaaatgataacgcttttctctcttatcatccgcatccattcgctcaaaggacccttacagcccgattccaggtaaacaatactcgaccaccccatgtccaattgctacgcaagcctgttttgactgccatgggtcttcttgctcttctcgatgaggaacaactttgggccgaggtttcccaagccggaaccgtgttagattctaaccatacagtgggtgttctcgctagcgcgcaccgtccacaagggcctgcagatgcttggcgtgctgcggtgctgatttatgctagcgatgacacaagggctcatccaaatcgatcggttgctgtgacactgcggctgcgcggcgtgccacctggtcctggccttgtctatgtaacccgatatttggataacggtctgtgctcgccagacggggagtggaggaggttaggacgtccggttttcccgacggccgagcagttccgaaggatgagagccgctgaagatccggtagctgcagctcctaggccactgcctgctgggggacgactcaccctgcgccccgctttgaggcttccttctctgctccttgttcatgtttgtgccaggccagaaaagccccccgggcaagtgacacggttgagggcccttccacttacccaaggccaactggtgctagtctggtctgacgagcatgttggctctaaatgtctttggacatacgaaatacagtttagccaggatggaaaagcttatacaccagtgtcaaggaagccatccacgtttaatttatttgtcttcagtccagatacaggtgctgtctccggtagctatagggtgagggctctggattactgggcccgtccaggccctttttccgatccagttccgtatcttgaggttccagtcccaagaggcccgccttctcctggaaatccc

SEQ ID NO: 4328 - DNA, 1959 bp, Artificial Sequence
  derived and/or modified sequence
atgcgcccactcagaccgcgtgccgctctccttgcgctgctcgcatcactccttgctgcaccgccagtcgcgcccgctgaagctccgcacctggtgcacgtggacgccgcccgcgcactttggccgctgcggcgattctggcgctccactggattctgtccgcccctgcctcacagccaggccgaccaatacgtgttgtcctgggaccaacaactgaatctcgcgtacgtgggagcggtgccgcatagaggaattaagcaggtgcgcacccattggttgctggaattggtcactacccggggttctaccggacgcggactgtcttacaatttcacccatcttgatgggtatctggacctcctgcgcgagaatcagttgctgcctggattcgaactgatgggctccgcgtcaggacacttcactgatttcgaggacaagcagcaggtgtttgaatggaaagacctcgtgagctctctcgcgcgccgatacatcggccgctacggattggcgcacgtgagcaagtggaacttcgaaacttggaacgaacccgaccaccacgacttcgacaatgtgagcatgaccatgcaaggattcctcaactattacgatgcctgtagtgagggactgcgggccgccagtccggccctcagactcgggggccctggcgactccttccacactccaccccggagccctctgtcatggggtctgctgcggcattgccacgatggtacgaacttcttcaccggagaggccggagtcagactcgattacatctccttgcatcgcaaaggcgcccggtcgtccatctcgatcctggagcaagaaaaggtcgtggcgcagcaaatcaggcagctcttcccgaaatttgcggataccccgatctacaacgacgaagccgaccctctggtgggatggtcgctcccccaaccgtggagggcagacgtcacctacgccgctatggtggtgaaggtcatcgcacagcatcaaaatctcctgctggccaatactacttccgcctttccgtacgcgctcctgtctaatgacaacgcattcttgtcataccatccgcatccgtttgcacaacggacgctgactgccagatttcaggtcaataacacccgccctccgcacgtccagctgctgaggaagcctgtgctcacggccatgggactgctcgcgctgctggacgaagagcagctgtgggcagaagtgtcgcaggccgggactgtgttggactcaaaccataccgtgggagtgcttgcgtccgcccacaggccacagggcccagctgacgcatggcgcgcagcagtgctgatttacgcatcggacgatactcgggctcaccccaaccggagcgtagcagtgaccctccggctgcgcggtgtcccaccaggtccaggactggtgtacgtgacccgttatcttgataacgggctgtgcagccctgatggggaatggcgcaggttgggtcggcccgttttcccgactgcagagcagttccgcagaatgagagcggcggaagatccagtggccgcagcaccaagaccgctgccggcaggcgggcgtctgactttgcggccggcacttaggctgccgtcgctgctgttggttcacgtgtgcgcgcgtccggagaagccaccagggcaggtgacccggcttcgggcgctcccgctgactcagggtcaactcgtgcttgtctggtcggatgaacacgttggatcaaaatgcctttggacgtacgagatccagtttagccaggacggaaaggcctacaccccggtatcgcggaagccgagcaccttcaacttgtttgtcttttcccctgacaccggcgctgtctcaggcagttaccgcgtgagagccctcgattactgggccaggccgggaccgttctcggatccagtgccatacctggaggtccccgtccctcgaggcccaccgtcgccgggaaaccct

SEQ ID NO: 4329 - DNA, 1959 bp, Artificial Sequence
  derived and/or modified sequence
atgcggccacttagacctagagctgcactgcttgcactgctggcctctctgcttgcagcgccccccgtggcacctgcggaagcaccgcacctggtgcatgtggatgcagcaagagcactctggcctctgcggcgattctggcgatccaccgggttttgtcctcctttgcctcactcgcaagccgaccaatatgttctgtcatgggatcaacaactcaaccttgcctacgtgggcgcagtgccacatcgggggatcaagcaagtcagaactcattggttgctggagctggtcacgactcgtggaagcaccggccgagggctttcgtacaactttacgcacctggatgggtacttggatcttctccgggaaaatcaacttctcccaggtttcgaactgatgggttcggcatccggccattttactgattttgaagataagcaacaggtctttgagtggaaagacttggtgtcatccctggcacggcgatatatcggtaggtacggactggcccatgtctccaaatggaacttcgagacttggaacgaaccagatcaccatgattttgataacgtgagcatgaccatgcagggttttctgaactactacgacgcttgttcagaggggctgcgggctgcatcgcctgcactgagactgggtggccccggtgactcctttcatacgccccctagatcgccgcttagctggggactgctgcgtcactgtcacgatggaactaatttcttcacgggagaagcaggtgtgagacttgattacatctcgctgcaccgaaagggcgcaagatcgtcaataagcattctggaacaggagaaagtggtggcacagcaaatccggcaactttttcccaaattcgcagatactcctatttacaatgatgaggcagacccacttgtgggttggtcccttccccaaccatggcgggcagatgtcacctacgccgcgatggtggtgaaggtcatcgctcaacatcagaaccttctgctcgcaaatactacctcggcatttccatacgctctcctttcaaacgataatgccttcttgagctaccatccacatccctttgcccaaagaacccttactgcaagattccaggtaaacaatacccgtccacctcacgtgcagctgcttcggaagcccgtgctgaccgccatgggtcttttggcactcctggacgaagagcaactttgggcagaagtctcgcaggcggggaccgtccttgacagcaaccatactgtcggtgtcttggctagcgcgcatcgcccccaggggccagctgatgcctggcgcgcagcagtgctgatttacgcatccgatgatacccgcgcccatcctaatcggtctgtggcggtcactcttcgcctgcgcggagtgcctccaggccccggacttgtctacgtgactcgctaccttgataacggactttgttcccccgacggagagtggcggcgtcttggacgaccagtctttccgacggccgaacagtttagaagaatgcgagcagcagaagatcccgtcgcagccgctccaagaccacttccagcaggaggtcgtttgacgctccgcccagcacttcggctgccatccttgctcttggtgcacgtgtgcgcgaggcccgagaagccgcccggacaagtgaccaggctgcgcgcactgcctttgactcaaggccagcttgtccttgtctggtcagacgaacatgtgggcagcaagtgcttgtggacctacgagattcaattttcccaagatggtaaggcctacaccccagtgtccagaaagccatctactttcaacctttttgtcttttcaccggataccggcgcagtgagcgggtcctacagggtccgggcgcttgattactgggcaaggcccggtccattttcagatcctgtgccttacctggaggtcccagtgcccagaggccccccaagcccaggaaatcct

SEQ ID NO: 4330 - DNA, 1959 bp, Artificial Sequence
  derived and/or modified sequence
atgcgtccgctgcgcccccgggcggccctgctggcgctgctggcctcgcttttggccgcgccgccagtggctcccgctgaggcaccgcatctggtgcacgtcgacgccgcacgggctttgtggcctctgcgacggttctggagaagcactggcttttgcccgccactgccacatagccaagcggaccaatacgtgctgtcgtgggaccaacagctgaacctcgcctatgtcggagccgtgccccatcgcggcataaaacaggtccgcactcattggctcctggaacttgtgactaccagaggctcgactggacggggactgtcctataacttcactcatctcgacggttacctggatttgcttcgggaaaaccagctgctgcctggcttcgagctgatgggctcagcctcaggacatttcacggactttgaggataaacagcaagtttttgagtggaaggatctggtgagctccctggctcggaggtacatcggacgctatggattggctcatgtgagcaagtggaacttcgaaacgtggaacgaacccgatcatcacgattttgacaacgtgtcgatgaccatgcaaggcttcctcaactactacgacgcctgttcggaaggcctccgagcggcctcgcctgccctcaggctgggtggacctggcgactcgttccacacccctcctcgctctccgctgtcatggggacttctgaggcactgtcacgacggaactaatttcttcactggagaggccggagtccgtctggattacattagcctccaccgcaaaggagcaagatcctccatttccatcctggagcaagaaaaggtagtggcccagcagatccgccagctgtttccgaagttcgcggacaccccaatttacaacgatgaggcggatccacttgtgggctggtcgctgccccagccgtggagagccgacgtcacttacgcagctatggtggtgaaggtgatcgctcagcatcagaacctcctgctcgctaataccacttccgcctttccgtacgccctgctttcgaacgataatgccttcctctcgtaccacccacaccctttcgcccagcggacgctcaccgccaggtttcaagtgaacaacacccggccgccgcacgtgcagctgcttcgcaagccggtgttgaccgcgatgggactgctcgcgctgttggatgaggagcagctgtgggctgaagtgtcacaggctggaactgtcctggactccaaccatactgtgggagtgctggcgagcgctcaccggccacaaggtccggcggatgcgtggcgagcggccgtcctgatttacgcctccgatgataccagggcgcacccgaacagatccgtcgccgtgaccctgagattgcgcggagtcccgcctggaccagggctggtctacgtgactcgatatctggacaatggtctgtgctcgccagatggggaatggcggcggctcggacgcccagtgttccctaccgcggagcagttcaggcgcatgcgcgctgccgaagatcccgtggccgccgcaccgcgtccactcccggccggggggcgcctgaccctgcgaccggcactgaggctgccgtcgctgcttctcgtccatgtgtgcgcgcgcccggagaagccaccgggccaggtcacccgcctccgcgcgctcccactgactcagggccagctggtgttggtctggtcggacgaacacgtgggatctaagtgcctctggacctacgagatccaattctctcaggacggcaaagcatacaccccggtgtcgaggaagccgtcgacgtttaatctgttcgtgttctcgccggacactggggccgtctccggatcctaccgggtgagagccttggactactgggcgcgaccggggccttttagcgacccagtgccttacttggaggtcccagtcccccgcggcccgccgtccccgggaaaccca

SEQ ID NO: 4331 - DNA, 1959 bp, Artificial Sequence
  derived and/or modified sequence
atgcgaccgttacgaccgcgagcggcgttattagcgttattagcgtcgctattagcggcgccgccggtagcgccggcggaagcgccgcatttagtacatgtagatgcggcgcgagcgttatggccgttacgacgtttttggcgttcgacgggtttttgtccgccgctaccgcattcgcaagcggatcaatatgtattatcgtgggatcaacaattaaatttagcgtatgtaggtgcggttccgcatcgtggtataaaacaagtacgaacgcattggttactagaattagttacgacgcgaggttcgacgggtcgtggtctatcgtataattttacgcatttagatggttatttagatttactacgagaaaatcaattactaccgggttttgaactaatgggttcggcgtcgggtcattttacggattttgaagataaacaacaagtatttgaatggaaagatctagtatcgtcgttagcgcgtcgatatataggtcgatatggtctagcgcatgtatcgaaatggaattttgaaacgtggaatgaaccggatcatcatgattttgataatgtttcgatgacgatgcaaggttttctaaattattatgatgcgtgttcggaaggtctacgtgcggcgtcgccggcgttacgtctaggtggtccgggtgattcgtttcatacgccgccgcgatcgccgttatcgtggggtttactacgtcattgtcatgatggtacgaatttttttacgggtgaagcgggtgtacgtctagattatatatcgttacatcgaaaaggtgcgcgttcgtcgatatcgatactagaacaagaaaaagtagtagcgcaacaaatacgtcaactatttccgaaatttgcggatacgccgatatataatgatgaagcggatccgctagtaggttggtcgctaccgcaaccgtggcgagcggatgtaacgtatgcggcgatggttgtaaaagtaatagcgcaacatcaaaatttattattagcgaatacgacgtcggcgtttccgtatgcgctactatcgaatgataatgcgtttttatcgtatcatccgcatccgtttgcgcaacgtacgttaacggcgcgttttcaagtaaataatacgcgtccgccgcatgttcaactactacgtaaaccggtactaacggcgatgggtttattagcgctattagatgaagaacaattatgggcggaagtttcgcaagcgggtacggtattagattcgaatcatacggtaggtgttttagcgtcggcgcatcgaccgcaaggtccggcggatgcgtggcgtgcggcggtactaatatatgcgtcggatgatacgcgtgcgcatccgaatcgatcggtagcggtaacgttacgactacgtggtgttccgccgggtccgggtctagtatatgtaacgcgatatctagataatggtttatgttcgccggatggtgaatggcgtcgtttaggtcgaccggtttttccgacggcggaacaatttcgtcgaatgcgtgcggcggaagatccggtagcggcggcgccgcgaccgttaccggcgggtggtcgtttaacgctacgtccggcgttacgtttaccgtcgttattattagtacatgtatgtgcgcgaccggaaaaaccgccgggtcaagtaacgcgtttacgtgcgttaccgctaacgcaaggtcaattagttctagtttggtcggatgaacatgtaggttcgaaatgtttatggacgtatgaaatacaattttcgcaagatggtaaagcgtatacgccggtttcgcgaaaaccgtcgacgtttaatttatttgtattttcgccggatacgggtgcggtatcgggttcgtatcgtgttcgagcgctagattattgggcgcgtccgggtccgttttcggatccggtaccgtatctagaagtaccggttccgcgtggtccgccgtcgccgggtaatccg

SEQ ID NO: 4332 - DNA, 1959 bp, Artificial Sequence
  derived and/or modified sequence
atgcgcccacttagacccagggcagcacttctcgccctgctcgcgtcacttctcgccgccccgcctgtggcacctgcagaagcccctcatcttgtgcacgtcgacgcggcaagggccctgtggcctctgagacgcttctggaggagcaccggcttctgtcctcccctccctcattcacaggcagatcagtacgtcctttcatgggatcagcagctgaacctggcatacgtgggagcagtgccacatcgtggtatcaaacaggtgcgcactcactggctgttggaactggttaccaccagaggatctaccgggagggggctctcatacaacttcacccacctcgatggctacttggatctccttcgagaaaaccaactgcttcctggattcgaactcatgggttcggcctcaggacattttactgactttgaggacaaacagcaggtttttgagtggaaggacctggtgagctcattggctagacgctacataggcagatacggacttgcacacgtgtcgaagtggaactttgaaacctggaatgagccagaccaccacgattttgataatgtcagcatgactatgcagggattcctgaactactacgacgcctgctccgaggggctgcgggcagcatcccctgcactgcgccttggagggccaggagattcattccacaccccaccacgaagcccactgtcgtggggacttctgaggcattgtcacgatggtaccaacttctttacgggcgaagcaggtgtgagactcgattacatttcccttcaccggaagggtgcgagaagctccattagcatacttgaacaggagaaggtggtggcgcaacagattagacaactgttccctaagtttgcagacacccctatctacaacgatgaggcagacccattggtgggatggtcactgcctcaaccgtggcgggcagatgtgacctatgccgctatggtggtgaaggtcatcgcacaacatcaaaatcttctgctggcaaacactacgtccgccttcccttacgccttgctgagcaacgataatgcttttctttcgtaccatccacatccttttgcacagcgaacgcttaccgcaaggtttcaagtcaacaacactagacctcctcacgttcaattgcttcggaagcccgtccttacggcaatgggactcctcgctcttcttgacgaagagcagctttgggcagaagtgtcgcaagccggtacggtccttgactccaatcatactgtcggtgttctcgcttccgcacatagacctcaaggtcctgcggatgcgtggagagccgcagtgctcatttatgcatcggacgatactcgggcacatccaaacagaagcgtcgcagtgacgcttcgtcttaggggagtccccccaggtcccggtcttgtgtacgtgaccagatacttggataatgggctctgttctccggatggcgaatggaggagacttggaaggccggtgtttccaactgcagaacaattccggcgcatgcgggcggctgaagatcctgtggcggccgctcctcggcccctgcccgcaggaggtaggctcaccctcagacccgctctgagactgccctcccttctgcttgtgcatgtgtgcgcgaggccagagaagccacctggccaagtgactcgccttagggcacttccacttacccaaggacagctcgttttggtctggtcggatgaacatgtgggatccaagtgtctctggacttatgaaattcaattttcgcaggacggaaaggcttatacccctgtgtcgcggaagccatcaacctttaacctgtttgtgttttcgcccgatactggcgcagtgtccgggtcgtaccgggtgagggccctggattactgggcaaggccaggtcctttttcagaccctgtcccttacctcgaagtgcccgtccctagagggcctcctagcccaggaaatccg

SEQ ID NO: 4333 - DNA, 1959 bp, Artificial Sequence
  derived and/or modified sequence
atgcgcccgctcagacccagggccgccctgttggcgctactggcaagtctgctcgccgcacctcccgtggcgccagccgaggccccacacttggtccacgtagatgctgcaagggccctatggccactgaggaggttctggaggtctaccggcttttgccctccactgcctcacagccaggccgaccagtacgtattaagctgggaccagcagttgaatctggcctacgttggggcagtgccacatcggggcattaaacaggttagaactcactggctgctcgaactagtgacgaccagagggtctacgggccggggcctgagttacaacttcactcacctcgatggatacctggaccttctgagggaaaatcagctgctgcctggttttgagctaatggggtccgcctccgggcactttacagacttcgaagataagcaacaggtctttgaatggaaagacctcgtaagctctttggcccgccgatatattggtcggtatggcctggcacacgtttcaaaatggaactttgagacatggaatgaacccgaccaccacgacttcgataacgtgtctatgactatgcagggattccttaattattacgacgcctgctctgagggacttagggcagcctctcctgcacttcgactgggggggccaggagattcttttcacaccccaccccggagccctttgagctgggggctgctacggcattgccacgacggaactaattttttcacaggagaggccggcgtgagactcgactacattagtttacaccgtaaaggcgctagatcgtctattagtattcttgagcaggaaaaggtggtcgcccagcagatccggcagctctttccaaagtttgctgacacacccatctataatgatgaggccgaccccctggtggggtggagtctgcctcagccttggcgcgccgatgttacttacgcggctatggtggttaaggtgattgcccagcatcagaacctgctcttggccaatacgaccagcgcctttccttatgcgctcttaagtaatgataatgctttcttgtcctatcatcctcatccgttcgcgcagaggacattgaccgctcgcttccaggttaataatacccgcccccctcacgtgcaactgctacgcaaacccgtactcacggcgatggggttgctcgccctgctcgatgaagaacagctgtgggcagaggtgtcccaggctggaaccgtactcgatagtaaccataccgtcggggtgctcgcaagtgctcaccgaccccagggaccggctgacgcgtggagggcagccgtcctgatttacgccagcgacgatacccgcgcacacccaaatcgaagcgttgccgtcacccttcggttaaggggagtccctccaggaccaggattggtctacgttactaggtacttggataatggcctctgctcgcctgatggtgaatggaggaggcttgggcggcccgtttttccaacagccgagcagtttcggcgtatgagagctgcagaggatccggtggcagctgctcctcggcccttacccgcaggaggtagactaaccctgcggccagccctgcggctgccttccttgctgttagtgcatgtctgcgctcgccctgagaaaccacctggtcaagtgacccgactccgcgctctgcctttgactcagggtcagctagtgttggtgtggtctgatgaacatgtagggtccaagtgcctttggacctacgagatccaatttagccaagacggaaaagcttatactcctgtttcacggaagccatctaccttcaacttgtttgtgttcagcccagataccggcgccgtttctggcagctacagagtgcgcgctttggactattgggccagacctgggcctttttccgacccagtcccatacctggaggtgcccgtaccaagagggcctccctcccctggcaacccg

SEQ ID NO: 4334 - DNA, 1959 bp, Artificial Sequence
  derived and/or modified sequence
atgcgtcctctcagacctcgcgcagcactgttggccctgctggcttcgctgttggctgcaccgcccgtggctccagccgaggcgccccatctggtgcatgtcgacgccgctagagcactttggcccctgcggcggttctggaggtcaactggcttctgtccgccactcccgcactcacaggccgaccaatacgtgctttcctgggaccagcagctgaatcttgcgtacgtgggcgccgtgccgcatcgcggtattaagcaagtgcgcactcactggctgctcgagctcgtgaccaccagaggatctaccggacggggcctttcctacaacttcacgcacctggatggctacctggatctgcttcgcgaaaatcagctgctgccaggatttgaactgatgggaagcgcatccgggcatttcaccgattttgaagataagcagcaagtgttcgagtggaaagatttggtgtcctcgcttgcgcggagatacatcggtagatacggtctggcacacgtgtcgaagtggaacttcgaaacctggaatgaacccgaccaccacgacttcgataatgtgagcatgaccatgcagggtttcctgaactactacgacgcgtgcagcgagggactgcgggcggcatcacctgcgctcagactggggggacctggagactcattccacacgccgccacggtcgccactgtcgtggggtttgttgcggcactgccatgacggcactaacttcttcacgggagaggccggtgtgcggctggactacattagcctccacagaaagggggcccggtcctccatttctatcctggagcaagaaaaggtcgtcgctcagcagatccgccagcttttcccaaaattcgcagacaccccaatctacaatgacgaggcggaccccctcgtgggctggtcactgccgcagccgtggcgagccgacgtgacgtacgcggccatggtggtgaaagttattgcacaacaccagaacctgctcctcgcaaacaccacctccgcgttcccgtacgcgctgctctccaacgataacgccttcctgtcctatcacccgcacccgtttgcccaaagaactctcaccgcccggtttcaggtcaacaatacgcggccgccgcatgtccaattgctgagaaagccggttctcaccgcaatgggcctcctcgccctgctggatgaggagcaactctgggcggaagtctcgcaagccggcactgttctggacagcaaccacaccgtgggtgtgctggcctcagcacaccgcccgcaaggtccggccgacgcctggcgggcagcagtcctgatctacgcctccgatgatactcgggcacatccgaatcgctccgtggccgtgaccctccggctgcgcggtgtgccaccggggcccggcctggtttacgtcactcgctacctcgataacgggctctgttcaccggacggagaatggcgccgactcggacggccagtgttcccaaccgccgaacagttcagaaggatgagagccgccgaggacccggtggccgccgcaccgaggccactgcctgcgggaggccgcctgacgcttagaccggccctcagactgccgagtttgctgctcgtgcatgtctgcgcccggccagagaagccgccaggacaagtgactcgcctgcgggcgctgccgcttacccaaggccagcttgtgctggtctggtcagatgaacatgtgggttcgaagtgcctttggacctacgagatccagttcagccaggacggaaaagcatacactccggtttcgcgcaaaccttcaactttcaatttgttcgtgttctcccctgataccggggctgtgtcgggctcataccgcgtgcgggcccttgactactgggcgcgcccggggccgttctcagacccggtgccttacctcgaagttcctgtcccgagagggccaccgtcaccaggaaacccg

SEQ ID NO: 4335 - DNA, 1959 bp, Artificial Sequence
  derived and/or modified sequence
atgaggcccttgagaccgcgggcggcgctgcttgcccttctggccagcctgctggctgcccctccagtcgccccagcagaagctccccacctggtccacgtagatgcagcaagggcactgtggccactgcgcaggttctggagatctaccggtttctgcccccctctccctcatagtcaagccgatcaatacgtgttgagctgggaccagcagctgaatctggcatacgtgggcgctgtgccccatcgcggaattaagcaggtccggacacactggctcttggagctggtaaccactcggggctccacaggacggggactgtcttacaatttcacacatttggacgggtacctcgacctgttgagagaaaatcagcttctgcccggtttcgagctcatgggtagtgcctccgggcacttcaccgactttgaagacaaacagcaagtgttcgagtggaaggatttggtgtcctccctggctcggaggtacatcggaaggtacggcctggcgcatgtgtctaagtggaactttgagacctggaatgaacctgatcatcatgacttcgataacgtctccatgaccatgcaagggtttttgaattactacgacgcttgctccgaagggctgcgggcggcttcacctgccctcaggttgggtggcccaggagacagttttcacacacccccacgatccccgcttagctggggcctgctgagacattgtcatgacggaactaatttttttactggggaagctggggtgcgccttgattatatcagtctgcatagaaaaggcgctcgctccagcatctcaatccttgaacaagagaaggtcgtcgcccagcagatccgacaacttttccctaagttcgccgatacgcctatttacaacgatgaggctgatccacttgtgggctggagcctcccacagccgtggagagccgatgtgacatatgcggcaatggtcgtgaaggtgatcgctcagcaccagaacctgctcctggctaatacgacttctgcattcccctatgctcttctttccaatgataatgcctttctgtcctaccacccccatccatttgcgcagcgaacactcaccgctcggttccaggttaacaacaccaggccgccgcacgtccagcttctgcgcaagcctgttctgactgcaatgggtctcctcgccctcctggacgaggagcagctgtgggccgaggtgtctcaggcggggactgtgcttgattctaatcacacagtcggcgtgctggcctctgcccatcgcccacagggccccgccgacgcctggcgggccgctgttttgatctacgctagtgatgacactagggcacaccctaatcgctctgtcgctgtgactctgagactgagaggagtgcctcctggaccaggactggtatacgtgaccaggtaccttgataacggcctttgttctcccgatggcgaatggcggagattgggacgacctgtattccccacagcagagcaattccgacgaatgagggcagcagaggatccagtcgccgccgctccacgaccactccctgctggaggaaggttgacgctgcgccctgccctgcgccttccttcactcttgttggtacatgtatgcgctagacccgagaagcccccgggtcaggtgacacgcctcagggccctcccgctcactcagggacagctggtgttggtctggagtgacgagcacgtgggttcaaaatgcctttggacatacgagatccaatttagccaggacggcaaagcttatacgcctgtgagtagaaagccttccacattcaatctgtttgttttctcccccgataccggcgcagtctctgggtcatacagagtgcgggcactcgactattgggcccggcctgggccctttagtgatccggtcccctatttggaagtgcctgtcccgaggggacccccctccccagggaaccct

SEQ ID NO: 4336 - DNA, 1959 bp, Artificial Sequence
  derived and/or modified sequence
atgcgtccattacgtccgcgggccgctctgctggcattacttgcgagtcttttagcagctccacctgtggcacctgcagaagcccctcatcttgtccatgtggatgccgcacgtgcactctggccactacgtagattctggagatcaaccgggttttgtccacctctacctcattctcaggccgatcagtatgtgctgtcctgggatcagcagctcaacttggcctacgtgggagcagtgccacaccgagggattaagcaggtgaggactcactggcttttggagttagtgacaacgagagggtccaccggacgaggactgtcatacaacttcacccatctggacggttatcttgatctgctgagagagaatcagctgctgcccggttttgagctgatggggagtgcatcaggacatttcaccgactttgaagataagcagcaggtgtttgaatggaaggatttggtgtcatccctggcccgacgatacatcggaagatatggtttggcgcacgtttctaaatggaactttgaaacatggaatgaaccagatcaccacgattttgataatgtttcgatgacaatgcagggttttctgaattattatgatgcctgcagtgagggcctaagggcagccagccccgcattacgcctcggtgggcccggagattcttttcacactccccctagatcacccctgtcttggggactgttgcgtcactgtcatgacgggaccaatttctttaccggagaggcaggcgtcagattagactatatcagcctccacaggaaaggagcaaggtcaagcatctcgatcctggaacaggagaaagtggtagcccagcagatccgacagctgttcccaaagttcgccgataccccaatctacaacgacgaggcagacccactggtgggttggtcattacctcaaccttggagggccgacgtcacctacgcagcaatggtcgtgaaggtgatagctcagcaccagaacctgctgctggcaaacaccacttcggcatttccatacgccttactgtccaacgataacgctttcctgagctaccaccctcaccctttcgcccagaggacgcttactgcacgttttcaggttaacaatacgagaccccctcatgtccaattgcttaggaaacccgtccttaccgccatgggccttcttgcactcttggatgaggagcagctttgggcagaggtctcgcaggcaggtactgtactggatagtaaccataccgtgggggtccttgcgtccgcccacagacctcagggtccagctgatgcatggcgagccgctgtgctgatctacgcaagcgatgacaccagagcgcatccaaataggtcagtggcagtgacgctgaggctccgtggagtccctccagggccggggctggtctatgtgacgaggtacctagacaatggcctgtgttcacccgacggggaatggaggaggttggggcgacctgtctttccaactgctgagcagttcagacggatgcgagcagctgaggatccagtggcagcagcacctcgaccactgcccgccggcggtcggctcacactgcgacccgccttgcgattgccgtcattgctgctggtgcacgtgtgcgcgagaccggaaaaaccgcctggtcaagtaaccaggctgagagctttgcctctgacacagggccaactggtgttggtgtggtctgacgaacacgtgggctcaaaatgtctgtggacctatgaaatacaattcagccaggacggaaaggcatatacccctgtttctaggaagccctccacattcaacctcttcgtctttagccccgacacaggcgcggtgtccggaagctaccgggttagggctttagattactgggctcgcccagggccgtttagcgaccctgtgccctatttggaggtgcccgtaccccgaggacccccttctcctggcaaccca

SEQ ID NO: 4337 - DNA, 1959 bp, Artificial Sequence
  derived and/or modified sequence
atgcgccctctgcggcctagggctgctttgttagccctgctggctagcttactggcagctccacccgtggcccctgcagaggcccctcatctggtacatgtagacgctgcccgcgctctatggccattgaggcgattctggagatctactggtttctgtcctcccttgcctcactcgcaggcggatcagtacgtgctgtcatgggaccaacagctcaacctggcttatgtcggtgccgtgccccaccggggtatcaagcaggtccgaacccactggctgcttgagctggtgactactagagggtccaccggtcgcggcctctcttataactttacacacttagacggctatctcgatctcctcagagaaaaccagcttctgccaggtttcgagttgatgggatccgcatcaggccactttacagatttcgaagacaaacagcaagtgtttgaatggaaagatctggtcagttcattggcccggcggtacattggccgttacggcctggcccacgtgtcgaagtggaacttcgaaacatggaacgagccagatcatcacgactttgataacgtgtctatgacaatgcaggggttcttaaactattacgacgcatgtagtgaggggctgagggctgcctctccagctcttagattgggggggcctggggattcatttcacactccaccacggtcaccactttcttggggattgctcaggcattgccacgatgggaccaactttttcactggagaggccggtgtgcggttggattatatctcacttcaccggaagggggcccggtcctcaatttcaatactggaacaggaaaaagtggtggctcagcagatccgccagctgtttcctaagtttgccgacacaccaatttataacgacgaagctgatccacttgttggatggagcctgcctcagccatggcgagccgacgtcacatatgcagccatggtagtgaaggttattgctcagcaccaaaatttacttttagcgaatacaacgagcgccttcccttacgcactgttgagcaacgacaatgcctttctaagctaccatccacaccctttcgcgcaaagaacactcacagcacggttccaggtgaacaacactcgccccccgcatgtgcaactgctgcgcaagccagtgttaaccgccatgggtctgctggctctgttggacgaggagcagctgtgggctgaggtgtctcaggccggcaccgttttggactctaatcacaccgtgggagtcttggcgagtgcgcaccgtcctcagggacccgcggacgcctggagagcagcagtactcatctacgcttcagacgacactcgggcacatcccaaccgcagcgttgccgttacactcagattgaggggggtccctcctggacctggcctggtctatgtgactcggtacctggacaacggcctttgctcaccagacggagaatggcgacgactgggccgccctgtgtttcctaccgcagagcagttccgcagaatgcgggccgcggaggaccccgtcgccgccgcccccaggcccctgcctgcaggtggcaggctaacactccgccctgctctgagactgccttctctcttgctcgtccacgtttgcgcccgccccgaaaaaccgcccggtcaagtgaccagactacgcgccctgcccctgacccagggacagctggtgctagtctggtccgacgaacacgttggaagcaagtgcttgtggacttatgaaattcagttctcacaggatggaaaagcctatacaccggtgtctcgcaaaccttcaacctttaacctgttcgtgttctctcccgacacgggagccgtgtcgggctcttatcgggtgcgagctctggactactgggctaggcccggccccttttccgaccccgtaccatatctcgaggtgccagtgccccgaggccctccaagtcctggcaatccc

SEQ ID NO: 4338 - DNA, 1959 bp, Artificial Sequence
  derived and/or modified sequence
atgaggcccctgcgccctagagccgcacttcttgcactgctcgcgtcgcttcttgcagcgcctcccgtggcaccggccgaagcccctcatctggtgcacgtcgacgccgcaagggcactttggcccctgagacgcttctggcggagcaccgggttttgtccccccttgcctcacagccaagcagatcagtacgtgcttagctgggatcagcaactgaatctggcgtatgtgggcgcagtcccccatcgcggaatcaagcaggtgcggacccactggctcttggaattggtcaccaccaggggttccactggacggggactgtcatataactttactcacttggatggataccttgacctgctgcgtgagaaccagcttctccctggatttgagctcatgggaagcgcatccggtcattttactgatttcgaggataagcagcaagtttttgaatggaaagatcttgtcagcagcctggcccgaaggtacatcgggcgttacggtctggcgcacgtctcaaagtggaactttgaaacttggaatgagccggatcatcatgatttcgataacgtgtccatgacgatgcaaggatttcttaactactacgacgcgtgttcggaaggactcagagcagcgtcgccagcactccggctcggcggacccggtgactcatttcacaccccgccccggtcacccctctcatggggactcttgaggcactgccatgatggtactaacttcttcaccggcgaagccggcgtccgtcttgattacatcagcctgcatcggaagggggcaagatcaagcatctccattcttgagcaagagaaagtggtggcccaacaaatcagacagcttttcccgaagtttgccgacactccgatttacaacgatgaagcagaccctcttgtgggttggtctttgccacagccgtggcgcgcagacgtcacctacgcggcaatggttgtcaaggtcatcgcgcaacatcaaaaccttcttctcgctaacacgacttccgcattcccgtacgctcttctgtcaaatgacaatgcatttctctcgtaccatcctcatccgttcgcacaacgaactctcacggcccggtttcaagtcaacaacactcgtcctcctcatgttcaacttctgaggaaacctgtgctgaccgcaatgggcctgttggcacttctggatgaggagcaactctgggcagaagtgtcccaagccggtaccgttctcgactcaaaccataccgtgggcgtgcttgcttccgcccatagaccacagggcccagcggacgcgtggcgcgcggcagtcctcatctacgcctccgatgatactcgggcacaccctaatagatccgtcgcagtgactcttcgactgcgaggagtgccacctggccccggactggtgtatgtgacgcgatacctcgataatggactttgttcccccgatggagaatggcgccgcctgggacgtccggtgtttcctactgcagaacagttccggcgcatgagagcggccgaggaccctgtcgcggcggcgcccagaccactgccggcaggtgggagactcactctgcggcccgccctccgcctcccttcgcttctcctcgtgcacgtgtgtgcccggccagaaaaacctcctgggcaggttacccgccttagagcactgcctttgacgcagggtcaacttgtcctggtctggtccgacgaacatgtggggtcgaagtgcctctggacctatgaaattcaattttctcaagatggaaaggcatacacccctgtgtcgagaaagccatcgactttcaatctgttcgtgttttcgccagataccggtgcagtgtcaggatcctacagagtgagggctctggattactgggcccgccctggcccatttagcgatccagtcccatacttggaagtccctgtccctaggggaccaccgagcccaggaaatcca

SEQ ID NO: 4339 - DNA, 1959 bp, Artificial Sequence
  derived and/or modified sequence
atgaggccgcttagaccacgcgcagcactgcttgcacttctcgcatccctgttggcagcacctcccgtggcacctgcagaggcaccacatctggtgcatgtggatgcggcgcgggcactgtggccactgcgtagattctggcgctcgactggattttgtccaccactgcctcacagccaagcagaccagtacgtgctttcttgggatcaacagctgaaccttgcatacgtgggagcagtgcctcaccgaggaatcaaacaagtgcgcactcactggctgcttgaacttgttactactaggggcagcaccgggcggggtctgtcgtacaactttacccatcttgatggataccttgatttgctccgagagaatcaattgctcccaggcttcgagctgatggggtcagcatccggtcatttcaccgatttcgaagataagcaacaagtgtttgagtggaaggatctcgtgagctcactcgccaggagatacatcggccgctacggtctggcgcatgtctcgaagtggaattttgaaacttggaacgaaccggatcatcatgatttcgataacgttagcatgacgatgcagggttttttgaactactacgatgcttgctccgaaggtttgcgcgcggcgagccccgcattgagacttggaggcccaggcgacagcttccataccccaccacggtcgcctctgtcgtggggtctgctgcggcactgtcacgacggtactaacttctttaccggagaagctggagtgcggcttgattacatctcacttcaccggaagggagctaggagctcgattagcattctggaacaagaaaaagtggtggcccagcagattagacagctcttcccgaaatttgccgacactcctatttacaacgacgaagcagatccactcgtcggctggagcctgccacagccatggagagcagacgtgacctacgcagcaatggtcgtcaaggtcattgcgcaacaccagaatctcctcctggcaaacacgacttcggcctttccttacgctcttctgtccaatgataatgcgttcctgtcgtaccacccccatccgtttgcacagcgcaccctcaccgcacgcttccaagtcaacaatacgcggccaccacatgtgcagttgctcagaaagccagtccttaccgcaatgggacttctggcactgctggatgaagaacagctgtgggcagaagtttcacaggcaggtaccgtccttgactccaaccacactgtcggcgtgctggcatccgcgcacagaccacagggtcctgcggatgcgtggcgagccgcagtgctgatctacgcatcggatgatacccgagcccatcctaaccggtccgtggcagtgactctgcgactgcggggtgtccctcctgggccaggtctggtctacgtaaccagataccttgacaatggcctgtgttcaccagacggggagtggaggcggctgggcagaccggtattccccaccgctgaacaattcagaaggatgagagcagctgaggaccccgtcgcggctgcacctagaccgctccctgcgggaggtagactgaccctgcggcccgctctgcgcctgccctcactccttcttgtgcacgtctgcgcacgccctgaaaaaccacctgggcaagtcacccggctcagagcactcccactgacccaaggtcaacttgtgctggtgtggagcgatgagcatgtgggttcgaagtgcctttggacttacgaaattcaattttcccaagatggtaaggcttatactcctgtgtcgcgtaagccgtccacctttaacctctttgtgttctcgccagatactggagctgtgtccggctcgtacagagtgagagccctcgactattgggcccgaccaggaccgttttcggacccagtgccgtacctggaggtgccagtgccacggggacctccaagtccaggtaaccca

SEQ ID NO: 4340 - DNA, 1959 bp, Artificial Sequence
  derived and/or modified sequence
atgcggcctcttagaccgcgcgccgcgctccttgcactgctggcaagcctgctcgccgctcccccagtcgccccagcggaagccccgcatcttgtgcacgtggacgccgctagggccctgtggccactccgccgcttttggcggtccactggattttgcccaccacttccgcacagccaagcagaccagtacgtgctgtcctgggatcagcaactgaacctggcatacgtgggagctgtgccgcatcggggaatcaagcaagtgagaacccactggctgctggagctcgtgaccacccgcggatccaccggtcggggactctcatacaatttcacccatctggacggatacctcgatctcctgagagagaatcagctgctgccaggatttgaactgatgggttccgccagcgggcacttcaccgacttcgaggataagcagcaggtgttcgaatggaaggacctcgtctcgtccctggcacggcgctacatcggacggtatggcctcgcgcacgtcagcaaatggaacttcgagacttggaatgaaccggaccatcacgatttcgataacgtgtccatgacgatgcagggattcctgaactactacgacgcttgttcagagggactgcgcgccgcctctccggccctcagattgggcggtcctggtgattcgttccataccccacctaggtcaccactgtcatggggtctgctgagacactgtcacgacggcacgaactttttcactggcgaagcaggcgtaaggctcgactacatttcgcttcatcgcaagggggctcgctcgagcatcagcatcctggagcaggaaaaagttgtagcacaacagatccgccaactcttcccaaagttcgccgacactccgatctacaacgatgaagcagacccgctggtggggtggagtctgccacagccgtggagagccgacgtgacttacgccgcgatggtcgtgaaggtgatcgcccaacaccagaatcttctgctcgccaacaccaccagcgcgttcccttacgcattgctgtccaatgacaacgcgtttctttcgtatcatccacaccctttcgcgcaacgcactttgacggctcgcttccaggtgaataacacccgccccccgcacgtccaactccttcggaagccggtgttgaccgcgatggggcttctcgcactgctcgacgaagaacaattgtgggccgaggtttcgcaagccggcaccgtcctcgactccaatcacaccgtgggtgtgcttgcctcagcccatcgccctcaggggccagccgatgcctggcgggccgcggtgctgatctacgcttccgacgatactagggctcaccctaatcggtcagtggcggtcactcttagattgagaggagtgcctcccggacctggattggtatatgtgactcggtacctcgataacggactgtgctcgcccgacggagagtggcggcggctgggtcggccggtgttcccgaccgccgaacagtttcgccgcatgagagcggctgaagatcctgttgcggctgcaccccggccgctgccagccgggggacgtctgactctgcgcccggcactcagactgccgtcactcctgttggtccacgtgtgcgctaggccggagaaaccaccgggtcaggtcaccaggctgcgggcgctgcccctcactcagggacagctcgtgctcgtctggagcgatgagcatgtcggatccaagtgcctgtggacctatgaaattcagttcagccaagacgggaaggcgtacacgccagtatcgcgtaaaccctcgactttcaacctgttcgtgttctctccagacacgggcgctgtgtcaggctcctaccgggtgagagccctggactactgggccagaccgggaccgttttcggatccggttccgtacctcgaagtgccagttcccagaggccctccgtcccctggcaacccg

SEQ ID NO: 4341 - DNA, 1959 bp, Artificial Sequence
  derived and/or modified sequence
atgcgccctcttcgcccgcgcgcggctctgttggcccttctggcctccctgttagctgccccgccagtggcgccggccgaggcgccgcacttggtccatgtcgacgcagctcgtgctctctggcccttacgtcgtttctggcgttcaaccgggttctgtccccctctcccgcacagtcaggccgatcagtacgtgctctcttgggatcagcagctaaacttggcttacgtgggcgcagtaccacacagaggcatcaagcaggtccgcacccattggctgttggaactcgtcaccactaggggatccacgggccgaggcctctcctataatttcactcacctggatggctacctggatctcctgcgcgagaaccagctcctgccgggtttcgagctcatgggcagcgcgagcggccacttcaccgattttgaggacaagcagcaggtattcgagtggaaggacttggtgagctccctcgcccgtcgttacatcggtcgttacggcctggcccacgtcagtaagtggaacttcgagacttggaacgagcccgaccaccacgacttcgataacgtgtcaatgaccatgcagggcttccttaactattacgatgcatgctccgaggggcttcgtgcggcttcgccagcgctccgactgggcggaccgggcgacagctttcacaccccccctcgtagcccgttgtcgtggggcttgcttagacattgccacgacggtaccaacttctttactggtgaggctggcgtccgtctcgactacatttccctgcaccgcaagggcgcgcgttccagcatctccatccttgagcaagagaaagtcgtggcgcagcaaatccgacaactgttccctaagttcgcggacacaccaatctacaacgacgaggccgaccccctcgttggctggtcgctcccccagccctggcgcgccgatgtcacctacgctgctatggtggtcaaagtgattgcccagcaccaaaatctcctgttggccaacacaacttccgctttcccttacgcgttgctctccaacgacaacgctttcctgtcctatcaccctcatcctttcgctcagcgaaccttgactgccaggttccaagtcaacaacacccgtcccccccatgttcaactgctccgcaagcccgtcttgactgccatgggtttgctcgccttgcttgatgaggagcagctctgggccgaggtctcccaggcaggcacagtcctggactccaaccatacggtcggcgtgcttgcctcggcgcacagacctcagggtcccgcagacgcgtggcgcgccgccgtcttgatctatgcttccgatgataccagggcacatccgaaccgttccgtcgccgtcaccttacgtctgcgcggcgtgccccctggacccggtttagtttacgtcacccgctatcttgacaacggattgtgcagcccggatggtgagtggcggcgtctaggccgtccagtcttcccgaccgcggagcaatttcgtcggatgcgggcggctgaagacccagtcgcggctgcgcctcgacctctgcctgccggtggtcgcctcacgctgaggcccgccctgcgtttgccatcattgctactggtccacgtctgcgcccgaccggaaaaaccccccggtcaggtgactcgcttacgcgcgctgcctctgactcagggtcagctcgtcctcgtctggtctgatgaacacgtcggcagcaaatgcttgtggacgtacgaaatccagttctcgcaggacggcaaggcgtatacccccgttagccgtaagccctcgacgttcaaccttttcgttttcagccccgatactggtgctgtgtccggttcctaccgcgtccgtgccttggactactgggctcgaccaggaccgttctcggatccagttccgtacttggaggtccccgttcccaggggcccgccgtcaccgggaaacccc

SEQ ID NO: 4342 - DNA, 1959 bp, Artificial Sequence
  derived and/or modified sequence
atgcgcccgcttagaccccgggccgccttgctggccctcctcgcgtccctcctcgcggcaccgccagtggcgccagcagaagccccccacctcgtgcatgtggacgcagcaagggcgctctggcctctgcgccgcttttggcgcagcaccggattctgcccaccgctcccgcactcgcaagcggatcagtacgtgctgtcttgggatcaacaattgaacctggcgtacgtcggtgcggtcccacaccggggaataaagcaggtgcggactcactggttgctcgaactcgtgaccactagagggtcgactggacgcggactttcgtacaacttcacccatctggacggctacctggacctgctgcgcgagaaccagctgctgccgggcttcgaattgatgggaagtgcaagcggacatttcactgacttcgaggacaagcagcaggtgtttgaatggaaggaccttgtcagctcgcttgcccgccggtacatcgggcgatacgggctggcacacgtctccaagtggaatttcgagacttggaatgagcccgaccaccacgatttcgacaatgtgtcaatgactatgcagggattcctcaactattacgacgcctgctcagaaggactccgggctgcttcacctgccctccgcctcgggggacccggtgactcgtttcacaccccacctagatcaccactgtcgtggggactgctccgccactgccacgatggaacgaatttcttcactggtgaagctggagtgaggttggattacatctcattgcatagaaaaggtgccagatcgagcatctcaatcctcgaacaggaaaaagttgtggcgcagcaaatcagacagctgttcccgaagttcgccgacactccgatctacaacgacgaggccgaccctctggtgggatggagcctcccgcagccatggcgggccgatgtcacttacgccgcaatggtggttaaggtcatcgcgcaacaccaaaatctgctcttggcgaacaccacctccgcctttccgtacgcattgctgtccaatgacaatgccttcctgtcctaccacccgcacccctttgcacagaggactctgacggcgagattccaggtgaacaatactaggcccccgcatgtgcagctccttcgtaagccggtgctgaccgcaatggggctgctcgctcttcttgatgaagagcagctttgggctgaggtgtcccaggcgggaaccgtgctggactcgaaccacaccgttggtgtgttggcatccgcccatagaccacagggaccggcggatgcatggagagccgccgtgctcatctacgcaagcgatgatacgcgggctcaccctaaccgcagtgtggccgttaccctgcggctccgcggagtgccgccggggccggggctggtctacgtgactcgctacctcgataacggactgtgctcaccagatggagagtggcgccggctcggcaggccggtgttcccgactgctgaacagttcagacggatgagagcggccgaagatccagtcgccgctgctcctcgccccctccctgcgggagggcggctgactctgcgtcctgccctccggctcccaagcctgctgttggtgcacgtgtgcgcaagaccggaaaagccgcctggacaggtgactcgcctgagagccctgccgcttacccaaggccagctggtgctggtctggtctgatgaacacgtcggaagcaagtgtctgtggacctacgaaattcagttctcccaggacggtaaggcttacactccggtgtcccggaagccttcgactttcaatctgttcgtgttttccccagataccggagccgtgagcggatcataccgcgtgcgggcgttggattactgggcgcggccgggacctttctcagaccccgtcccgtatttggaggtcccggtgccgagaggccctccatccccggggaatcca

SEQ ID NO: 4343 - DNA, 1959 bp, Artificial Sequence
  derived and/or modified sequence
atgcgccccctgcggcctagagctgcccttttggccctgctcgcctccctgctcgctgcaccgccggtggctccagcagaggcgcctcacctcgtccacgtcgacgctgccagagcgctgtggccgttgcggcggttctggcgctcgaccggtttctgcccaccactccctcatagccaggccgaccagtacgtgctgagctgggaccaacagttgaatctggcttatgtgggcgctgtgcctcaccgcgggatcaagcaggtgcgcacgcattggctgctcgaactcgtgactaccaggggatccactggaagggggctgagctacaatttcacccacctggatggttacctggatctcttgagggaaaaccagctcctgcctggattcgaactgatggggtcggcgtccggacactttacggacttcgaggataagcagcaggtgttcgaatggaaagacctggtttcatcccttgcacgccggtacatcggaagatacggcctggcccacgtgtccaagtggaacttcgaaacctggaatgagccagatcatcacgactttgataacgtgtcgatgactatgcagggatttctgaactactacgatgcgtgctcagagggactccgcgcagcctcacctgccctgagactgggcggcccaggcgactcttttcacaccccgccgcgatcccccctgtcgtggggactgctccggcattgccatgacggaaccaatttcttcactggtgaagctggagtgcggctcgactatatctcgctgcataggaagggcgcacggagctcgatctctatactcgagcaggaaaaggtcgtggcgcagcagatccgccaactgttcccaaagttcgctgacactccgatctacaacgacgaggccgatcccctcgtcggttggtccctgccgcaaccgtggagagccgatgtcacttatgcagcaatggtggtcaaagtgattgcgcagcatcaaaaccttctgctggcaaataccacctcggccttcccatacgccctgctgagcaatgacaacgccttcctgagctaccacccccacccgttcgcgcaacggactctgaccgcgcggttccaggttaacaacactaggccgccgcatgtccagttgctgcgcaagccagtgctgaccgcgatgggacttcttgcgcttctggatgaggaacaactgtgggcggaagtgtcccaggcgggaaccgtgctcgactcaaaccacactgtcggggtcctggcaagcgcccatcgccctcaaggccccgctgacgcttggcgcgcagccgtcttgatctacgcgtctgatgacacccgggcccacccgaacagatcggtcgctgtcacgctgagactcagaggtgtgcctccgggaccgggactggtgtacgtgacccggtacctcgacaatggactgtgcagcccagacggagagtggcgcaggctcggacgtccagtgtttcccaccgcagaacagtttcggaggatgagagcagcggaagatcccgtggcagccgcccctcgacctctgccagcgggagggcggttgaccctgcgcccggcactcaggcttccttcgctcctcctggtgcacgtctgtgcgcgcccagaaaagccgccagggcaagtgacgcgtctgcgcgctttgcccctcacccaaggacagctcgtcctggtttggtcagatgagcacgtgggatcgaagtgtctgtggacctacgagattcaattttctcaagatggaaaggcatacacgccagttagcaggaagccgtccactttcaatttgtttgtgttctctccggatactggggccgtctcaggtagctacagggtgcgggctctggactactgggcgaggccgggtcctttctcggaccctgtgccgtatttggaagtgccggtgccaagaggaccgccctcgcccggaaacccg

SEQ ID NO: 4344 - DNA, 1959 bp, Artificial Sequence
  derived and/or modified sequence
atgcggccgctgagacctcgcgcagcacttctggctctcctcgcgtctctcctagcggccccgcctgtggctccagctgaggcgcctcatctggttcacgttgatgctgcacgcgccctttggcctctgaggagattctggcgctccacaggtttctgccctcccctaccccactctcaggccgaccagtacgtgctctcatgggaccagcagctaaacttggcctacgtgggggcagtaccgcatagaggaattaaacaagttcgcacacactggcttctggaactcgtgaccacacgggggagcactgggcgcggactcagttataatttcacccatctggacggctacctggatctgctgcgagagaatcagctgctaccaggcttcgaacttatgggctcagctagcggccacttcacagattttgaggacaagcagcaggtattcgaatggaaggatctcgtatcatccctcgcacgacgatacatcggacggtacggtttggcgcacgtgtcaaaatggaactttgagacatggaacgagcctgatcaccacgatttcgacaacgtgagtatgaccatgcagggatttctgaactattatgatgcgtgttcagaagggctgcgggccgcaagtccggcccttcggctgggaggacctggggattcctttcatacccctccacggtcccctctttcatggggactgctgaggcactgccacgacggtaccaattttttcaccggcgaggccggggtgagactggattacatctccctccacagaaaaggcgcgagaagtagcataagcattctggagcaagagaaggtagtggcccagcaaatccgtcagctgttccccaagttcgccgatactccgatttataacgatgaggcagatcccttggtagggtggagtctcccacagccttggagagcagatgtcacatacgctgcgatggtcgtaaaagtcatcgcacaacatcagaatcttctgcttgcaaatactacctctgcctttccatacgccctgctaagtaatgacaatgccttcctctcctatcatccccacccatttgctcaaagaaccttgacggcgcggttccaggtaaacaacactcggccaccccacgtgcaactacttagaaagccagtactcaccgccatgggcctgctggcactgctggatgaagaacagctttgggcagaagtcagccaggccggcaccgttctagattccaatcacacagtgggcgtgctggctagcgcacaccggccgcaaggtccagctgatgcttggagagcggccgtcctgatctacgcaagtgatgacacaagggcacatcccaacagaagtgtcgcggtgaccttaaggctgcggggcgtgcctccaggaccgggcctggtgtacgtaactagatatctcgataacggcctctgctctcccgacggtgaatggagacggttgggacggcctgtgtttcctacagcagagcagtttaggcggatgagagccgccgaggaccctgttgctgcagcgcctaggccacttccagctggcggtcgccttacattgaggcccgcgctgagactgccttccctgttactagtacacgtgtgcgcccgccctgagaagcccccgggtcaggtgacaaggctgcgggcactgccattaacccaaggacagctggtgttagtgtggagcgacgagcatgtggggtccaaatgtctctggacctatgagattcagttctctcaagacggcaaggcctacacgcctgtatcccgcaaacctagcaccttcaatctgttcgtattcagtccagatacaggggctgtttctgggtcttaccgtgtgcgtgccctggattattgggcccggcccgggccctttagcgaccctgtgccttatctcgaggttcccgtgcctaggggccccccctctccaggcaatccg

SEQ ID NO: 4345 - DNA, 1959 bp, Artificial Sequence
  derived and/or modified sequence
atgagaccattaagacctagagcagcattattagccttacttgcaagtttacttgcagctccaccagttgcaccagctgaagcaccacatttagttcatgtagacgctgctagagctctttggccattacgtaggttttggcgtagtactggattttgtccaccattaccacattcccaagctgatcaatatgttctttcatgggaccaacaattaaaccttgcttatgttggagctgttcctcacagaggtattaaacaagttagaacacattggcttcttgaattagtaacaacaagaggttcaacaggaagaggattatcatataattttactcatcttgatggataccttgatctacttagagaaaatcaattattgccaggttttgaacttatgggatctgcatctggacattttactgattttgaagataaacaacaagtttttgaatggaaagatcttgttagttcattagctagaagatatattgggagatatggattagcacatgtaagtaaatggaatttcgaaacatggaatgaaccagatcatcatgattttgataatgtttcaatgaccatgcaagggtttcttaattattatgatgcatgtagtgaaggattaagagcagcaagtccagctttacgtcttggtggaccaggagattcatttcatactccaccacgttcaccattgtcatgggggcttttgagacattgtcatgatggaacaaattttttcactggtgaagctggagttagattagattatatttcattgcatagaaaaggtgctagaagttcaattagtatacttgaacaagaaaaagtagttgcccaacaaattcgtcaattatttccaaaatttgctgatactccaatttataatgacgaagcagatccacttgttggatggagtcttccacaaccatggagagcagatgtaacatatgctgcaatggttgttaaagtaattgctcaacatcaaaatttactcttggcaaatactacaagtgcatttccttatgctttactttctaatgataatgcttttttatcttatcatccacatccatttgcacaaagaacattaactgctcgatttcaagtcaataatacaagaccaccacatgttcaattgttacgtaagccagttcttacagcaatggggttattagctttattagatgaagaacaattatgggctgaagtttcacaagccgggaccgtattagattcaaatcatacagtaggggtacttgcatcagctcataggcctcaaggaccagcagatgcttggagagcagctgtacttatttatgcttccgatgatactagagctcatcctaatagatcagttgcagtaacattaagattaagaggagtaccaccaggaccaggattagtttatgttacaagatatcttgataatggtttatgtagtccagatggagaatggagaagacttggaagaccagttttcccaacagctgaacaatttagaagaatgagagcagctgaagatccagtagctgcagcacctagacctttacctgctggtggtagattaacattgagaccagcattacgtttaccatcattacttttagttcatgtttgtgctagaccagaaaaaccacctggtcaagtaactagacttagagcattaccacttacacaaggacaattagtgctagtttggagtgatgaacatgtaggaagtaaatgtctttggacatatgaaattcagtttagtcaagatggaaaagcttacactccagtcagtagaaaaccatcaacatttaatctttttgtattttctccagatacaggtgcagttagtggatcctatagagtaagagcacttgattattgggcaagaccaggaccattttcagatccagttccatatttagaagtaccagtaccaaggggacctccatcaccaggaaatcca

SEQ ID NO: 4346 - DNA, 1959 bp, Artificial Sequence
  derived and/or modified sequence
atgcgacctctgcgcccacgagccgcattgctggcactgctggcctcgttgctggcggccccgcccgtggccccggcagaggcaccccatcttgtgcatgtggacgccgcccgcgccctgtggccacttagaagattctggcgatcgactggattctgcccaccgctgcctcattcccaggcggaccaatacgtcctgtcgtgggaccagcaattgaatcttgcctacgtgggggcggtgccacaccggggaatcaaacaagtcagaacccactggctgctggagctggtgactacccgcgggtctactggaagaggcctgtcgtacaacttcacgcatctcgacggatacctggacttgctccgcgagaaccagctcctcccgggtttcgaattgatgggatcagcgtcgggccacttcacggacttcgaggacaaacaacaggtgtttgaatggaaggaccttgtctcgtcgctggctaggcgctacattggacggtacgggctcgcgcacgtgtcgaagtggaatttcgaaacctggaatgaacccgatcatcacgacttcgacaatgtgagcatgactatgcagggtttccttaactactacgatgcatgctccgaaggactgagagccgcctccccagccttgaggttgggaggccccggcgactcctttcacacccctcctagatcgccgctgtcatgggggcttctccgccattgccacgacggaaccaacttctttaccggagaagcgggagtcagactcgattacatttcgctccaccggaagggcgcccgctcctcaatctccatcctcgaacaggagaaggtggtggcgcagcagatccggcaacttttccctaagttcgctgatactccgatttacaatgacgaagccgatccgctggtgggctggtcccttccgcagccgtggcgggcggatgtgacctacgccgcaatggtcgtgaaagtcatcgctcagcaccaaaaccttctgctggccaataccacttccgcatttccgtacgcactgctgtcgaatgataacgctttcctctcgtaccacccgcatcctttcgcacagcgcaccctgaccgctcggtttcaggtgaacaacacccggccgccgcacgtccaactgctgcggaagccggttttgacggccatgggtctgctggcgctgctggatgaggagcagctgtgggccgaagtgtcacaggccggaaccgtgctggatagcaatcacactgtgggcgtgctcgcttctgctcacagaccccagggccctgcggacgcctggcgggccgctgtcctcatctacgctagcgacgatacccgcgcgcatccgaaccggtcggtggctgtgaccttgcgccttcggggagtgccacctggacctggtcttgtctacgtgactagatacctggacaacggactctgctccccggacggagaatggcgccggctgggacggccagtgttccctacggccgaacaattccggaggatgcgggccgctgaagatcctgtggcggctgcgcctcgccctttgccggcgggaggacggttgacccttcggccggctctgcggctcccatcactcctccttgtgcacgtgtgcgcgcgcccagaaaaaccgcctggacaggtgactcgcctgcgcgcgttgccactgactcaagggcagctggtgcttgtgtggtccgacgagcatgtggggtcaaagtgcctgtggacctacgaaatccagttctcccaggatggtaaggcctacactccggtgtcgcggaagccgagcactttcaacctgttcgtgttcagcccggacaccggggccgtcagcggctcgtaccgggtgcgggctctggactactgggcgcgcccgggaccattctcggacccggtgccctatctcgaagtgccggtgccgcgcggtcctccatcaccagggaatcct

SEQ ID NO: 4347 - DNA, 1959 bp, Artificial Sequence
  derived and/or modified sequence
atgcggcccttgagaccacgggctgctctgcttgccctgctggcatctttgcttgcagcccctcctgtcgccccagctgaggctccacacctggtgcacgtcgacgccgcccgcgccctttggccactcagacgcttctggagaagcactggcttctgtcccccgctaccacattcacaggcggaccagtatgtactgtcttgggaccagcaacttaatctcgcctatgtcggcgcggtaccccacagggggatcaagcaggtaagaactcactggctccttgaactggtgaccactagagggagcaccggacgcgggttgtcttacaactttacacatctggacggttacctggacctccttcgagaaaatcagctccttcctggttttgagctcatgggatcagccagtggtcactttacagacttcgaggacaaacagcaggtgtttgagtggaaagatcttgttagttctttggcccggaggtacataggtcggtatggcctcgcccacgtcagcaagtggaacttcgagacctggaacgagccagaccaccacgacttcgataatgtatccatgactatgcaaggctttttgaactactacgatgcttgctctgagggcctgcgcgcagcgtctccggcgcttcggctcggtggcccaggggatagttttcacactcccccccggagtccattgtcttggggtctcctccgtcactgccacgacgggacgaactttttcacgggtgaggctggcgttcgcctcgattacatctctctccatcgcaagggtgccagatcgtccatcagcatccttgaacaggagaaggtggtcgcacagcagatcaggcaacttttcccaaaatttgctgacactcctatctataacgacgaagcagatccactagtgggctggtcactcccacaaccatggagagccgacgtgacgtatgccgccatggtggtcaaagtcattgcccagcaccagaatctcctgctcgcgaatacaacctcagcatttccgtatgccctcctatccaacgacaacgctttcttgtcataccacccgcacccgttcgcgcagagaacgctgacagctcgatttcaagtgaacaatacaaggccacctcacgttcagctgctgagaaagccggttttgacagcgatggggctgcttgcactgctggacgaggaacagctatgggccgaagtttcccaggccggcaccgtgctggatagcaatcacaccgtcggagtgctcgcttctgcccaccgcccccaggggcccgccgacgcatggcgcgcggccgtgctgatatacgctagcgatgacactagggcacatccaaaccgctccgttgctgtcaccttgagattgaggggagtgccacccggccctggtttagtgtatgtcactaggtacctcgacaatggcttgtgctctcctgacggtgagtggcgcaggctggggcgccctgtcttcccaacagctgaacagttcagacgaatgcgagccgccgaagatccagtcgccgccgcaccccgccccttacccgccggagggcgcctgactctcagaccagcactacggctgccctctctgctgctggtccatgtgtgcgccagacctgaaaaaccgcccggccaagtgacaagacttcgagctctccccctcacccagggacaattggttctggtttggagcgatgagcatgtgggctctaagtgcctttggacctacgagattcagttttcgcaagatgggaaggcatatacacctgtgtccaggaagccatcaaccttcaatttgttcgtttttagcccagataccggtgctgtgtctgggagttatcgcgttcgggctctcgattactgggctaggcctgggcctttttccgaccctgtgccatacctcgaagtgcccgttcctcgagggcccccatcgcccggaaatccc

SEQ ID NO: 4348 - DNA, 1959 bp, Artificial Sequence
  derived and/or modified sequence
atgcgcccgctcaggcctagagccgcattgcttgccctcctcgcctcgctgcttgcggccccgccggtggcgccagccgaggccccgcatctggtgcatgtggacgcggcccgcgccctttggcccctgagacgcttctggcggtcgactggcttttgtccgcctctgccgcattcccaagccgaccagtacgtgctctcctgggaccaacaactgaacctggcatacgttggagcagtaccgcatcgcgggatcaagcaagtgcgaacccattggctcctggaactcgtcactactcggggatcaaccggtaggggactgtcgtacaacttcactcatctggacggctacctggacctgctgcgagaaaaccagcttttgccgggtttcgaactcatgggctcggcctccggacacttcaccgacttcgaggataagcaacaagtgttcgagtggaaagaccttgttagctcattggctagaagatatatcggtaggtacggtctggcgcacgtgagcaagtggaattttgagacttggaatgaacctgatcaccacgactttgataatgtctccatgactatgcagggatttctcaattactacgacgcttgctccgaaggattgagggccgcgtcgccggcgctccggctgggaggcccgggggactcctttcacacgcccccacgctcaccgctgagttggggactgctccggcactgccacgacggcactaacttcttcaccggggaggcaggtgtccggttggattacatatcgttgcatcgaaaaggggcacggtcatccatctcaattctggaacaggaaaaggtggtggcccaacagatcagacagctcttccctaagttcgctgacacgcctatctacaacgatgaggccgaccccctcgtgggatggtcgctgccacagccatggagagcggatgtgacctacgcagccatggtggtcaaggtcatcgcgcagcaccagaacctcctcttggcaaacaccacttcggcgttcccatacgctctgctctccaacgacaacgcattcctgtcttaccacccgcatccgttcgcccagaggacgctgaccgctcgcttccaggtgaacaataccaggccgccgcacgtgcaactgctcaggaaaccagtcctgactgcgatgggacttctggcgcttttggacgaagagcaactgtgggcggaggtcagtcaggccggaaccgtcctggattccaatcacaccgtgggcgtgctcgcgagtgcacacagaccgcaggggccggcagatgcatggcgggctgccgtgctgatctatgcatcagatgatactcgtgcccaccccaatagatcagtggctgtgactctgcggctgcgcggggtcccgcctggaccgggcctggtgtacgtcacccggtacctggacaacggtctgtgctcgccggacggagaatggcgccggctgggacgccccgtgttccctactgctgagcaattccggagaatgagagcagcggaagatcccgtcgctgccgcgccaagaccacttccagctggaggtcgcctgactctcagaccggcgctgagacttccttcattgctgctggttcacgtgtgtgcccgcccggagaagcctcctggtcaagtaactcggctgcgggccttgccgctcactcagggccagctggtgctcgtttggtcagacgagcatgtgggctcgaaatgcttgtggacgtacgaaattcagttctcacaggatggtaaggcctacacccctgtgtccagaaagccaagcactttcaacttgtttgtgttttccccggacacgggagcagtctcgggctcttatagagtgcgggccctcgattactgggcccgcccgggaccattctcggatccggtcccatacctggaagtgcccgtgccgagaggcccgccatctcccggaaatcca

SEQ ID NO: 4349 - DNA, 1959 bp, Artificial Sequence
  derived and/or modified sequence
atgcgtccactgcgaccacgcgctgcactcctggcactgctggcaagtctgcttgccgcaccgccagtcgccccagctgaagccccgcatctggtgcatgtggacgcggctcgggcactctggccactgcgaaggttttggcgttcaacgggcttttgcccaccgctgccacattcgcaagcggatcaatatgtcttgagctgggaccagcagctaaacctggcttacgtgggagccgtgccccatcgcggaataaagcaggtacgcacccactggctgctggaactggtcaccactcgcggatcgactggccgtggcctgtcctataatttcacgcacctggatggttacctggacctattgcgggaaaatcagctcctcccgggcttcgagctcatgggaagtgcctcaggacatttcaccgattttgaggacaagcagcaggtctttgagtggaaggatctcgtttcctccctggcccgacgttatattggaaggtatggattggctcacgtgtcgaaatggaatttcgagacgtggaatgagccagaccaccacgactttgataacgtgagtatgacaatgcaaggattcctaaactactatgatgcctgctcggagggactgcgcgccgcttccccggctctgcgccttggaggtccgggtgacagcttccacacgccgccgcgctcgcccctcagctggggcctcctacgacattgccacgacggaaccaactttttcaccggcgaggcaggtgtgcgtttggattacatcagcttacaccgaaaaggcgcgcgcagctccatttcaatcctcgaacaggagaaagtcgtcgcccagcagatccggcagttgtttcctaagtttgcggataccccaatatacaacgatgaggcagaccctttggtgggctggtcgctcccccagccgtggcgagctgatgtcacgtacgccgcaatggtcgtaaaagtcatagctcaacatcagaatctcctgttggctaatactacatcagcctttccctacgccctgctcagcaacgataatgcctttctgtcctaccacccccacccttttgcccagagaactctgaccgctcgttttcaggtgaataatacccgaccgccgcatgtccagcttctccggaagccagttttgaccgctatgggcttgttggctttattggatgaggaacagctttgggctgaggttagccaggcgggaacggtattagactctaaccacaccgtgggagtcctggcgtccgcgcaccgtccccaaggccccgccgacgcctggcgtgctgcggtcctcatttacgccagcgatgacacgcgcgcgcacccaaacaggtctgtggcggtgaccctccggctgaggggagtacccccaggacccggcctagtctacgttacgcgctatctcgataacggcctgtgcagtccagacggcgaatggagacgcttgggccgacccgtttttccaacggctgagcaattccgtagaatgcgcgcagccgaagaccccgtggcggccgcgccaagaccgcttccagcaggtggtcgactcacccttcgacccgccctgcgactgccatcattgcttctcgtccatgtttgcgcccgccccgagaagccgcccggacaggtgacaaggttgcgggcgctgcccttgacgcagggtcagctggtgctggtctggagtgatgagcatgtgggttcgaagtgtttgtggacttacgaaatacaattcagccaagacggtaaggcatacacccccgtgagcaggaagccctctacattcaatctatttgtgtttagcccagacacaggtgcagtttccggcagctaccgtgtgcgagcgttggattactgggctaggcccggaccattctccgacccggtgccctacctggaggttcccgttccgcgcggtccgccaagccccggtaatccg

SEQ ID NO: 4350 - DNA, 1959 bp, Artificial Sequence
  derived and/or modified sequence
atgcggccactccggccccgagcggccctcttggccttgcttgcaagtctgctcgctgcgcccccagtggcccccgctgaggcacctcacctcgtacatgttgacgcggcccgcgcactgtggccattgaggcgcttctggaggagtaccggcttctgtccaccactgcctcatagtcaggcagatcagtacgtgctcagctgggatcagcagctgaacctcgcttacgttggcgccgtgcctcacagagggatcaagcaggtgaggacccactggctgttggagctggtcacaacccgcgggtccaccgggcggggcctcagttacaacttcacccacttggatggctatcttgacctgctgcgagagaaccaactcttaccaggattcgaattgatgggatcggctagcgggcactttaccgactttgaggacaaacagcaggtattcgaatggaaggacctagtcagctcattggctcgcaggtacattggcaggtatggcctcgcccacgtgagcaagtggaatttcgagacatggaacgaacccgaccaccacgatttcgacaatgtgtcaatgaccatgcaggggttcctaaattattacgacgcttgttcggaagggctgagggcagcgagccctgctctgcgtctgggtggaccaggggactctttccacacgcccccccggtcgccgctgtcctggggcttacttcgacactgtcacgacggcaccaatttcttcactggggaagcaggggtaagactcgactatatcagtctccataggaaaggcgcccggagctctattagcatacttgagcaggagaaggtggttgctcagcagatccgccaactctttcctaagttcgcagatacaccaatttataatgatgaggcagatccgcttgtaggatggtctctcccacagccctggagggctgatgtgacttacgccgctatggtggtgaaggttatcgcccagcaccagaatcttttgctcgctaatacgacatcagcttttccctatgctcttctgagcaacgacaatgcgttcctcagttatcacccacatcctttcgctcagcgaaccctgacagccaggttccaagtcaataacacgagacctccacacgtgcaactgctgcgcaagccggttctcaccgcgatgggattactcgcccttctggacgaagaacaactgtgggccgaagtgtctcaagctggtacagtgctggattcaaatcataccgtgggcgttctggcttcagcccacagacctcaaggccctgccgatgcttggcgtgctgccgttttaatctacgctagtgatgatacccgagcgcatcccaacagatctgtggcagttacactccggctacgcggggtgccaccaggaccagggctggtttacgtgacccgctatctcgataacggactgtgcagcccggacggagaatggcgaagactggggagacctgtcttcccaacagcagagcagttcaggagaatgcgcgctgccgaagacccagttgcagcagccccgcgcccgttgcccgccggagggcgtctgacgttgcgaccggcccttagattgccaagtctgctgcttgttcatgtatgcgcaagacccgagaaaccccccgggcaggtgactcgtctccgcgcactcccactcacacagggccagcttgtgctggtctggagcgatgaacacgtcggctcaaagtgcctttggacctacgaaatccagttctctcaggatggcaaggcttacactcctgtgagtagaaaaccaagcaccttcaacctgtttgtgttcagtcctgacacaggagcggtgtcaggatcgtaccgcgtccgggccctcgattactgggcccgcccaggccctttttcagacccagttccctatctggaggtcccagtaccaagagggcctccttcccccggaaatccc

SEQ ID NO: 4351 - DNA, 1959 bp, Artificial Sequence
  derived and/or modified sequence
atgcgccccctcaggccaagagccgccctcttggctctgctggccagcctcctggcagcccctcccgttgctcctgctgaagcaccccacttggttcatgttgatgcagccagggccctgtggccacttaggaggttttggagaagtaccggtttctgcccccctctgcctcacagtcaagctgaccagtacgtgctgagttgggaccagcagcttaaccttgcctatgtaggcgcggtgccccatagaggtatcaagcaagtgcgcacccattggctgctcgagctggtaactaccagaggttcaactggtcgcggcttgtcttacaatttcacccacctcgacggatacctcgatttgctgcgcgaaaaccagcttctccctggcttcgagctgatgggaagcgcctcaggccacttcactgacttcgaagacaaacaacaggtgttcgagtggaaagatctggtctcttccttggctcgcagatacatcggaaggtacggcctggcccacgtgtcaaagtggaacttcgaaacctggaacgaaccagaccaccatgacttcgataacgtatccatgaccatgcaaggattccttaactactatgacgcgtgctcagagggcttgagggcagcaagccccgccctccgcttgggtggccccggcgacagctttcacactcccccaaggagcccgctgagctggggtcttctgagacattgtcatgatggcactaacttcttcaccggagaagccggagtgcgcctggattacatctccctgcacagaaagggcgctcgcagctccatcagcattctggagcaggagaaggtcgtcgcacagcagatcaggcagctcttcccaaaatttgctgatactccgatttataacgacgaggctgaccccctggtgggctggtcccttcctcaaccctggagggctgacgttacctatgcggctatggtagtcaaagtcatcgcccagcatcagaatttgcttcttgcaaacaccactagcgcttttccctacgcactgttgtcaaacgacaatgcctttctgtcataccacccccaccccttcgcccagaggaccctcaccgccaggtttcaggttaacaatactaggcctccgcatgttcaacttctgagaaagccggtactcaccgctatgggactgctggccctgctcgacgaagaacaactgtgggcggaggtcagtcaggccggcactgtgctggatagtaatcatacggtgggcgtcctcgcttctgcccatcgccctcagggtccggcagatgcatggcgcgccgccgtactcatctacgcctccgacgataccagggcccaccccaatcgctcagtggctgtcacgctccgcttgcgcggcgtgccccccggaccaggtctggtgtacgtgactcgctacttggacaatggtctgtgttccccagatggtgagtggagacgcctgggtcgcccggtctttccaaccgccgagcagtttaggagaatgagggccgctgaggatcctgttgctgcagccccgcgccccctcccagctggcggaaggttgacactcagacctgctctgagactcccaagcctcctcctggtgcatgtgtgcgcaaggcccgagaaaccacctggacaagtgaccagacttagggcactgccactcacccaaggccagctcgtgcttgtttggtcagacgaacacgtcggttccaaatgcctgtggacctacgaaatacagttctcacaggacggcaaggcctacacccctgtgtccaggaagccaagtactttcaacctgttcgtgttttctcccgacacgggtgccgtgagcggctcctatcgcgtgcgcgctcttgattactgggctcgccccggacctttctccgacccagtgccttacttggaggttcccgtcccgcgcggacctccttcccctggtaacccc

SEQ ID NO: 4352 - DNA, 1959 bp, Artificial Sequence
  derived and/or modified sequence
atgcgtcctctccgcccccgggcagcccttctcgctcttctggcgtcccttcttgcagctccaccagtggcacctgcagaagctccccatctcgtgcatgtggacgcagcgcgcgccctctggccgctccggaggttttggcggtcgactggattctgccctcctctgccacattctcaagccgatcaatacgtgcttagctgggatcagcaactgaaccttgcatacgtgggggcagtgccgcaccgcggaatcaagcaggtgcgcacccactggctccttgagctggtcacgactagaggctcgaccgggcgcggactcagctacaacttcacccatctcgatggttacctggacttgcttagagaaaatcagctgttgcctggttttgaactgatgggatccgcgagcggtcattttacggacttcgaggacaaacagcaggtgtttgagtggaaggatctcgtgtcgagccttgctcgccgttacattggccgctacgggttggcacatgtctcgaaatggaattttgaaacctggaatgaacctgatcatcatgactttgataatgtgtcaatgaccatgcaaggtttcctgaattactacgacgcgtgtagcgaaggactgcgagcagcatcgccagcactcagactgggaggtccgggtgactcctttcatactccacctcgctcgcctctttcgtggggacttctccggcattgtcatgacggcaccaatttctttaccggagaggcaggagtgcgcttggactacatttcgctgcatagaaagggtgcgaggtcgtcgatctccattctggaacaggagaaggttgtcgcgcaacagataagacagcttttccccaaatttgcagatactccaatttacaacgatgaagctgatccacttgtggggtggtcactcccacagccttggagagcagatgtgacctacgcagcgatggtggtgaaggtgatagcccaacaccaaaatctcctccttgcaaacacgacttcggctttcccctatgcccttctgagcaacgataacgcattcctctcgtaccatccccaccctttcgcacaacgcactctgaccgcacggtttcaggtcaacaacactaggccaccacatgtgcagcttttgcgcaaacctgtgctcaccgcaatgggactgctggcactgcttgatgaagagcaactttgggcagaagtctcgcaagccggtaccgtgctggactcaaaccatactgtgggagtgcttgcatccgcacatagaccccaaggtcctgctgatgcatggcgggctgcagtcctgatttacgcctccgacgacaccagagcccaccctaatcgctcagtggccgttacccttagactcaggggagtgcctcctggcccaggactcgtgtacgtgactcgctaccttgataatggactctgctcgcctgacggtgagtggcgacggctgggtagaccagtgtttcccactgcggagcagtttcggcgcatgagggcggcagaggatccagtcgcggccgcgcctaggcctctgccggcaggcggtagacttacgctgcggcccgccctgaggctgccatccttgttgcttgtgcatgtgtgcgcgcgtcccgaaaaacctcctggacaggtcacccgccttagagcacttccacttactcaaggacagcttgtccttgtgtggagcgatgaacatgtgggttcgaagtgcctgtggacctatgaaattcaattttcacaggatggaaaagcatacacccctgtctccaggaagccgtccacctttaatctttttgtgttttcccccgacaccggagcagtctctggaagctacagagtgcgggcactggattattgggccaggccaggaccctttagcgatccagtaccataccttgaagtcccagtgccacgaggccctccatcacccggaaacccc

SEQ ID NO: 4353 - DNA, 1959 bp, Artificial Sequence
  derived and/or modified sequence
atgaggccacttcgtcctcgggcagcactgttagcactccttgcttccctgttagctgctccccctgtcgctcctgcggaagctcctcacctcgtccacgtggacgccgccagagccctttggccactgagacgattttggcggtctacgggattttgtcccccactgccccacagccaggctgatcaatacgtcctgagttgggatcaacagttgaacttagcatacgtgggggccgtgccccatcgcggcattaagcaggtcagaactcattggctgctggagctggttaccacacgcgggtctactggacggggattatcatataactttactcatcttgatggctacctggatcttctgagagaaaatcagcttttgcccggcttcgagttgatgggctcggcgtccggacactttacagactttgaggacaaacaacaggttttcgaatggaaggacttggtttcttctttggcccggaggtacatcgggcgttatggcctcgctcacgtttccaagtggaactttgaaacgtggaacgaaccagaccatcatgattttgataacgtgtcaatgacgatgcaggggtttttaaactattacgatgcttgtagtgagggcttacgcgctgcttccccagctctgaggttaggtggcccgggcgatagcttccataccccgcctaggtctcccctgagctggggactgctgagacactgccacgacggtacaaacttctttacgggtgaggcaggagtacgtcttgattatatctctctgcacaggaaaggagctaggtcctctatctcaattctggagcaagagaaggtggtcgcccaacaaatccggcagcttttccctaaatttgctgatactccaatttataatgacgaggcagatccactggtgggttggagtttgccacaaccatggagggccgatgtcacatatgccgctatggtcgtgaaggtcattgcccagcaccagaacttactccttgctaacacaacatctgcctttccttatgcactcctgagcaacgacaatgctttcctaagttaccatcctcatccattcgctcagcgtactctcacggctaggttccaggtgaacaatacccggcccccgcatgtccaactcttgcgaaagcccgtactaaccgctatgggcctgcttgctctgttggacgaggaacagctctgggccgaggtgagccaggctggaacggtactcgattcgaaccatacagttggtgttctggcctcagctcatcgcccccagggccccgcagacgcatggcgggcggcagttctgatatatgcgtcggatgatacccgggctcatcctaaccggagcgtcgccgtaaccctcagactgcgaggggtgccgcccggcccaggcttagtttacgtgactcgataccttgacaacggcttgtgtagtcccgacggagagtggaggagactcgggagacccgtcttccctacagccgagcagttcaggaggatgcgggctgcagaggacccagtggccgcagcaccaagaccacttcccgcaggtggccgtctgaccttacgcccggcattgcggttaccctctcttctcctcgttcacgtgtgcgctcgaccggagaaaccacccgggcaggttactagactccgggcgctgcctctgacacagggccagttggtgctggtctggtccgatgaacacgtaggcagcaaatgtctctggacgtacgagattcagttttcacaagatggcaaggcatacacacccgtttccagaaaacctagcacttttaacctgttcgtcttttcaccagatacaggggctgtcagtggatcttatagagtccgggccctagactactgggcgagaccaggccccttcagtgatccagtgccatatttagaggtcccagtccctagggggccgccctcaccaggtaaccct

SEQ ID NO: 4354 - DNA, 1959 bp, Artificial Sequence
  derived and/or modified sequence
atgcggccgcttaggccccgcgccgccctcctggcactgctggcatcccttttggcagctccaccagtggctcctgcagaggcacctcacttggtgcatgtggatgcagcaagagcactgtggccgctgcggagattttggcgaagcaccggattctgtccaccacttccacattcccaagccgatcagtacgtccttagctgggatcagcagctcaatttggcttacgtcggggcagtccctcatcggggaattaagcaggtgagaacccattggcttctggagttggtgactactcgtggttcgaccgggcggggactctcatacaacttcactcatctggatggttaccttgaccttctgcgtgaaaatcagcttcttccgggatttgagctgatgggttcagcctcggggcattttactgacttcgaagataagcagcaggtctttgaatggaaggatctcgtgtcgtcactggcgaggagatatatcggacggtacgggctggcacatgtgtcgaagtggaactttgaaacttggaatgagccggatcatcacgattttgataatgtgtccatgaccatgcagggtttcctgaactactacgacgcatgcagcgaaggactccgtgcggcctcgcccgcgctgcgactcggcgggccaggtgattcattccacactccacctcggtcaccacttagctggggattgctgagacattgccatgacggtaccaacttctttacgggcgaagcaggggtcaggttggactacatctccttgcatcgtaagggtgcaagatcgtcaattagcatcctggagcaagagaaggtggtggcgcaacagattaggcaactttttcctaagtttgcggacactcctatttacaacgacgaagcagatcccttggtgggctggagcctgccccaaccgtggcgtgcagatgtcacttacgccgcaatggtcgtgaaggtgatcgctcaacatcagaatcttttgctcgccaataccacctccgctttcccgtacgccctcctctcgaacgacaatgcgtttctgagctaccaccctcaccctttcgcccagcgtactctcaccgcaagatttcaagtcaacaacactaggcctcctcatgtccaacttcttcggaaacctgtgctgactgcaatgggccttcttgcccttcttgatgaggagcaattgtgggccgaggtttcgcaggcgggaaccgtccttgactcgaaccatactgtgggagtccttgcttcggcacaccgcccccaagggccggctgatgcatggcgagcagcagtgttgatttatgcatccgatgatacccgagcacaccccaataggagcgtcgcagtgaccctcagacttagaggagtgccgcctggacctgggctggtgtacgtcacgcgttacctcgataatggtctttgttcaccagatggagagtggcgtagacttggtcggcctgtgttccccaccgcagagcaattccgtcggatgcgcgcggcagaagatcctgtggctgccgcccctcggcctctgcctgccggaggcaggcttactctgcgccccgcgctcaggctcccatcgctcctcctggtccatgtgtgtgctcgaccagaaaagccaccaggtcaggtcacccggctcagagcacttcctctgacccagggacagcttgtgctggtgtggagcgacgaacatgtgggttccaaatgtctttggacttacgaaatccaattctcgcaagacggtaaggcctacacccctgtgtcgagaaagccctccacctttaacctctttgttttctcccctgataccggggcagtgtcgggatcgtacagagtgcgggcactggactactgggcaaggcccggtccattctcagatccggtgccttacctcgaagtgcccgtgcccagagggccgccatcaccaggaaaccca

SEQ ID NO: 4355 - DNA, 1959 bp, Artificial Sequence
  derived and/or modified sequence
atgcgacccttacgcccccgggccgccctgctcgccctattagcatccctgctggcggctccacccgtggctccagcagaggccccgcatctcgttcacgtagatgccgccagggcactatggcctctgcgcagattctggcggtcaaccggcttttgtccaccgctaccccattcacaggccgatcaatacgtgttgagctgggaccagcaactcaacctagcgtatgtgggggcagtgccacaccgcgggatcaaacaggtacgcacccactggctactagagctggtaaccaccagggggtcaaccgggcgcgggctttcatacaacttcacacacttggatggctaccttgatcttttacgggagaatcagcttttaccgggctttgagcttatgggcagtgctagcggtcattttacagacttcgaagacaaacagcaggtgttcgagtggaaggacctggtatccagcctggctagacgatatataggacggtatggccttgctcacgtgtcaaagtggaatttcgagacatggaatgaaccagatcaccacgactttgataatgttagcatgaccatgcaggggttcctgaactattatgatgcctgctccgaaggtctgagggccgcatcccctgcactgagattgggaggcccaggcgactcttttcatactcctccgcggtcaccattaagttggggcctgctgcgccattgtcacgacggcactaactttttcaccggggaagcgggagtacgcctcgactatatatcactccacagaaaaggcgcccgttcttccatttccattctggagcaggaaaaggtagtagctcagcaaatcagacagctgttccccaaattcgccgacaccccgatctataacgatgaggccgaccctcttgtcgggtggtccctgccacagccgtggagagcagacgtgacctatgcagccatggttgtcaaggtcatcgcccagcatcagaatctgctcctggctaataccactagcgcctttccttacgccctgctgtccaacgacaacgcgttcctttcttatcatcctcacccattcgcgcagcggacactaaccgcaagattccaggtcaataatacaagacccccacatgtgcagttgctcagaaaaccagttctgactgctatggggctactcgccttactcgacgaggagcagctgtgggccgaagtttcccaggcaggaacagtcctcgactccaatcacacggttggcgtcttggcgtcagctcacaggccgcagggacctgccgatgcttggcgggcagccgtgcttatttatgccagtgacgataccagagcccacccaaaccgcagtgtggccgtcaccctgagactgaggggcgttcccccaggtcctgggctggtgtacgttacaagatatctggataatggactgtgctctcccgacggtgaatggaggagactgggccgacctgtgtttcctactgctgagcagttccgacggatgagggcagctgaagacccagtggcggctgcccctagacccctgcccgctggcggaaggctgactctgcggccagccctgcgcctccctagtctgttgttggtgcatgtctgcgcccgacccgaaaaaccccctggccaggtaacacgacttcgagctcttccgctgacacagggtcagctcgtgctagtttggtctgacgaacacgtgggcagtaaatgcctgtggacttacgaaatccaattctcccaggacggaaaagcctacacgcccgtgtcgcgaaagcccagtacttttaacttgttcgtgttctcccccgacaccggtgccgtcagtggctcatatagagttagagcactggattactgggctagacccggcccattttcagaccctgtaccatatctcgaggtgcccgtgcctcgggggccccctagccccggcaaccca

SEQ ID NO: 4356 - DNA, 1959 bp, Artificial Sequence
  derived and/or modified sequence
atgcgcccccttcgtccgagagctgcacttcttgccctgctcgcaagcctcctggcagcccctcctgtggcacccgcagaagcaccgcatctggtacacgtggacgcagcccgggcattgtggccattgcggaggttttggcggtccaccggcttctgccctccacttccacattcgcaagcagatcaatatgtgctgtcatgggaccagcagttgaatctggcttacgtgggagccgttccgcatagaggcattaagcaggtgcgcactcactggctgctggagctcgtcaccactcgtggatctaccgggagaggactttcatacaactttacccatctggacggttaccttgatctgcttagggagaaccagctgctcccaggatttgaactcatggggtcggcgagtggtcattttactgactttgaggacaagcagcaagtgttcgaatggaaggacctggtgtcatcgctcgcacgccgttacataggacgttacggcctggcccatgtgtcaaaatggaattttgaaacctggaacgagcccgatcaccatgatttcgacaacgtctctatgaccatgcagggattccttaactactatgatgcatgttctgaaggtctgagagctgcgagccctgcactgcgtctgggaggcccaggtgatagcttccatactccaccacgcagcccattgagctggggacttcttaggcattgccacgatggtactaatttctttaccggagaggccggcgtccggcttgactacatttcactccaccgcaaaggagcaaggtcctcgatctcaatactggaacaagaaaaggtggtggcccagcaaatcagacaactttttccaaaattcgcagatacccctatttacaacgacgaagcagatcctcttgtcggttggtccctcccccaaccctggagagccgatgtcacctacgccgcaatggtggtgaaggtgattgcgcagcatcaaaacctcctgcttgcaaacaccacctcggcatttccatacgcactcctgtcgaatgataacgctttcctcagctaccatccacaccccttcgcgcaacgtactctgaccgcacggttccaagtgaataacactcgccctccccatgttcaacttctgcgaaagcccgtccttaccgccatgggattgctggccctgctcgatgaagaacaactctgggcggaggtcagccaggcaggaactgtgcttgactcgaatcataccgtgggcgtcctcgcatcggctcaccggccgcaaggtccagctgatgcatggcgcgcagcagtcctgatctacgcctcggatgacactcgcgcccatccaaacaggtccgtggctgtcacccttcggctgagaggtgtgcctccaggaccgggactggtgtacgtgacgagatacctcgataatgggctgtgtagccctgatggagaatggaggaggttgggaaggcctgtgttccctacggccgagcagtttcgaagaatgcgggcagccgaggatccagtggcagcggctccacgaccacttccggcaggtggtagactgactctgcggccagcactcagactcccttccctgttgttggtccatgtttgcgcacgaccggaaaaacctcctggacaagtgacgagacttagggcacttcctctcacccaagggcaactcgtgcttgtgtggtccgatgagcacgtaggctcaaagtgcctgtggacctacgaaattcaatttagccaggacggtaaggcctacactccggtatcgcgcaagccctccacttttaacctctttgtcttttcccccgatactggcgcagtgtcgggctcgtacagagtcagagcgttggattactgggcaaggccgggaccattctcagatccggtcccatatctggaagtgccagtccctagaggaccgccatcccccgggaaccct

SEQ ID NO: 4357 - DNA, 1959 bp, Artificial Sequence
  derived and/or modified sequence
atgcgcccactcagaccccgtgccgcacttctggctctgctggctagccttctggcggcacctccagtggccccggctgaagcacctcacttggttcacgtggacgccgcacgagcgttgtggcctctgagacggttttggagatcgactgggttttgtcccccactgccacattcgcaagcagatcaatatgttctctcctgggaccaacagcttaatcttgcatacgtgggcgcggttcctcatcgcggtattaagcaagtgagaacgcactggttgctggaactggtgactactagaggatcgaccgggagaggactgagctacaactttactcatcttgatggttaccttgatctcttgcgggagaaccaattgctgccaggattcgaacttatgggctccgcatccggccacttcactgactttgaagataagcagcaggttttcgagtggaaagatttggtgtcgagccttgcccgccgctacatcggcagatacggactggcacatgtgtcgaagtggaacttcgagacttggaacgagcctgaccaccacgattttgacaatgtcagcatgactatgcagggtttcttgaattactacgatgcatgttcagaaggtctgcgcgcagcgtcgcctgcactgagactggggggccccggggacagctttcatacgcctccaagaagcccactttcgtggggccttctcaggcactgtcacgacggcactaacttctttaccggagaagcgggagtcagactcgactacatatccttgcatagaaagggagccagatcaagcatttccatcctggagcaggagaaggtggtcgcccagcagattcgacagttgttcccgaaattcgcggatacccctatttacaacgatgaggcagatccactggtcggctggtcccttccccaaccttggcgcgccgatgtgacctacgccgcaatggtggtgaaggtgatcgcacaacaccagaatctcctgctcgctaataccacctccgccttcccatacgcccttctgtcgaacgacaatgcatttctctcctaccatccgcatccctttgcccaacgaacgcttacggccaggtttcaagtgaacaacacccgacccccgcacgttcagctcctgagaaagcccgtgcttaccgcgatgggactcttggcccttctggatgaggagcagctctgggcagaagtctcgcaggctggaacggtccttgactcgaatcataccgtcggagtgctggcatctgcccacagacctcaaggacctgccgacgcatggagagcagcggtgctgatctacgctagcgatgatactagagcacatcctaacagatcggtggccgtgactctccggctgcgtggtgtcccacccggacctggccttgtgtacgtgaccagatacctcgacaacgggctgtgttcacctgatggtgagtggcggaggttgggcaggcccgtgtttcctactgccgaacaattcagacgcatgcgcgcagcagaagatcctgtggcagcggcacccagaccacttccagcagggggcaggctcactctcagacctgcactcagactgccatccttgctccttgtgcatgtctgtgcaagacctgaaaaaccgccgggacaggtgacccggcttcgagccctcccactgacccagggtcaactcgtgcttgtgtggagcgatgagcacgtgggaagcaagtgcctctggacttatgaaattcaattttcgcaagatgggaaagcgtatacccctgtaagccggaagccttcaaccttcaatctgtttgtgttttctcctgataccggagctgtctctggttcgtacagggtgcgggcccttgactactgggcgaggccaggacctttctcggatccagtcccctatctggaggttcccgtgcctagaggccctcctagccctggaaatcct

SEQ ID NO: 4358 - DNA, 1959 bp, Artificial Sequence
  derived and/or modified sequence
atgcgtcccctgcgccctcgcgcggcactactcgcgttgctggccagcctgcttgccgctcccccagtcgccccagctgaagccccacatctggtacacgtggacgccgcaagggcgctgtggccactgcggagattctggagaagtactggattctgtcctccattgccccactcccaagcagaccagtacgtgttgtcctgggatcagcagcttaatctggcttacgtgggcgccgtgccccataggggcattaaacaggtccgcactcattggctgttggaacttgtaacgacacgggggtcaaccggtcgtggtctcagctataatttcacacacctggacggatatcttgacctcctcagggagaatcagctgttgccaggattcgaacttatgggcagtgccagtggccacttcacggacttcgaagacaagcagcaggtcttcgagtggaaagatctggtatcctcattggcgcggcgatacatcggccggtatgggctagctcatgtttcaaagtggaacttcgagacctggaacgaaccggaccaccacgacttcgacaatgtgtctatgacaatgcagggattcctgaactattacgacgcttgtagcgagggtctacgagctgccagtcccgcccttaggcttgggggtcccggggatagcttccacacacccccacggtctccactttcgtggggcctgcttaggcattgccatgacgggacaaactttttcaccggggaagcaggggtacgcctggattacatcagcctccacaggaaaggagcccggtcttcaatctcaatactggaacaggagaaagtggttgctcaacagatacgccagctcttcccaaaattcgctgatactcccatatataatgatgaggcagatccccttgtcggctggagcctaccacagccgtggcgcgcggatgtgacttatgccgccatggtcgtcaaagtgatcgcgcagcatcagaacctattgctcgcaaataccaccagtgcgttcccttatgccctgctgtccaatgacaatgcgtttctgtcttaccaccctcacccttttgctcaacgtacactgaccgcccgcttccaggttaacaacacaaggcccccccacgtgcaacttctgaggaagccggtgctaacagccatggggctcttagccctgctcgacgaggagcagctctgggccgaagtcagtcaggcagggacagtgctcgattccaatcacaccgtgggtgtgctagcttcagcacataggccgcagggccccgccgatgcctggcgcgccgccgtgttgatttacgcttctgatgacacgcgcgcgcatcctaaccggtcagtggccgtgacactgcggctcagaggcgtccctcccggccctggcctcgtatacgtaacgcggtatttggataacggcttgtgcagccctgacggcgagtggcggagactgggtaggccagtctttcctacggcagagcaatttagacgaatgcgtgccgcagaagaccccgtggctgccgctccaaggcccctgcccgccggaggccggttaacactgaggccggccttgcggctcccctccctcctgttggtgcacgtatgcgcacgcccggagaaaccccctggacaggttacgagactccgagccctgccactcacccagggtcagctggtcctggtgtggtcagacgagcacgtcgggtcaaaatgcctgtggacctacgagatccagtttagccaggacgggaaggcctacacccccgtgtcacgcaagccatcaacttttaacctcttcgtcttttcccctgacacaggagctgtgagtgggtcataccgcgtgcgcgcccttgactattgggcacgacctggaccattcagtgatcctgtcccgtatctggaggtccctgtgccccggggccctccgtctccggggaatcca

SEQ ID NO: 4359 - DNA, 1959 bp, Artificial Sequence
  derived and/or modified sequence
atgcggccattgcggccacgcgcagctttattggctttgctcgcatccctgttggctgcgccacccgtggcacctgcagaggccccccacttggttcacgtcgacgcagctagagctctgtggccactccggcgcttttggagatctaccggattctgcccccctctgcctcattcccaagcagatcaatacgtcctgtcctgggatcaacagttgaacctggcatacgttggagcagtgccccacaggggaatcaaacaggttagaacacactggctgctggaactggtcactacaaggggaagcaccggacggggcttgagctataacttcacacatttggatggttacctcgacctcttaagagaaaaccagctgctacccggctttgaactcatggggtctgccagcggccactttacagatttcgaggataaacaacaagtctttgagtggaaggatctggtgagcagccttgctagacgctacattgggaggtacggcctggcccacgtgagtaagtggaattttgaaacctggaatgagcctgatcaccatgatttcgataatgtcagtatgacgatgcagggatttctgaattattacgatgcatgtagtgaaggcctgagggcagcctctcccgcgctgcggctcggaggacccggggactcttttcacaccccgccaaggtctcctctgagctggggccttctgagacattgccatgacggcacaaacttctttaccggagaagctggcgtgcgcctggattacatcagcttgcacaggaaaggagctagatcttccatttccatactggagcaagaaaaagttgtggcgcagcagatccgccagcttttcccaaagttcgccgatactcctatctacaatgacgaggccgaccctctcgtgggatggtctctgcctcaaccatggcgagcagacgttacatatgccgccatggtcgtaaaagtgatcgctcaacaccagaacctgcttctggcgaacaccacctccgctttcccatacgctctgctttctaacgacaacgcattccttagctatcacccacatccttttgcccaaaggacactcacagctagattccaggtcaacaacaccaggcctccccacgtgcagctgctgcggaaacccgtgttgaccgccatgggcttgctcgcactcctggacgaggagcagctgtgggcagaagtcagccaagccggaactgtcttggactcaaatcataccgtaggagtcctggcttcagcccatagaccgcagggccctgcagacgcttggagggccgctgtgttgatctacgcatcagatgacactcgagctcatcctaaccgatccgtagccgtaaccctccgcttaaggggggtaccccccggtcctggcctggtttacgtcacaaggtatctggacaacggcctctgtagccctgatggagaatggaggcgccttgggcgaccagtctttcccaccgccgagcagttccgcaggatgcgcgctgcagaggatccagtggcagcagctccacgcccactgcctgctgggggacgcctcacactcagacccgccttgagacttcccagcctgcttcttgtgcatgtatgtgcaaggccggagaaaccacccggccaggtcacccggctgagggcattacccctgacccagggacagttggttctcgtgtggtccgacgagcatgtcggcagtaagtgtttatggacatacgaaatacaatttagtcaggatgggaaggcatatactcctgtatccagaaagccttcaaccttcaacctgtttgtctttagtcccgataccggcgccgtgagtggaagctaccgggtgcgcgctctggattattgggcaaggccaggcccctttagtgacccggtcccttaccttgaagtgccagtcccccgcggcccaccatcacctgggaatccc

SEQ ID NO: 4360 - DNA, 1959 bp, Artificial Sequence
  derived and/or modified sequence
atgagacctttgcggccgcgagccgccttgctggccttattggcaagtttgttagcagcaccacctgtcgcacctgcggaagcgcctcatttagttcatgtggatgcggcccgcgcgttgtggccattgcggagattctggcgctctacggggttctgtccgcctcttccgcattctcaagctgaccaatacgtgctttcttgggatcagcaacttaatcttgcctatgtcggagccgtaccccaccgtggcattaaacaggtcaggacacattggcttttagaactagtaacaactaggggttctactgggagaggacttagttataacttcacacatttggatggatatctggatttactccgggaaaatcagctgcttcctggatttgagctgatggggtctgcgagtggccacttcacggattttgaagataaacaacaggtttttgaatggaaagatctcgtttcttctcttgcacgacgctacattggaagatacgggctggcgcacgtaagcaaatggaattttgaaacgtggaacgagcctgaccaccatgatttcgataacgtatctatgactatgcagggttttctgaactactatgatgcctgttcagaagggctccgagctgcttctcctgctttaagacttggcggtcctggggattcttttcatacccctcctcgttcccccttgtcatggggcttactgcgccattgccatgacggaacgaacttctttacaggcgaagcgggagtaagacttgattatatcagcctacacagaaagggcgctcgctcctcgattagcattctagaacaggaaaaagtagtcgcccagcaaatcagacaattgtttcccaaattcgcagatacaccgatttataacgacgaagcggatcctttggttggttggtccctcccacagccgtggcgcgctgatgttacgtatgccgccatggtcgttaaagtaatcgcccagcaccaaaatttgctcttagcaaacactacatccgcctttccgtatgcgttattgtctaatgataacgcgttcctctcatatcatccacatccgttcgcgcaaagaacacttacggcgagatttcaagtaaacaatacacgcccgccgcatgtccagttgcttaggaagcctgttctgacagctatgggtctcttagcgttgcttgacgaggaacagctctgggcggaagtgagccaagctggcacagttctcgactcaaatcataccgtgggggtcttggcgtcagcgcatcgcccgcaaggccccgcagatgcatggagggcggctgtcctgatttatgcgagcgatgatactagagcccatccgaatcggagtgtagctgttacactgcggctgcgtggagttccacctgggccgggactggtctatgtgacacgatacttagacaacggactttgctcgccggatggtgagtggcgcaggcttgggagacccgtattcccaacggcagaacagtttagacgtatgcgtgcagctgaagaccctgtagctgctgcaccgagaccgttgccagctggtggcagactgacattaagacctgccttgagattgccgtctctgctactagtccatgtttgcgcgcgccctgaaaaaccgccaggccaagtcactcgtcttcgtgcacttccgcttacacagggccaattggtgcttgtttggtctgacgaacatgtgggtagcaaatgtttgtggacgtacgagattcaattctctcaagatggcaaagcttacacaccggtgtctcgcaaaccttctacattcaatctttttgtcttctcaccagatacaggagcagttagcggctcataccgagtaagggcgttggattattgggcgcgtccgggcccgttttcagatccggtgccctaccttgaagtcccggtaccgaggggtccgccgagccctggcaaccct

SEQ ID NO: 4361 - DNA, 1959 bp, Artificial Sequence
  derived and/or modified sequence
atgcgacctctgaggccccgagctgccttgttggctctcctggcctctctgctggccgcacctcccgtagcccccgctgaggccccccatcttgttcacgtcgacgccgcaagagccctttggcccttgcgccgcttctggagatcaaccgggttttgtcctcccctcccacacagccaggctgaccaatacgtcctctcatgggaccagcagcttaacctggcttatgttggtgccgtgccccaccgcggcatcaagcaagtgaggacgcattggctcctcgagcttgtgaccactagaggctccacagggcgcgggcttagctataactttacacacctggacggatacctggatctgctgagggagaatcagctgttgcctggttttgagctgatggggagcgcgtctgggcatttcacagactttgaggacaaacagcaggtatttgagtggaaagatttggtgagctcactggcacggagatatatcgggaggtacggactggctcacgtgagcaagtggaattttgaaacatggaacgagccggatcaccatgattttgataatgtctcaatgactatgcaaggcttcctgaactactacgacgcttgctcagaaggtctccgagccgctagccctgccctccgacttgggggccctggtgattccttccacacccctcccagatccccactctcttggggcctccttagacattgccatgacgggaccaactttttcaccggggaagctggagttaggctcgactatattagcctgcaccgcaaaggcgcccgctcatcaatctctattctggagcaggagaaggtggtggcgcagcagatcaggcagctctttcccaagttcgctgatacgcctatttataacgatgaggccgatcctctggtgggctggagtcttccccaaccctggagagctgacgtgacttacgcagctatggtcgttaaagtgattgctcaacaccagaacctcctgctggccaatacaacctcagccttcccctatgccctgttgagtaacgataatgcctttttgtcctatcatccgcaccctttcgcccagagaaccctgacggcccgatttcaggttaataatactagacctccgcatgtccagctcttgagaaagcccgtgctgaccgccatgggcttgctggccctcctcgacgaagagcagctttgggccgaagtgagtcaggcaggcacagtcctggacagcaatcataccgtcggcgtgctcgccagcgcccatagaccacagggccccgcggacgcttggagagcggcagtgctgatctacgcttctgacgatactcgagctcaccccaacaggagtgtggctgtcactctgaggcttagaggcgtgccacccggacccggtctggtttacgtcacgagatacttggacaatggtctgtgctcacctgatggagagtggcgacgactcggacgacctgtgttccccactgccgaacagttccgaaggatgagggccgccgaagatcccgtggctgctgccccaaggcccctgcctgcaggaggccgcctcacgctgagacccgctctgcgactgccttccctcttgctcgtgcacgtgtgtgcaaggcccgaaaaaccgccggggcaggtcaccaggttgcgggccttgcccctcacacagggccagctggtgctggtatggagcgacgaacatgtcggctccaagtgtttgtggacttacgagatacaattctcccaggatggcaaggcgtatacgcccgtctctcgcaaaccttcaacttttaatctgtttgtgtttagtcccgacaccggtgctgtgagtggttcatatcgagttcgggccctggactactgggctaggcctggtcctttctccgatcctgtgccatatttggaagtacccgttcctaggggacctccctctcctgggaacccc

SEQ ID NO: 4362 - DNA, 1959 bp, Artificial Sequence
  derived and/or modified sequence
atgagaccactccggccgagggctgccctgctagccctgctagcatcattgctggcagcccctcctgtagctccagcagaggccccacacctcgtgcatgtggacgctgcacgggccttatggccgttaaggcgtttctggaggagcacaggcttctgtccgcccttgcctcacagtcaggctgaccagtatgtgctgagttgggatcagcagctgaatctggcctacgttggggctgtgcctcacaggggaatcaagcaagtaaggactcactggctgctggagcttgtgaccactaggggatccaccgggcgcggactttcatacaacttcactcacctggatgggtacctggacctgttgagggagaatcaattgctgccagggtttgaactgatgggcagcgccagcggtcactttacagacttcgaagacaaacagcaggtgttcgagtggaaggatctggttagcagcctggcacgtaggtacataggcagatatggcctagctcacgtctctaagtggaactttgagacttggaacgaacctgaccaccatgacttcgataatgtgagcatgacaatgcagggatttctaaattactacgacgcttgctcagaagggctgcgggcagcaagcccagcacttcgtctgggcgggcccggggacagtttccacacccccccacgtagccctctatcatgggggttactaaggcactgccatgatggtaccaactttttcacaggcgaggcaggagtacggctggattatatcagcctccatagaaaaggcgcgagaagttctatttctatcctggagcaggagaaggtggtggcacagcagattcggcagctgtttccaaagtttgccgatacccctatttacaatgacgaggctgatcctcttgtcggttggagcttgccgcagccatggcgcgccgacgtaacatacgctgctatggtggtgaaggtaatcgcacagcaccagaatctgttactggctaatacgacctccgccttcccttacgcattactaagcaatgacaacgccttcctcagctatcacccccatcctttcgcacaaagaactcttaccgcaaggttccaggtgaataacactcgcccaccacacgtgcagctactgcggaagcccgtgctgactgccatggggctcctggcgttgcttgatgaggagcagttgtgggccgaagtcagccaggcggggacagtcctggattccaaccacaccgtcggggtgctggcctctgctcaccgccctcaggggcctgcggacgcttggcgggctgcagtgcttatatacgccagcgacgacacgcgcgcccatcccaaccgttcagtcgctgtgactcttcggctgcgaggtgtgcctccgggcccgggcctggtgtatgtgacaagatacttggacaacggcctctgttccccagacggagaatggcgacgcctcggaagacctgtatttccaactgcggagcagttcaggagaatgcgcgccgctgaggatcccgtggcagcagcgcctcggccactgcctgcaggtggacgcctgaccctcaggcccgcgctgagactgccaagcctgctccttgtgcacgtgtgcgcccgaccagaaaagccccctgggcaagtcactcgcctgagggctctccctctgacccagggccaactggtgttggtgtggtctgacgagcatgtaggcagcaagtgcctctggacatatgagatacagtttagccaagatgggaaagcatacactccagtgtcgcggaagccttccacatttaacttattcgtctttagcccagatactggagctgttagtggatcataccgagtccgggcgctcgattactgggccaggcccggcccattctcggatccagttccctatctggaagtacccgttccccgtggcccaccctctccaggcaatcca

SEQ ID NO: 4363 - DNA, 1959 bp, Artificial Sequence
  derived and/or modified sequence
atgcggccactgcggccacgtgcggctctgcttgcactcctcgcgtccctgctggccgcgccgcccgtcgccccggccgaggccccgcacctggtgcacgtggacgccgccagggccctgtggccgctgcgacggttctggagatccaccggattctgtcccccactgccgcactcccaggccgaccagtacgtcctgtcttgggaccaacagttgaatcttgcgtacgtgggtgctgttccccatcgcggtatcaaacaagtgcggacccattggctcctggaactggtgactaccaggggatctactggccgggggctctcctacaacttcactcacctcgacggatacctggatctgctccgcgagaatcaactgttgcccggattcgaattgatgggttcagcctcgggacattttaccgacttcgaggacaagcagcaagtgttcgaatggaaggacctggtatcaagcctcgcaagacggtacatcggtcggtatggactcgcccacgtgtcgaaatggaatttcgagacttggaatgagccggaccaccacgacttcgacaacgtctcgatgactatgcaaggctttctgaactactacgacgcctgcagcgagggactccgggcagcctcaccagctctgagactgggcgggccaggtgattcgttccacacgccccctagatcaccgctgtcatggggtttgctccgccactgccatgacgggaccaacttcttcactggggaagccggagtgcgcctggactacatctcgcttcatagaaaaggcgcacggtcctccatttcgatcctcgaacaagagaaagtcgttgcccaacagatccggcagctgttccctaagttcgccgacacccccatttacaacgacgaagccgaccctctcgtgggatggtcgctccctcagccgtggagggctgacgtgacctatgccgcgatggtggttaaagttatcgcgcagcatcagaacctgctgctggcgaataccacttcggcattcccttacgcactgctctccaatgacaatgcctttctgtcctaccacccccatcctttcgcccaacggacgcttactgcccgattccaggtgaacaatactaggccaccgcacgtgcagctgctgcggaagcccgtactgactgctatgggcttgctcgccttgttggacgaagaacagctgtgggcagaggtgagccaagcaggcaccgtcctggactcgaaccatactgtcggggtgctcgcttccgcccatcggccgcagggacctgcggatgcatggcgggcagcagtgctcatatatgcatccgacgacacccgggcgcacccgaaccgatcagtcgctgtgaccttgagactgagaggagtgcctcctgggccgggcttggtgtacgtcacccgatacctggataatggactttgctcccccgatggcgagtggcgcaggctggggcgccctgtgttcccgaccgcagagcagttcagaaggatgcgcgcggcggaagatccggtcgcagcggctccccggccactcccggctgggggtcgccttactctgcgccctgccttgcgccttccttcgttgctgctcgtgcacgtctgcgcacggcccgaaaagccgccaggccaggtcactaggctgagagccctccctctgactcagggccagctcgtcctggtctggtctgacgagcatgtgggatcgaagtgcctctggacctatgaaatccaatttagccaagatgggaaagcgtacactcctgtgtcacgcaagccatccacgttcaacctgtttgtgttctccccggatactggagcagtgtccggaagctacagagtccgggccctggactactgggccagaccgggacctttttccgatccggtcccgtacctcgaggtgccggtgcctcgcggaccgccgtccccgggtaatccg

SEQ ID NO: 4364 - DNA, 1959 bp, Artificial Sequence
  derived and/or modified sequence
atgcggccgctgcgcccacgcgcggctctgctggcccttttggcaagccttctggccgcgccgccggtggcgcctgcagaagcgccacacttggtgcatgtggatgccgctcgggcgctctggccgctgcgtcgcttctggagatccaccggtttctgcccgccgctgccgcattcccaggccgaccagtacgtcttgtcatgggatcaacagctcaatttggcctatgtgggagcggtcccgcacaggggtatcaaacaagtgcggacccactggctgctcgagctcgtgactactagaggttcgactggcagaggtctgtcatacaattttactcatctggacggttacctggacctgctcagagagaaccaactgttgccggggtttgaactcatgggatcggccagcggacacttcactgattttgaggataagcaacaggtcttcgaatggaaggacctggtgtcctcactcgcccgtagatacattggaagatacgggcttgcacatgtgtcgaagtggaatttcgaaacttggaatgaacctgaccaccatgattttgacaacgtgtcgatgaccatgcagggatttctcaattactatgacgcgtgctcggagggacttagggcggctagcccggctctccgcctcggtggacctggagacagctttcacactcctccgcgatcccccctcagctggggccttctgagacattgccacgacggcaccaacttcttcacgggcgaggcgggcgttcgcctcgattacatctcccttcaccgcaagggggcacgctcgtcgatctcgatcctcgaacaggaaaaagtggtggctcaacagatccgtcagctgtttccgaagtttgccgacacccctatttacaacgatgaggctgaccctctggtgggatggtcgctcccacaaccttggcgcgccgacgtgacctacgcggccatggtggtcaaggtgatcgcccaacaccagaacctgctgctggctaacaccacgtccgccttcccttacgcccttctctccaacgacaacgccttcctgtcgtatcatccgcatccattcgcgcagcgcaccctgactgcccgcttccaggtgaataacacgcgcccgccgcacgtccagttgctcagaaagcccgtcctgacggcgatgggcttgcttgcactcctggatgaagaacagttgtgggccgaagtgtcgcaggcgggaactgtgctcgactctaatcataccgtgggagtgctggcgtcggcacaccggccgcagggaccggccgatgcgtggagggccgcggtcctgatctacgcatcagacgacaccagagcccaccccaaccgctccgtggcagtcacccttagactcagaggggtcccgccgggtccggggctggtgtacgtgacccggtacctcgacaacggactgtgcagcccggacggtgaatggcggagactgggacgcccggtgttcccgaccgccgagcaattccggcggatgcgcgccgcggaagatccggtggccgccgcaccacggccgttgccggcgggtggacgcctcaccctcagacccgccctccggctgccatcactgctgctggtgcacgtgtgcgcgcgccctgaaaagccaccgggacaggtgaccagactcagggccctcccactcactcagggacagctcgtgctggtctggtccgacgaacatgtcggttccaagtgcctgtggacctacgaaatccagttttcacaagacggaaaagcctacactccggtcagccggaaaccgtccactttcaacctgttcgtgttctcgccagacaccggagcagtctcagggtcctaccgcgtgcgggctctggactactgggcgcggccgggaccgtttagcgacccagtgccatacttggaggtcccggtgccgcgcggaccgccctcgcctggcaacccg

SEQ ID NO: 4365 - DNA, 1959 bp, Artificial Sequence
  derived and/or modified sequence
atgcggccactgcgccctcgcgcggcccttctggcactcctggcaagcctcctggccgcaccacccgtggccccagcagaagcgccacacttggtgcatgtggatgcagcacgtgcactctggccgttgaggcgattttggagatcgaccggcttttgccctcctcttccacattcgcaagccgatcaatacgtgctgagctgggaccaacagctcaacctggcgtacgtcggtgcagtgccgcataggggaattaagcaagtgcgtacgcattggttgctggaacttgtgactacccggggatcaaccggacgagggctttcctacaacttcacccatcttgatggttatctggatcttctgcgcgagaaccaactgctgcctggttttgaactgatgggtagcgcatccgggcacttcactgattttgaagataagcagcaagtgttcgagtggaaagatcttgtgtcatcactggcaaggcggtacattggcagatacggacttgcacatgtgtccaagtggaacttcgagacttggaacgaacctgatcaccacgattttgataatgtgagcatgacgatgcagggctttctcaattactacgacgcatgttcggaaggacttagggcagcaagcccagctctgcgcctgggtggtcctggtgattccttccatactcccccacgatcacccctctcctggggacttctgcggcattgccatgacgggactaacttctttactggagaggcaggggtgagacttgactacatttcgcttcatcgtaagggcgccagatcctcaatttccatccttgaacaggagaaagtcgttgcccaacaaatccggcagctgttccctaagtttgcagatactccgatttacaatgacgaagcagacccccttgtgggatggtcactgccacagccatggcgcgcagacgtgacctacgctgcaatggtggtgaaagtgattgcccaacaccagaacctcctcctggcgaacaccacgagcgcgtttccctacgctctccttagcaacgataatgcgttcctgtcttaccatcctcatccattcgcacagaggacccttactgcgcgctttcaagtcaacaacaccagacctccacatgtgcagctcctgaggaagcctgtcctgaccgccatggggcttcttgcgcttcttgacgaagaacaactgtgggccgaagtctcacaagcaggtaccgtgctggattccaatcacacggtgggagttctggccagcgcacatagaccacaaggcccggcagatgcctggagggcagcagtgctgatttatgcatcagatgatacccgagcacatcccaaccggtcagtggcggtgaccctgagattgcgcggagtgcccccaggtccaggcctcgtgtacgtgactcggtacttggacaacggtctgtgctcccctgatggtgagtggagacgcctcggccgccccgtgttccccactgcggaacaatttcggcgtatgagagccgctgaagatccagtggcagctgcaccaagacccctgccggcgggtggacgacttactcttagacccgcgctgcgccttccgtcactcctgcttgtgcatgtgtgtgcaagaccagaaaagccacccggccaagtgactcgtctgagagcacttcctctcacccaaggccaacttgtgcttgtctggagcgacgaacacgtgggaagcaagtgcctgtggacttacgaaatccaattctcccaagatggtaaagcctacactccagtgtcccggaaaccttctacgttcaatcttttcgtgttttcaccagataccggggcagtcagtggtagctacagagtcagagcacttgactattgggccaggccgggtcctttctcagatccagtgccttacctggaggtgcccgtgccccgcggaccaccgtccccaggaaatcct

SEQ ID NO: 4366 - DNA, 1959 bp, Artificial Sequence
  derived and/or modified sequence
atgagacccctccgcccccgagccgctcttctggcactgctggcctcattgctggcagccccaccagtcgcgccggccgaggcaccccatttggtccacgtagacgctgcgagggccctgtggccattgagacgattttggcggagcactgggttctgccctccactcccgcactcccaagcagaccaatatgtcctcagctgggatcaacagcttaatttggcatacgtgggtgcggtgccgcaccggggtatcaagcaagtgcgcacacattggttgctggagctcgtcaccacaagaggtagcactggacgaggtctttcttataacttcacacaccttgacggatacctcgatctcctgcgggagaatcagctgctgccaggcttcgagctgatgggttccgctagtggccatttcaccgacttcgaagacaagcagcaggtatttgagtggaaagatctggttagtagcctcgcacggcggtacattgggcgctatggtctggcgcacgtctcaaagtggaacttcgaaacatggaatgagcccgaccaccatgactttgataacgtgtctatgacgatgcaggggtttcttaactactatgacgcctgtagtgaagggctcagagccgccagccccgctctccgccttgggggacctggagacagctttcacacccctcccaggagtccgctctcctggggactgcttcggcactgccacgatggcactaatttttttacaggcgaagctggcgtaaggctggactacatcagcctgcatagaaagggggctagaagttccattagtatcttggagcaggagaaggtagtcgcccagcagatccggcaactgtttcctaaattcgctgataccccaatttacaacgacgaggccgatccgctggtgggctggtccttgccacagccatggcgcgccgacgtgacatacgccgctatggttgtcaaggtaatcgcacagcaccagaatctcctgctcgccaacactaccagcgcgttcccctatgctctgctgtccaatgacaatgctttcctgtcctatcatccccatccatttgcacagcggacattgactgcccgctttcaagtgaacaacaccaggcccccacacgtccagctgctgcggaaaccagtgcttaccgctatggggctgcttgccctgctggatgaggagcaattgtgggccgaggtaagccaggcaggaacggtcctcgatagtaaccatacagtcggagtgttggcttccgcacacagacctcagggtcctgcagacgcttggcgggcagccgtgctgatatacgcttctgacgacacccgcgcccacccgaaccggtccgtggcggtaacactccgcctccgcggcgtgccacctgggccgggcctggtttacgtgacacgctacttggataatgggctctgtagccctgatggtgagtggcgaagacttgggagaccagtcttccccacagccgaacagtttcggcggatgcgagcggctgaggaccctgtcgcggcagctcctcggcctctgcccgccgggggaaggctgaccttgaggccggcgcttagattgcctagcctccttctggtccatgtgtgcgcccggcctgagaagcctcccgggcaggttactaggcttagggcactgcccctgacccagggtcagctggtactggtgtggagcgatgagcacgtgggctctaagtgtctgtggacttacgaaatccagttttctcaggatggcaaggcatacacacccgtatccagaaagcctagtactttcaatctgttcgtgttctcccctgacaccggggcagtttctggaagctacagagtgcgggcactcgattactgggcacgacccggccccttctccgaccccgtgccatacctggaggtccctgtgccacggggtcctccttccccgggaaaccct

SEQ ID NO: 4367 - DNA, 1959 bp, Artificial Sequence
  derived and/or modified sequence
atgaggcctttgcgcccgcgggccgcgcttctcgccctgctggccagcctcctggccgcccctcctgtagccccagccgaagcaccccacctggtgcatgtcgatgccgccagagcgctgtggcctctcaggagattctggagaagtacaggtttttgtcccccacttccgcactcccaagcagaccagtacgtgctttcctgggaccagcagctgaacctggcctacgtgggtgccgtgccccacagaggcataaagcaggtaaggacccactggcttctggaacttgttacaactagaggatcaaccgggcggggtctgagctataattttacacatctggatgggtacttggatctgcttagagaaaaccagctgctgcccggcttcgaactaatggggagtgccagtggtcactttactgatttcgaagacaagcagcaggtcttcgagtggaaggatcttgtctcgtccctagcgaggcgatatataggaagatatggcttagcccatgtgtctaagtggaatttcgagacgtggaacgagcctgatcatcacgatttcgacaatgtaagcatgactatgcagggctttctgaactattacgacgcttgctcggaaggccttagagccgccagcccagccctgcggttagggggtccgggtgactcttttcatacccccccccgtagccccctgtcctggggtctccttagacattgccacgacggtaccaactttttcacgggggaggctggggtgcgtttagactacatctctctacacagaaagggcgctcggtcatcaatttctatcctggaacaagaaaaagtagttgcgcagcagatccggcagctctttcccaagttcgctgacacacccatctacaatgatgaagcagatcccctggtgggctggtcattaccgcagccttggagagctgatgtgacctatgccgctatggttgtgaaggtcatcgcgcagcatcagaatctgctgctagcgaataccacaagtgcgttcccttacgctctgctgtctaatgataacgcatttttgtcttaccacccccatccttttgcacagcggacccttaccgcccggtttcaggtcaataatacgcggccaccccacgtgcagcttctgaggaaaccggtcctcacagcaatggggttgctggcactgttagatgaggaacagctttgggctgaagtctcacaggccggaacagtgctcgactctaatcacacagtcggtgtcctggcctccgcccaccggccccagggacctgcagacgcttggagggccgccgtcttgatttatgcaagcgatgacaccagggcacaccccaatagaagcgtcgccgtgacgcttcgtctgcggggggtcccccccggcccgggcctcgtttacgtgacacgctacctggacaacgggctttgctcgcctgacggcgagtggaggaggctgggtcgccctgtcttcccgaccgctgaacagtttagacgcatgagagccgcggaggaccccgtcgcagccgcccccaggcctttgccggcagggggcagactaactcttcgcccagccctacgcctgccctcactcctgttggtgcacgtttgtgctagacccgagaagcctcccggccaggttactcgtctaagggccttacccttgacccagggccagctggtcctcgtctggtccgacgaacacgtcggatccaaatgcctttggacatatgagattcagttctcccaggatgggaaggcatatacccccgtgagccggaagccatcgacattcaatctatttgtcttctcacccgacaccggggcggtcagtggcagctatcgtgtacgcgccctggattattgggctcggcctgggccattcagcgatcctgtgccctacctggaagtccctgtgccccgtgggcctccaagccccggcaatccc

SEQ ID NO: 4368 - DNA, 1959 bp, Artificial Sequence
  derived and/or modified sequence
atgaggcctctgcggccgagggccgcacttctagccctgttggcctcactcctggcggcaccaccggtggctccggccgaggctccccatctggtccacgtggatgccgcacgggctctgtggcctttgaggcggttttggcgatcgaccggattttgtccgccgctcccccactcacaggcagatcagtatgtcctgtcttgggaccagcaactgaacctggcctacgttggagctgttccccataggggaataaaacaggtgcggacccattggctcttagaactggttaccacacgggggagcaccgggcggggactctcctacaacttcacacacttagatgggtacctcgacctgcttcgcgagaaccagctgctcccgggttttgagttgatggggtccgccagtggtcactttacagattttgaggataaacagcaggtgttcgaatggaaagatctggtgtcttccctcgctagaagatatataggccggtacggcctggcccacgtgagcaaatggaatttcgaaacttggaacgagccagaccaccatgactttgataacgtgtctatgacaatgcagggttttttgaattactacgacgcgtgcagcgagggactacgtgccgcaagccctgctttacggctcggcggtccaggcgattcctttcatacaccaccccgatcccccttgtcttgggggttgctgcgtcattgtcacgacggaaccaacttcttcaccggagaggccggtgtgaggctcgattacatcagtcttcacagaaagggcgctcgctcctctatctctatattagaacaggagaaggtggtcgcccaacagatacgccaactgtttcctaaatttgccgacaccccaatctacaacgatgaagctgacccactggtaggctggtccttacctcagccgtggagagccgacgtaacgtatgccgcgatggttgttaaggtgatcgctcaacaccagaatctgctgctagcaaacacgacatccgcatttccttatgcacttctgtccaacgacaatgccttcttaagttaccatccccatccatttgcccaacggactttgactgcccgcttccaggtgaataacactcgtccacctcatgtgcagttattgcgcaagcccgtgctgactgccatgggccttcttgctctcctggacgaagagcagctatgggccgaggtatcacaggctgggactgtgcttgatagtaatcacacagtgggagttttggccagcgcacaccgacctcaagggccggcagatgcgtggagggccgccgtgctcatctacgcctcagacgatacacgcgctcaccccaaccgatccgtcgccgtgaccctccgcctccggggcgtgccaccgggcccagggctagtctatgtaacgagatatctcgacaacggcctctgcagtccagacggcgaatggcgccgactcgggcgcccagtcttcccaacagcagaacaattccgcagaatgcgagctgctgaagacccggtggctgctgcccccaggccgttgccagccggcggccgcctaactctacggccagccctaaggttgccaagtctactgcttgttcacgtgtgtgccagacccgaaaaacctccgggacaggtgacgaggctgagggcactgcccctgacgcagggtcaactggtgctggtctggtccgacgaacacgtgggctctaaatgcctgtggacctacgagatccagttttcccaggacggcaaggcctatactcctgtcagcagaaagccctccacatttaatttatttgttttcagccctgataccggcgccgtgtctggttcgtatagagttcgtgctcttgattattgggcacggccaggacccttttctgatcccgtcccttatttagaggtccccgtcccacgtgggcctccttcccctggcaatcct

SEQ ID NO: 4369 - DNA, 1959 bp, Artificial Sequence
  derived and/or modified sequence
atgcgaccattgcgtcctcgcgcagccctgcttgcgctcttggcttcgctcctggcggccccaccagtcgcaccggcggaagcgcctcatctagttcatgttgacgccgcacgcgcactgtggcctctgcgccgcttctggcgcagcaccgggttctgcccccctttgccacatagccaggccgaccagtatgtactcagctgggatcagcagctgaatttggcgtatgtgggggctgtgccccatcgcggtataaagcaagtgcgcacacactggctcttggagctcgtgaccacccgaggatctacaggaagagggctctcttacaatttcacccatttggacggatatctagacctccttagagagaatcagctgctccccggctttgaattgatgggctctgcctcgggccatttcacagacttcgaggataagcaacaggtattcgaatggaaagatttggtatctagcctggcgcgcagatacatcggtaggtacgggttggctcacgtaagcaaatggaacttcgaaacatggaatgaacccgaccatcacgacttcgacaatgtgtccatgacaatgcaagggtttctgaactattacgacgcatgctctgagggactccgggcggccagtccagctctacgtctcgggggccccggtgactccttccatacaccaccgcgctctcccctcagctggggacttttacgacattgccacgacggtactaacttctttaccggggaggcgggtgtgcgtcttgactatatctctctccacaggaaaggcgcccgttcatccatctcgattctcgaacaggagaaggtggtcgctcaacagattcggcagctgttccccaaattcgccgatacaccgatctacaacgatgaggcagacccccttgttggttggtcgctgccacaaccttggcgggctgacgtcacttacgccgctatggttgtgaaggttatagctcaacatcaaaatcttctccttgccaataccacgtctgcgttcccctatgcactgctcagtaatgacaacgcctttctaagttaccacccgcacccgtttgcacaacgtacgctgacagcccggttccaggtcaataacacacgacctccccacgttcagctccttcgcaaaccagtccttactgcaatgggccttctggctctccttgatgaagagcagctctgggccgaagtctcgcaggctggaaccgttctcgattcgaatcacaccgttggcgtccttgccagcgctcaccgacctcaaggccctgcagatgcttggcgggctgcggttcttatttatgcttctgacgatactcgggcccacccaaaccgctctgtggcagttaccctcaggcttcgtggtgtcccaccaggacctgggctggtttatgtaacccgatatctggataacgggttatgctcaccggacggcgagtggcgacgactcggacgtcctgtttttcctacggcggagcagttccgccgtatgcgtgccgccgaggatccagtagctgccgctccccggccacttcccgcgggtggtcgtttaactttgagacctgccctccggctgccatccttgcttttagttcacgtttgcgcgaggccagagaagccacctggccaggtcacccggctacgggccctacctctgactcagggccaactagtgctagtgtggagcgatgagcacgtgggatccaaatgtttgtggacttacgaaatacagttttcgcaagacggaaaggcatatacacccgtttcccggaagccgagcacatttaatcttttcgttttttcgcctgacaccggggcagtgtcgggttcgtatcgggtgcgtgcactcgactattgggcacgtcctggcccgttctctgatccagttccctatctagaggtgccggttccgcgcggtcccccctcgccaggtaatccg

SEQ ID NO: 4370 - DNA, 1959 bp, Artificial Sequence
  derived and/or modified sequence
atgcggccacttcggccaagagccgccctgcttgccctgcttgcttcacttttggcggcaccacctgtcgctccagcagaggcaccacacctggtgcatgttgacgcagcaagagcactttggccactgagaagattttggcggtccacgggtttttgccctcccctgccacacagccaagcagatcaatacgtgctgtcctgggatcagcagctgaacctggcatatgtgggcgccgtgccgcaccgtggaatcaaacaggtccggactcattggctgcttgaactcgtgaccacgaggggtagcactggcaggggactttcatacaactttacccacctggacggatacctcgacctgctgcgggagaaccaactccttcccggtttcgagcttatgggttcggcgtcagggcattttactgatttcgaggacaagcagcaagtctttgaatggaaggaccttgtgtcctctcttgctagacggtacattggtcgctacggactggctcatgtgtcaaaatggaacttcgaaacttggaacgaacctgaccatcacgacttcgacaacgtctcgatgaccatgcagggatttcttaactactacgatgcgtgttcggaggggcttagagccgcatcccccgcactgcggctgggcggaccgggtgattcatttcatacccctcctcgttcacccctttcgtggggactgcttagacactgccacgatggtaccaactttttcaccggagaagcaggcgtccgtctcgattacatttcacttcaccgcaagggagcccggagctcgatatcaatcctcgaacaagaaaaagtcgtggcacagcagattcgtcaattgtttcctaagtttgcagacactccaatttacaatgatgaagcagatccgctggtcgggtggtccctcccacagccttggcgggcagatgtcacttacgccgcgatggtcgtgaaagtcatagcgcagcaccagaacctgctgttggcgaatacgacctccgcgtttccttacgcactgctctccaacgacaatgcatttctttcataccacccccatccttttgcacaaagaactcttaccgcccgatttcaggtgaacaatactcgccctccgcatgtgcagctgctgaggaagcctgtgcttaccgcaatgggtctgcttgcccttttggacgaagagcagctctgggcagaagtgtcacaggcaggtactgtgctggattcaaaccacaccgttggcgtactcgcatccgcacataggccccagggaccagcagatgcgtggagggcagcagtgctgatttacgcatcagacgatactcgagcccacccgaacagaagcgtcgcggtcacccttagactccggggagtgcctcctggaccgggactggtctacgtgactcggtaccttgacaacggcctgtgtagccctgacggagaatggcgcaggctggggaggccagtctttcccactgcagaacagttcagaagaatgagagccgcagaagatccagtggcagcagcgcctcgacctcttcctgcagggggacgtctgactctgcggcccgcgcttaggcttccttcgctccttcttgtgcatgtgtgcgcccgaccggagaagccccctggacaggtgacgcgattgagggcactgcctctcacccaaggacaactcgtgctggtttggagcgacgaacacgtgggaagcaagtgcctctggacgtacgaaattcaattctcccaagacggtaaagcgtacacgccagtgtccaggaagcccagcacgtttaacctgtttgtcttttccccagacaccggtgcagtgtccggcagctaccgggtgcgagcattggattattgggcacggccagggcctttctccgatccagtgccttacctcgaagtgcctgtcccccgtggcccaccttccccaggtaacccc

SEQ ID NO: 4371 - DNA, 1959 bp, Artificial Sequence
  derived and/or modified sequence
atgagaccactaaggccgagagcggcactgctggctctacttgcatctctgctggcggctccacctgttgcacccgcagaagccccccatcttgttcacgtggatgccgctcgggctctgtggccactgcggaggttttggaggtcgactggtttctgtccacccctcccacattcacaagccgatcagtatgtcctgtcatgggaccagcagctcaatctggcctatgtgggtgcggtgccgcaccggggtatcaaacaggtcaggacacattggctccttgagctcgtcactacaaggggatccacgggtagaggtctgtcttacaactttacccatctggacggttatttggacctgctcagagaaaaccagctcctgccagggttcgagctgatgggcagtgcctctggccactttaccgacttcgaagacaagcagcaagtattcgaatggaaagatttggtgtcgtccctggctaggcggtatattgggcggtacgggttggcacacgtcagcaaatggaatttcgagacttggaacgaaccagaccatcacgatttcgacaatgtgagcatgaccatgcagggcttcttgaattactacgacgcatgctccgagggcttgcgggcagccagtcccgctctccgcttgggaggacccggggacagctttcacactccccctcggtcaccattgagctgggggctgctcaggcactgtcatgatggaacaaatttcttcaccggagaggccggagtgagactcgattacatcagcctgcacagaaagggagcccgctcctccattagcatattggaacaggaaaaggtcgtggcgcaacagatccggcaactgtttccaaagtttgctgatactccaatatacaatgacgaagccgatcctctggtcggctggagcctgccgcagccctggcgtgctgacgttacctacgcagccatggtggtgaaagtcatcgcacagcaccagaatctgttgctggcaaacacaacatccgctttcccatacgctctcctctccaatgataatgctttcctttcctaccatcctcatcccttcgcgcaaaggaccttgaccgcaaggttccaggtgaacaacaccaggccccctcacgtgcagcttctgcgaaaaccagtgctgacagccatgggcctcctagccctcttggatgaggagcagttgtgggctgaagtgagtcaggcaggcaccgtcttggactctaatcatacagttggagttctggcctctgctcaccggccacagggacccgcagacgcatggcgggcggctgtgctgatatatgcatcagatgatacaagggcccatccaaaccggtcggttgctgtcacacttaggctccgcggggtgcccccaggacctggcctggtctacgtgacacgctaccttgacaatggcctgtgctctcctgatggtgagtggaggcgtctagggaggcccgttttcccaaccgctgaacagtttaggcgcatgcgtgccgccgaagaccccgtagccgcggcaccaagaccactgcctgccgggggccggctgacactgcggcccgcattgaggttgcccagcctcctcctggttcatgtgtgcgccagacccgaaaagcctccaggtcaggtgacacggctgagagctctgcccctgacgcaggggcagttagtcctggtatggagtgatgagcacgtggggtcaaagtgcctgtggacctatgagatccagttttctcaagacgggaaggcatacacaccggtcagccggaagccctctacattcaacctttttgtgttcagccctgacactggcgctgtgtccgggagctacagggtgcgggcactcgattactgggctagaccaggccccttctccgacccggtgccctacctggaggttccagtcccccgaggacccccctcacccggaaacccc

SEQ ID NO: 4372 - DNA, 1959 bp, Artificial Sequence
  derived and/or modified sequence
atgcggccacttcgcccccgggcggccctcctggcactcctcgcatcacttctcgccgccccgcctgtcgctcccgcagaagctccccatttggttcacgtcgacgctgcccgagcgctctggcctcttcgccgattttggcgctccaccggattttgtcccccactcccacactcacaagccgatcagtatgttttatcatgggaccagcagttaaatttggcctatgtgggagctgtcccccaccggggcattaagcaggtgcgcactcactggctgcttgagctcgttacgacacgaggctccacagggcgcgggttgtcttataatttcacacatctggacggctacctggaccttcttcgtgagaatcaactcctgccaggattcgaacttatgggctcggcaagcggacatttcactgattttgaggataagcagcaagtgtttgaatggaaagacctggtcagctccttggcacgacgctacatcggccgttacgggcttgcacatgttagcaagtggaatttcgagacctggaatgagcctgatcatcacgacttcgacaatgtctctatgaccatgcagggcttcctcaattattacgatgcctgttcggaaggcctgcgcgccgccagccccgcccttcgactgggcggcccaggcgatagctttcacaccccaccacggtctccgttgagttggggactgctaaggcattgccacgatggtactaacttctttacgggtgaagctggagttaggctcgactatatatccttacacaggaaaggagcgcggtcatcaatctcaattctggaacaggaaaaagttgtggcacagcagatcaggcaactgtttccaaaattcgccgatacccctatttacaatgatgaggccgatcctctagtggggtggagcctgccccagccatggcgcgccgacgtcacctatgctgccatggtcgtcaaagtgatagctcagcaccagaacctactcctggcaaacacaacgagtgccttcccttacgctctgctgtcaaacgataacgcgtttctcagctaccatccgcacccctttgcgcaacggaccctcaccgctcggtttcaggtcaacaatacccgacccccccacgtccagctgctgagaaagcccgtcttaacagccatggggctccttgcgctgttagacgaagagcagctgtgggctgaagtgtcgcaagccggaaccgtgctggattctaaccatacggtgggggttctggccagtgcgcatcgcccacaggggccagcagacgcctggcgcgcagccgtccttatctatgcttcagacgacactagagcacaccctaaccggtcagtggcggttacactccgcttacgaggggtgcctcccggaccaggactggtctatgtcactcgttatctggataatggactctgttcacctgacggagaatggcgccgccttggccgcccagtgtttcccaccgctgaacaattcaggaggatgcgggccgcagaggatccagtggctgctgccccacgacctttgcctgctggcggtcggttgacactgaggcctgccctccgactgccctctctactcctggtccacgtttgcgctagacccgaaaagccgcctggccaggtcacaagacttcgcgcactacccctgacacaaggacagctggtgttggtttggtccgatgagcacgtgggcagtaaatgcttgtggacttacgagatacagttcagtcaggatggtaaagcctacaccccagtctcccggaagcccagcacttttaatttgtttgtgttcagtcccgacacgggagcagtttccggctcctacagagtccgtgcactcgattactgggcccggcccggcccattctccgatccggtaccctacctggaagtgccagtacctaggggaccgccctctcccggtaatccc

SEQ ID NO: 4373 - DNA, 1959 bp, Artificial Sequence
  derived and/or modified sequence
atgcggcctctcaggcctcgcgccgcattactggcccttctggcatcattgctggccgctccccctgtggctcctgctgaggcgccccacctggtgcacgtagatgctgcgcgggccttgtggccattgaggcgcttctggcggtccaccggattctgccccccgttaccccattcacaggctgaccagtatgtgttaagctgggaccagcaactgaaccttgcatacgtgggtgccgtgccccacagggggattaagcaggtacgcactcattggctgttggagctggtgacgacacggggttccactggacgcggactctcctacaacttcacacatctagacgggtatcttgatcttttgagagaaaatcagcttctcccaggcttcgaattaatgggctctgcgtctggacactttactgacttcgaggataagcagcaggtttttgagtggaaagatctggtgtcttctctggcccgccgctatatcgggcgatacggcctcgcccacgtatccaaatggaatttcgagacttggaacgaacctgaccatcacgacttcgacaacgtatccatgactatgcagggctttctgaattactacgacgcctgtagcgagggcctgcgtgcggcgagcccagcacttcgactcggaggccccggagattctttccacaccccgccccgctctccccttagttggggactgctgaggcactgtcacgatggaacgaatttctttactggcgaggcgggcgtcagactagactatatctctctccaccgaaaaggcgccagatcctctatctctatcctggagcaggaaaaggtggttgcacagcagattaggcaactgtttccaaagtttgcagataccccaatatacaacgacgaagccgatcctctcgtagggtggtccctgccccagccttggagggccgacgtaacttatgccgccatggtcgtgaaggttattgctcagcatcagaatctcttgctggcaaataccacttctgccttcccttacgcattgctttccaacgacaatgcattcttatcttaccacccacatcccttcgcccagcggaccctaactgcaagatttcaagtgaacaacactaggcccccccacgtgcaactgctgagaaagcccgtgctgacggcaatgggtctgctggctcttctcgacgaagagcagctttgggcggaagtaagccaggcggggacagtgctcgattccaaccatacagtgggggtgctcgccagcgctcaccgccctcaaggccccgctgatgcatggagagccgccgtgctgatatatgcatcagacgacactagggcccacccaaacagaagcgtggctgtaacactgcgcttgcgcggggtcccccctggccctggactggtatacgtgacacgatatctggacaatggcctgtgttctcctgatggcgagtggcggcggttgggtcggcccgtttttcccacagccgagcagttcagaagaatgcgggctgccgaagaccccgtggcagcagctccccgccctctccctgccggcggaagactgaccttgcgtcccgccctcaggctcccttcactcctgttagtgcacgtgtgcgcacgccccgaaaagcccccaggccaggtcaccagactgagggcccttcctcttacacaaggtcagctggtactcgtgtggtctgacgagcatgtgggaagcaagtgtctgtggacatacgagatacagttttcccaagacggtaaggcatacacccccgtttcacgtaaaccttcaacttttaatttattcgtgttctctcccgatacaggcgccgtgagcggtagctacagggtaagggctctggactattgggcccggcctggaccattctccgatcccgtgccttacctggaggtgcctgtcccaagaggcccaccttcgcccggcaacccc

SEQ ID NO: 4374 - DNA, 1959 bp, Artificial Sequence
  derived and/or modified sequence
atgagaccactcaggccccgtgcagccttgcttgccctgttggctagtctcttggctgccccaccagtcgctcccgctgaagctccccacctggtgcacgttgatgccgcccgtgctctgtggcctctgaggaggttttggagatctactggattctgcccaccactgccacactcacaagctgatcagtatgtattgtcctgggatcaacagttgaatctggcttatgtgggtgctgtgccacaccgcggcatcaagcaggtccgtacccactggcttcttgagctggtaaccaccaggggctctaccggtcgcggactgtcttataatttcacacaccttgatggatacctcgatcttttgcgcgaaaatcagctgctccctggatttgagctcatgggcagcgcctctggacatttcactgactttgaagataagcagcaggtgttcgaatggaaggatctcgtttcctccctggcccgtaggtacattggcaggtacggacttgctcacgtgagcaaatggaatttcgagacctggaacgagcccgaccatcacgattttgacaacgtttccatgacaatgcagggtttcctgaactactacgatgcttgctcagagggcctcagagccgcctcccctgctctcagactcggaggacccggcgattctttccataccccccctaggagccccctgtcttggggcctgctgaggcattgccacgacggtactaacttttttactggtgaggctggcgtgaggctggattatatctccttgcatcgcaagggagcacgcagcagtatatcaatccttgagcaagagaaagtcgtcgcacaacagatcaggcagctgttccccaagtttgccgatacccccatatataacgacgaggccgatcccttggttggatggagtctgcctcagccctggcgcgctgacgtcacctacgctgctatggtagtcaaggtgatcgcccagcatcagaacttgctccttgccaacaccacctcagctttcccatatgccctcctgtccaacgataacgccttcctgagctaccatccacatcccttcgcccagcgcaccttgactgccaggttccaggtcaacaacactcgcccaccccacgtccagcttctgaggaaacccgtactgacagccatgggtctcctggccttgctggacgaggagcaactgtgggctgaagtgagtcaagccggaactgtgctggattccaaccacaccgtgggcgtgctcgcatctgctcacaggccccagggacctgccgatgcctggcgtgcagctgtccttatctatgctagcgatgatactagggcccatccaaatagaagcgtggccgtcaccctgagacttcgtggagtgcctccaggcccaggactcgtgtacgttacacgttacctcgacaacggcctgtgcagtcccgatggtgagtggaggcgcttgggtcgccccgttttccctactgcagagcagttccgtaggatgagggccgctgaagatcccgtcgctgctgcccctcgcccactgccagccggtggtaggctgacattgaggcccgccctccgcttgccctcattgctgctggtccacgtctgtgctcgccctgagaagcctccaggtcaggtgactcgtctgagggccttgcctcttacacagggtcaattggtgttggtttggtcagatgagcacgtcggaagcaagtgtctctggacatatgagattcaattcagtcaggatggaaaggcctatacccctgtgagtcgtaagccatccaccttcaacctgttcgtgttctcccccgacactggcgcagtcagcggctcctaccgcgttagagctctggattactgggcccgcccaggccccttcagcgaccccgtaccctatctcgaggtacccgtgccccgcggcccaccaagccccggtaaccct

SEQ ID NO: 4375 - DNA, 1959 bp, Artificial Sequence
  derived and/or modified sequence
atgcggcccctacgcccccgggctgccctactagccctgctggccagccttttagcagctccacccgtggcccctgcggaagccccccacctcgtgcatgtagacgctgcgcgcgccttgtggccactccggcgattttggcgtagtacagggttctgtcctcccttaccccactctcaggccgatcagtacgtgctcagctgggaccagcagctgaacctggcctacgtgggtgctgtcccacatagggggatcaaacaagtgagaacccattggctactggagctggtcaccaccagaggctcaaccgggagagggctgagctacaattttacacatcttgacggctacttggacctgttacgggagaatcagcttctccctggattcgagctgatgggctctgcatctggtcattttacagattttgaagataaacagcaggtgttcgaatggaaggacctcgtctcaagcttggctcgcaggtacataggacgctatggactggctcacgtgtccaagtggaacttcgaaacatggaacgaacctgaccaccacgacttcgataacgtcagcatgaccatgcaaggcttcctcaactactatgacgcatgttcagagggattacgggccgcctccccagccctgagactggggggcccaggagattccttccacacgcctcctcggtcacctctatcgtggggcctcctccgtcactgccacgatggaaccaattttttcaccggggaagccggggttcggctggactacatttcccttcatcgaaaaggagcccggtcgtctataagcatccttgagcaggagaaagttgttgcccaacagattcggcagttatttcccaaattcgcggacactccaatttacaacgacgaggccgatcctctggtgggttggagtctgccacagccttggagggccgatgtaacttacgccgctatggtagttaaagttatcgcgcagcatcagaacctgttactggcaaacactacctcagcttttccttacgccctgctctcaaacgacaatgcatttctgagctaccacccccacccttttgcccagagaactctgactgcccggtttcaagtgaacaatacacgacctccccatgtacagctgctgaggaagccagtgttgacggcaatgggcctcttggctctcctggacgaggaacagctttgggcagaagtcagccaagctggcacagtgctggactctaatcacaccgtgggtgtcttggcctcggcccaccgtccccaaggaccagccgacgcatggagggcagccgttcttatctacgcgagtgatgatacacgggcccatccgaaccgctcggttgccgtgacattgcgcttgcgcggcgtgccgcctggccccgggcttgtgtacgtgacacggtacttagataacggcctttgcagccccgacggagagtggagacgcctgggcagacccgtgttcccgaccgccgagcaattccgaagaatgagagctgcagaggatcctgtcgccgctgcccctcgccctcttccagctggaggacgcctgacgctgcgccccgcccttcggctcccatctctcctattagtccacgtgtgcgcccgcccggaaaagcctccagggcaagtcactaggctccgggctcttcccctcactcaaggacaactggtgctggtctggtccgacgaacatgtgggctctaaatgtttatggacatatgagatccagttctcccaggacgggaaagcttacacaccagtctctagaaagccgtctacttttaatttgtttgtgttctcccccgacactggggctgtgagcggttcttatcgtgtgcgtgccttggactactgggctagaccgggcccattctcagaccctgttccgtaccttgaagtccccgtgccaagagggccaccctctcccggtaatccc

SEQ ID NO: 4376 - DNA, 1959 bp, Artificial Sequence
  derived and/or modified sequence
atgagacccctccgacctcgcgctgcactcctggccctgctggccagcctgcttgcggctcctccggttgctcccgccgaagcgcctcacctggtacatgtggacgcagccagggccctatggcccctaagacgcttttggcgttccacgggcttctgtcccccattgcctcatagccaggccgatcagtacgtcctctcgtgggaccagcagcttaacctcgcctacgttggggctgtcccccacaggggaatcaagcaggtgcgcacacactggctgctggagctggtgactacaagagggtccacagggagagggcttagttataacttcactcacttagatggatacctggaccttcttcgtgaaaaccagctgctcccaggatttgaactgatgggctcagctagcggtcattttactgactttgaggacaagcagcaagtgtttgagtggaaggatctggtttcttcgctggctaggcgctatattgggcgatatggattagcacacgtgtctaaatggaatttcgagacttggaacgaacctgatcaccacgactttgacaacgtatctatgacaatgcagggcttcctgaattactatgacgcttgctccgaggggctgcgtgctgcttcacccgcccttcgccttggggggccaggcgattctttccatacacccccacggagcccactgtcctggggtctgctgcggcattgccatgatggcactaacttctttaccggagaagccggagtacgattggattatataagcctacaccggaaaggggctcggtcaagtataagtattctagagcaggaaaaggtggttgcccagcagattcgccagctctttcccaagtttgccgatacacccatctataacgacgaggcagatccccttgtcggttggtcgctgccccagccttggcgcgcagacgtgacgtacgcagctatggtcgtgaaggtgatcgcacagcaccaaaacctgttattggctaacacgacatcagcctttccctatgcactcctgtcaaacgacaatgccttcctgagttaccatcctcatccatttgcccaacggacccttaccgccaggttccaggtaaacaacaccaggccccctcacgtgcagcttctgagaaagcccgttctcacggccatgggactattagcccttctcgatgaggaacagctgtgggcagaggtgagccaggccgggaccgttctggatagcaatcacacggtcggcgtgttagctagcgcccaccggccccagggcccggccgatgcctggcgtgccgccgtactcatctacgccagcgacgatacgagagcccatcctaaccggtctgtagctgtgaccctccggttgcgtggcgtgccgcctggccccgggctggtctacgtaactagatatttggacaatggcctctgtagccctgacggcgagtggagaagacttgggaggcctgtgttccccaccgcagaacagtttcggagaatgcgagcggctgaagatccggtggcagctgctccacgtccattgcctgccgggggcaggctgaccctgcgccccgctctgcggctgccaagcctgctgctcgtgcatgtttgcgcaaggccagagaaacctcccgggcaagtgacacgtcttcgggcccttccgttgacacagggtcagctggtgttggtgtggagcgacgagcacgtgggaagcaagtgtctttggacctatgagatacagttttcccaggatggtaaggcatacacccccgtaagcaggaaaccctcaacctttaacttgttcgtcttttctcccgacactggcgctgtgtccggctcctaccgagtaagggccctggattactgggcccgtcctggtccctttagcgaccctgtgccttacctggaggtgcccgttccccgggggccgcccagtccagggaaccca

SEQ ID NO: 4377 - DNA, 1959 bp, Artificial Sequence
  derived and/or modified sequence
atgagaccacttagacctagagcagccctacttgcattacttgcttccttacttgccgctccacctgtggcccccgccgaagctccacatctagtgcacgtagatgctgcaagggctctgtggcccctacggcgcttctggaggtctactgggttctgcccaccacttccccattctcaggcagatcagtatgttctctcttgggatcaacagcttaacctcgcatatgtaggagccgtgcctcaccgcgggataaaacaggtacggactcattggcttctagaacttgtgactactagagggtccactgggagggggcttagttataattttacgcaccttgacgggtatctcgatctcctgagggaaaatcagttactgccagggtttgaactgatggggtccgctagtggacattttacagatttcgaggataaacagcaggtgtttgaatggaaggatttagtgtcttcgctagctcggagatatatagggagatatggactggctcatgtgtcaaaatggaactttgaaacatggaatgaacccgatcaccatgatttcgataatgtatcaatgactatgcaaggatttctcaactattatgatgcctgctctgaagggttgcgagcagcaagtccagctctacggctggggggaccaggggattcctttcacactcctcctcgttctcccttaagttgggggctcctccggcattgtcatgatgggactaacttcttcacaggagaagctggagtacggttggattacatctccttacaccgaaaaggggcccgcagttctatttccatacttgagcaggagaaagtcgtggcccagcagattaggcagctgttcccaaagttcgccgatacgccaatctataatgatgaagccgaccctcttgtaggatggagtctgcctcagccttggcgagctgatgtaacatatgcagccatggtggttaaagtcatcgcccagcatcaaaatctcctcctagcaaatactacttcagcttttccctacgcccttctttccaatgataatgcttttctaagttaccatccccatcctttcgcccaacgcacactcacagcccggttccaggtcaacaatactcggcccccacacgtccaactcctcagaaaacctgtcttaacagccatggggctcctggctctcctagatgaagaacagctctgggccgaagtatcccaggctgggactgttctcgattctaaccatacagtcggggtgctcgcgtcagcacaccgaccccaggggccagctgacgcttggcgcgctgcggtgctgatctatgcatccgatgatactcgcgcccatcccaacagatctgtcgcggtaactttacgtctgaggggagtgcctcccggaccaggactagtctacgtgacacggtacctggataatggactgtgctcacccgatggagaatggaggcgcctgggaagacccgtattcccgacagctgaacagttcaggcggatgcgggctgctgaagatcccgttgccgcagctccacgccctctgccagcaggggggcgactcactctccgcccagctctccggctccctagtttattgctcgtccacgtctgtgcacggccagaaaaacctcccggacaggtcactagacttcgagccttaccccttacacagggacagttggtgttggtgtggtctgatgaacatgtagggtctaaatgtctttggacttatgaaatacagtttagtcaggatgggaaggcatatacacccgtgagtaggaaaccttctactttcaacctcttcgtgttctcacccgatacaggggccgtttctgggtcgtatcgggtaagggccttggattattgggctagacctggacctttctctgaccccgtgccgtatctggaagtcccagtaccccgaggacccccttctcctgggaatcct

SEQ ID NO: 4378 - DNA, 1959 bp, Artificial Sequence
  derived and/or modified sequence
atgcggccacttcggccgcgcgccgcacttctggcactgcttgcttcactgctggctgcaccgccggtggcaccagccgaggcgccccacctcgtccacgtggatgcagctcgcgcgttgtggcctttgcgccgcttttggcggtccaccggcttctgccctccgctcccccattcccaagcagaccagtatgtgctgtcatgggatcaacaactgaatctggcctacgtcggggctgtgccgcatcgcggaatcaagcaggtgaggacccactggctcctggaactggtgactactcggggatcgaccggaaggggcctgtcctacaatttcacgcacttggacggataccttgaccttctcagagagaaccagctgctccctgggtttgaattgatgggatccgcctccggtcatttcacggacttcgaggacaagcagcaagtctttgaatggaaagacctcgtgtcctccctggcccgcagatatatcggaagatacggactggcgcacgtgagcaagtggaacttcgaaacttggaacgagccggaccatcatgattttgataacgtttcgatgactatgcagggctttctgaattactacgatgcttgcagcgaaggacttcgggcagcgtcacctgcgttgagactcggaggcccgggggactcattccatactcccccgcggtcaccactctcctggggcctgctgcggcactgccatgacggtactaacttctttactggagaggcgggagtgcggctcgactacatctcgctccatcggaagggagctaggtcctcgatcagcatcctggaacaggagaaggtggtcgcgcagcagatccgacagctcttccctaagttcgcagatacccccatttacaacgacgaggcggatccgctcgtgggctggagcctgcctcagccgtggcgggccgatgtgacctacgcggcgatggtcgtgaaagtgatcgcacagcatcagaacctcctgctcgccaacactacgtccgctttcccgtacgcgctcctcagcaacgataatgcatttctgtcctaccatcctcatcctttcgcgcagaggaccctgactgcgcgctttcaagtcaacaatacccggccgccgcatgtgcagctgctgcgcaagccggtgctgaccgcaatgggactcctcgccctgctggacgaagagcagttgtgggcggaagtttcccaagcaggaaccgtgctggactccaaccacactgtcggtgtgctcgcctcggcccaccgcccacaaggtccagccgatgcttggcgcgcggcggttctgatttacgcgtccgatgacaccagggcgcaccctaaccgctccgtggccgtgactctcagactgcgcggtgtgccgcccggaccgggtttggtgtacgtgactaggtaccttgacaatggactgtgtagcccggacggagagtggcggcgcctcggtagacctgtgtttccgactgcagaacagttcagacgcatgagagcagctgaggacccagttgccgctgcacccagaccactgcccgccggcggacgactgacccttcgccctgccctccgcctcccatctctgctgctggtccatgtgtgtgcccgcccggaaaaaccgccaggacaggtgactcgcctgcgcgcacttccgttgacccaaggacaattggtgctcgtgtggagcgacgaacacgtcgggagcaagtgcctctggacctacgagatccagttttcgcaagatggtaaggcatacaccccggtcagccgcaagccttcaacgttcaatctcttcgtgttctctcccgataccggagctgtgagcggctcgtaccgggtccgggcgctggactactgggcccgccctggacctttctcggacccagtgccataccttgaagtgccggtgccgcgcggcccaccgtcccccggcaacccg

SEQ ID NO: 4379 - DNA, 1959 bp, Artificial Sequence
  derived and/or modified sequence
atgaggcctctgcgtcccagggccgcgctccttgcgctccttgcttctcttcttgccgcgccgcccgtggcacccgccgaggcaccacatctagtccatgtggacgccgctagagctctgtggcctcttcgacgcttttggcgttcaacagggttctgccctccccttccccactcccaggccgaccagtatgtccttagttgggatcagcagctaaatctggcatacgtgggggccgttccccaccgcggcataaaacaggttcgtacccactggctgctggaactcgtgactacacgaggatctaccggtcgggggctgtcctacaacttcacccatctggacggctacctcgacctgttacgcgaaaatcagcttctgcctgggttcgagctgatggggtcagcctccggccacttcaccgattttgaggataagcaacaggtgtttgagtggaaggacctcgtgtcttcattggcgaggaggtacatagggcggtacggcctggctcacgtgtctaaatggaacttcgagacatggaacgagcctgaccaccacgacttcgataacgtaagtatgactatgcagggctttcttaactactatgacgcctgcagcgaaggcttaagagcagcctctcccgcactgaggttaggaggccccggggattcattccacacccccccccggagcccgctgagctggggcctcctgcgccactgccacgatgggactaacttcttcactggagaagctggagtccgattggactacattagcctccatcggaaaggcgccaggagttccatcagtattctggagcaggagaaagtggtggcccagcagatcagacagctgttcccgaagtttgccgatacaccgatttacaacgatgaagcggacccgctcgtgggatggtcgctgcctcagccgtggagggcagacgtaacatatgctgctatggttgtaaaagtgattgcccagcatcagaatctgctgctggccaacaccacttcagcttttccttacgcgttactaagcaacgataatgccttcctttcataccacccacaccctttcgcacaaagaacacttactgctcgattccaagtgaacaacacccgaccccctcacgtgcagctgttacgtaagccagtgctgaccgcaatgggactcttggccctactggatgaagagcagctgtgggcggaagtctctcaggccggtactgtgctggacagcaatcacaccgtgggggtgctggcctccgcacatcggcctcagggacctgccgacgcgtggagagccgctgtgctcatctacgcaagcgacgatacccgggctcacccgaaccgcagtgtggccgtcacactccgcctaaggggcgtaccgcccggtcctggcctggtgtacgtgacacggtacctggacaacggactctgttctcctgatggcgaatggcgaagattgggccgacccgtttttcccacggctgagcagtttagaaggatgcgggccgccgaggatcccgtggctgccgccccaagaccactgcccgccggcggacggttgactcttcggccggccttacgactcccctcactgctgttagtccacgtgtgcgcacggcctgagaaacccccagggcaggtcacccgactgagagcactgccccttacccagggccaactggtcctcgtgtggtccgatgaacacgttgggagtaaatgcctctggacctacgaaatccaattttcgcaggacggcaaggcgtatactccagtgtcgcggaaaccgagtacattcaacttgtttgtattttctcctgatactggggccgtttctgggagctacagagtgcgggcgctggattactgggctaggccagggcccttctccgacccagtgccctatctcgaggtgcctgtgcccagagggccgccatctcctgggaacccg

SEQ ID NO: 4380 - DNA, 1959 bp, Artificial Sequence
  derived and/or modified sequence
atgaggccactccggcccagagcagcattgctggcgctacttgcctcattgctggccgcccctcctgttgctcccgccgaagctccacacctggtacacgtagacgcggcgcgcgccttgtggcctttgcggcgattttggcgctctaccggcttctgcccgcccctcccccactctcaagcagatcaatacgttctcagctgggaccagcagttaaacctggcgtacgtaggagcagttccccatagaggaatcaaacaagtgcggacccattggctgttagaattggtgaccacacgaggatcaaccggtcggggtctcagctacaatttcacgcatctggatgggtacctggacctcttgcgcgagaaccagctgcttccagggtttgaactgatggggtccgcctccggccacttcacagacttcgaggataagcagcaggtattcgagtggaaggaccttgtctcatccctggcccggcgctacatcggacggtacggattagctcacgtgtcaaagtggaacttcgagacgtggaacgagcccgatcaccacgatttcgacaacgtgagcatgactatgcagggattcttaaattattatgatgcatgctctgagggcctacgcgctgccagccctgctcttcggctgggcggtcccggtgattcattccacacaccgccccgtagccccctgtcctggggactgctgcggcactgccacgacggcacaaacttttttacgggtgaggctggagttcgcttggactatatctcgctccacaggaagggcgcccggagctcgatctctatcctggaacaggagaaggtggtggcccagcagattaggcagttattccctaagtttgcggatactcccatctataacgatgaagcagatcccctcgtcgggtggtctctgccccagccttggcgcgcggatgtgacctatgctgcaatggtggtgaaggtcatcgcacagcatcagaatcttcttctggctaacaccactagtgcgtttccttatgcgctgcttagcaacgataatgcattcctgtcctatcatccacacccgtttgcacaacgtacgctgactgctagattccaggtgaacaacactcgccccccccatgttcagttgctccggaaaccagtgctcacagccatgggcctgctggccctgctggatgaagagcaactatgggcggaagtgtcgcaagcgggcacagtcctggattcgaaccatacagtcggggtgctagcctcggcccaccgaccccagggccccgctgacgcctggcgcgcggcagttctaatctatgccagcgacgatacgagggcccacccaaatagaagcgtcgccgttacgctacgtctgagaggggttccacccggcccggggttggtgtatgtaactagatatctagataatgggctgtgttctcccgacggagagtggagacgtttggggcgacccgtgtttccgactgcagaacagtttagaagaatgagggcagcagaagacccggtagcagcggcgccgcgcccgctgcctgcgggaggtagacttaccttgcggcctgccttaagacttccaagtttgctacttgtccacgtatgcgctagaccagaaaagccacctggacaggttactagattgcgtgccctcccactcactcagggtcagcttgtattggtgtggagtgacgaacatgtgggatctaaatgcttgtggacctacgaaatccagttttctcaagacggaaaggcatatactccagtctcccgaaaaccctctacctttaatctgtttgtattctctccagacacaggtgccgtgagcggctcataccgggtgcgggccttggactattgggcgagacctgggccttttagcgaccctgtgccttacctggaggtgccagtgccgcgcggccccccctctcctgggaacccc

SEQ ID NO: 4381 - DNA, 1959 bp, Artificial Sequence
  derived and/or modified sequence
atgcgacccctgcggccacgggccgcactgctggctcttctcgcttcgctcctcgcggcccctccagtggcaccggccgaggccccgcatctcgtgcacgtcgatgccgctcgggcgctgtggcctctgcgccgcttttggcgaagcaccggattctgcccgccgctgccgcactcacaggcggatcagtacgtgctgtcctgggatcagcaactgaacctggcctatgtgggcgccgtgccacatcgcgggatcaaacaggtcaggacccattggctgcttgaactcgtgacgactaggggctcgacggggcgcggactctcctacaacttcacgcacctcgacggatacctcgatctcctccgcgagaaccaactgctgccaggcttcgagttgatgggaagcgcttcgggacatttcaccgacttcgaggacaaacagcaagtgttcgagtggaaggatttggtgtcatcattggcccggcggtacatcggacgctacggactggcccatgtctctaagtggaacttcgagacttggaatgaaccggatcaccacgattttgacaatgtgtcaatgactatgcaggggttcctgaactactacgatgcctgcagcgaggggctgcgggctgcgtccccggcgctccgactcggaggcccgggtgatagctttcacactccgccacggtcaccactgagctgggggctgctccgccactgccacgacggaactaatttcttcactggagaggccggagtgcgcctggactacatctcactgcaccggaagggcgccagatcatcgatcagtatcctggaacaagaaaaggtcgtggcgcagcaaattagacagctgtttccgaaattcgcagacacgccgatctacaacgacgaagccgacccactggtgggatggtcgctgccacaaccctggcgcgctgatgtcacttacgcagccatggtagtgaaggtgatcgcacagcatcagaatctgctgctggctaataccacctcagctttcccttacgccctcctctcgaacgataacgcctttctgtcgtaccatccacaccccttcgcacagagaactctcaccgcgcgcttccaggtcaataacacgcgcccgcctcacgtgcagctcctcagaaagccagtcctgaccgccatgggcctgctcgccctccttgacgaggaacaactttgggctgaagtgtcccaggcgggcaccgtcctggatagcaatcatactgtgggtgtgctggcttcggctcaccgcccacaaggaccggcggatgcttggcgcgccgccgtgctcatctacgcctcagacgatacccgagcccaccccaaccggagcgtggccgtgacgctccgcctcaggggtgtacctccaggtccgggactggtgtacgtgacccgctacttggacaacggcctttgcagcccggacggtgagtggcgaaggctcggacgccctgtttttccgactgctgagcaatttcggaggatgcgcgcagccgaagatccagtggctgccgcacctcggccactcccagcgggaggtcgcctgacgttgcggccggccctgcggctgccgtcactgttgctggtgcatgtgtgcgcgcggcctgaaaaaccccctggacaggttacgagactcagggcgctgccactgacccagggccaactggtcctggtgtggtctgacgaacatgtgggctcgaaatgcctctggacttacgaaattcagttctcgcaggacggcaaggcttacaccccggtgtcgcggaagccttcgacctttaaccttttcgtgttctccccagatactggagcggtttccgggtcttacagggtcagagctctcgactactgggcgcggcctgggccgttctcagatcccgtcccgtatctggaggtcccggtcccacgcgggccgccctccccggggaaccca

SEQ ID NO: 4382 - DNA, 1959 bp, Artificial Sequence
  derived and/or modified sequence
atgcgtcccctaagacctcgggccgcactgctggcactgctcgcatcgttgctggcagcacctcctgtcgcccccgccgaggcccctcacttggtgcacgtagacgctgcccgtgctctctggcccctgagaagattctggagaagtaccggcttctgccctcctctgccccatagccaggcggaccagtatgtgctgagctgggaccagcagcttaacctcgcttacgtgggcgctgtgcctcaccgggggatcaagcaggtccgtactcattggctgcttgaattggtgacaacgcgcggttccactggtcggggactttcgtacaacttcactcatctggatggttatctggatctgctgagagagaatcaattgctccctgggttcgagctgatggggagcgcatcagggcactttacagacttcgaggacaagcagcaagtcttcgaatggaaagatctggtgtcgagcctcgcaagaagatacattggcagatacgggctagcccatgtgtctaaatggaactttgaaacctggaacgagcctgaccatcacgactttgataatgtctccatgaccatgcaggggttcttgaattactacgatgcttgttctgaggggctgcgcgctgcttccccggccctgaggctcggaggaccaggagattcttttcacacccccccccgatcaccactaagctggggtctgctgcgacactgccacgacggaacaaacttctttactggcgaggcaggcgtgaggctggattacatttccctgcatcgtaagggggcacgatcatctatctctattttggaacaagagaaggtggtggcacagcagattcggcagctttttccgaagttcgccgataccccaatctacaatgacgaggcggatcctctggtggggtggtcacttccgcaaccatggcgcgcggacgtcacgtacgcagcgatggtggtaaaagtgattgcacagcaccagaatttgcttctggcgaacactacctcagcattcccctacgcgctcctgtccaacgacaacgcctttctcagctaccatcctcacccgttcgcgcagagaaccctcacggctcgctttcaggtcaataatactcgaccaccccatgttcagcttctacggaaacctgtgctcactgccatggggctcctagcactgttagatgaggaacaattgtgggcggaagtgtcccaggcaggtaccgtgctggactctaatcacaccgtcggcgtgctagccagcgcccatcggccacagggcccagctgacgcatggcgcgcagccgtgctgatctacgcgagcgacgacacgagagcgcatcccaataggtcagtcgctgtgacgttgaggcttcgcggggtgccgccaggcccaggcctcgtgtacgtgacacgctacctggacaacggactttgctctcctgacggcgagtggcgaagattgggccggcccgtatttccaaccgccgagcaattcagacgaatgagggcggctgaggacccagtggctgccgccccgaggccattgcccgccggtggtcggctgaccttgcgtcctgcgctccgcctgccatcactgttgctggtgcatgtgtgcgcgagacccgagaaaccacccggccaggtaacacgcctgagagccctccccctgacacagggacagcttgtgctcgtctggagtgatgagcacgtcggatcgaaatgcctctggacctatgagatccagttcagccaggatggcaaggcctatactcccgtgtcgcggaagccaagcacattcaatctcttcgtcttctcccccgacactggagctgtgagcggatcctaccgggtgcgggctctcgactactgggcccggcccggacctttttccgaccccgtgccatacctggaagtgcccgtcccgaggggaccaccctcccccgggaaccct

SEQ ID NO: 4383 - DNA, 1959 bp, Artificial Sequence
  derived and/or modified sequence
atgcgccctcttagacctcgggctgcactgcttgcactccttgcctcgctgctcgcggcacctcccgtggcacctgcagaagcaccacatcttgtgcacgtggatgccgcgagagcactctggccacttcgacgtttctggcgatccactggattttgtccaccacttccacattcgcaggcagatcaatacgttctgtcctgggatcaacagttgaacttggcgtacgtcggggcagtgcctcaccgtgggattaagcaggtccgcactcattggctgcttgaactggtcaccaccagggggagtactgggcgcggactttcctacaactttactcatctcgatggatacctcgacctgcttagagaaaatcagctgttgcccggcttcgaacttatgggtagcgccagcggccacttcactgattttgaagataagcaacaagtgttcgaatggaaggatctggtgtcatccctggcacgacgctacattggccggtacggtctggcacatgtgagcaagtggaacttcgagacttggaacgagcccgatcatcacgatttcgacaatgtgtcaatgacgatgcaaggttttttgaactactacgatgcgtgttcggagggacttcgcgctgccagcccagcccttcgactgggaggcccaggggattcgtttcatactccacctcgctcacctctttcgtgggggcttctgcgacactgtcatgacggcaccaactttttcactggagaagcgggagtgcgactggactatatctcactgcatcggaagggcgcgcggtcctcaatctcgatccttgaacaagaaaaggtggtcgcacagcaaattcgccagctttttcctaagtttgcagatactcccatttacaacgatgaggcagatcctctcgtcggctggagccttccacagccttggcgcgctgacgtcacctacgctgcaatggtggtgaaagtgattgcgcagcatcaaaatcttctcctggccaacaccacctccgcatttccttacgctcttttgtccaacgacaatgcatttctgtcgtaccatcctcacccctttgcgcaacgaacgctgactgcaagattccaggtgaacaatacccgaccacctcatgtgcagctgctgaggaaaccagtgctgaccgcaatgggtctgctggcccttctcgatgaagaacagctttgggcagaagtgagccaggccgggaccgtccttgattcaaaccatactgtcggcgtcctggcaagcgctcatcggccacagggtccagcagacgcgtggagagcagcggtcctgatttacgcatcagatgatactagggcacatccaaaccggtcggtggctgtgactctgcgacttcgcggtgtgccacctggacctgggctcgtgtacgtgacccggtatctggacaacggtctgtgttcgcccgacggagagtggagaaggcttggtagaccagtctttccaaccgcagaacagtttcggaggatgcgcgccgcagaagatccagtggcagctgctccacggccacttccggcaggagggaggcttaccttgcggcccgcccttcgtctgccttcactgttgcttgtccatgtgtgcgcgaggcccgaaaagcctccgggacaggtgacccggttgcgagcactccctctcacccaaggtcagctcgtactcgtgtggagcgacgaacatgtgggatcgaagtgtttgtggacctacgaaattcaattctcccaagacggaaaggcatacactccagtgtctcgcaagccctccacctttaacctcttcgtgtttagcccagataccggagccgtgtcagggtcataccgagttcgtgcgcttgattactgggcacgcccgggccccttttcggacccagtcccgtatctcgaagtgcccgtgccgagaggaccaccctcaccaggaaatcct

SEQ ID NO: 4384 - DNA, 1959 bp, Artificial Sequence
  derived and/or modified sequence
atgcgccccctgcgtccccgagctgcattgctcgcgctgcttgcctctctccttgccgcacctcctgtggcacccgcggaagcacctcaccttgtccatgtggacgcagcccgcgcactttggcctctgaggagattttggcgatccacgggattctgtcctcccctgcctcactcgcaagcggatcagtacgtgttgagctgggaccagcaactgaacctcgcatacgtgggcgcagtgccacacagaggcataaaacaagtccggacgcactggttgcttgaactcgtgaccaccagagggtccaccggtcggggactgtcctacaatttcacccatcttgacggttacctggatctgctgcgggagaaccagctcttgcctgggtttgaactgatgggatccgcttcaggtcactttaccgatttcgaagataaacaacaggtgtttgaatggaaagatttggtcagtagcctggcacggcgctacattggtcggtatggactggctcatgtgtcaaagtggaatttcgagacttggaatgaacctgaccaccatgattttgataacgtgagcatgacgatgcagggttttcttaactattacgacgcatgctccgaagggttgagagcagcgtcgcctgcactgagacttggcggtcccggtgattcatttcatactccccctagatcgcctcttagctggggattgctgcgacattgtcatgatgggaccaatttctttaccggagaggcaggcgtgaggcttgattacatctcgctgcacaggaagggagcgcgaagctcgatctcgatacttgagcaagaaaaggtggtggcccagcaaatccgccaattgtttcctaaattcgctgatactccaatttacaacgacgaagcagacccgcttgtcggatggtctttgccccaaccatggagagctgatgtaacgtacgcagccatggtcgtcaaagtcattgcacaacatcagaacctgttgcttgcaaatactacctcagcctttccatatgccctgctgtcgaacgacaacgcatttctttcgtaccatcctcatccgttcgcgcaaaggactctgactgcccgctttcaagtgaacaataccaggcctccccacgtgcagcttcttcggaagcctgtgctgaccgctatgggactccttgcactcctggacgaggagcaattgtgggcggaggtgagccaagcgggtactgtgctggactccaatcatactgtgggtgtgcttgcttcggcacaccggccacagggtcctgcagacgcatggcgggccgcggttctgatctacgcatcagacgacactcgcgcccatcccaatcgatcggtggccgtcaccctgcgtctcaggggtgtcccgccaggcccaggacttgtatacgtgacgcggtacctggataacggtctgtgtagccctgatggagaatggagaaggctggggcgcccggtttttcctaccgcagaacaatttaggagaatgcgtgccgcagaagatcccgtcgcagcagcaccccgcccactcccagcaggaggccgtcttactcttcggcctgccctgaggcttccatcgttgctcctggttcatgtatgcgcgcggcccgaaaagcctccaggtcaagtgactcgccttagagcccttcctctcactcagggccaactcgttttggtgtggagcgacgagcatgttggcagcaaatgcctgtggacttacgaaattcagtttagccaagatggaaaggcgtacacccccgtctcaaggaagccatcgacgttcaaccttttcgtgtttagccctgatacgggagcagtgtccggatcctacagggtccgtgccctggactactgggcaagaccgggtcccttctcggatcctgtcccatacctcgaggtgcctgtgcctagaggaccaccatcgcctgggaaccca

SEQ ID NO: 4385 - DNA, 1959 bp, Artificial Sequence
  derived and/or modified sequence
atgcggccgttgcgtccgagagcggcccttctggcgcttctcgccagcctgctggcagcacctccagtggctcccgctgaggccccgcacttggttcacgtggacgccgctcgtgccctgtggcccttgcgccgcttttggagaagtacagggttttgtcctcctctgccgcatagccaggcggatcagtacgttctgagctgggaccagcagttaaacttggcatatgtaggtgctgtgccgcaccgcggtattaagcaggtgaggacgcactggctgctagaacttgtgacaacccgcggttctactggccgtggtctgagctataatttcactcacctcgatggttatcttgatctgctgcgagaaaaccagttgctaccggggttcgagctgatggggtccgcaagtggccatttcaccgactttgaggataagcagcaagtgtttgagtggaaggatctggtgtcctccctggcgagacgctacatcggccgctacggcctggctcacgtgagcaaatggaacttcgaaacttggaatgagccggatcatcacgacttcgacaacgtgtccatgaccatgcaaggcttcctgaattactacgacgcctgtagcgagggtttgagagcggcgtccccagccctgcgactcggcggcccgggcgactccttccatactccaccacgctcccctctgagttggggattgctgcggcattgccacgacggaactaacttttttactggtgaggcaggcgtgcgcctggactatattagcctgcaccgcaagggtgctcgcagcagcataagcatcctggagcaagagaaggtcgttgcgcagcagatccgacaactttttccgaagttcgccgatacccccatctataatgatgaggccgatcctctggtcggttggtccctgccacagccttggcgggcggacgtgacctacgcggcgatggtggtgaaggtaattgcgcagcaccagaatctgctgctggccaatacgactagtgcattcccatacgctctgttatcgaacgacaacgcttttctgagctaccaccctcatcctttcgcgcaacggaccctgactgcgagattccaagtgaacaatactcggccacctcacgttcagttactccgaaagccggtgctgactgcgatgggtctgctggctcttctggacgaggagcagctgtgggctgaggtgtcccaggcaggaaccgtcctggactctaatcatacggttggcgtcctggcgtctgctcacaggccacaaggcccagccgacgcgtggcgcgcagccgttctgatctacgcctcagacgataccagagcacaccctaatcgctctgtggctgttaccctgcgcttgcgcggggtccccccagggccaggccttgtttatgtgacgcgatatctcgacaacgggctctgctccccggacggcgagtggcgtcgcttagggcggcctgtcttcccgaccgccgagcagttccgacgaatgcgcgccgccgaggaccctgttgcggcggctccgcgtccacttcctgccggcggccgcctgacgctacgcccagccctgcgtctgcctagtctcctgctggtgcatgtctgcgcgcgtccggaaaaacctcctgggcaggtgacgcgcctgcgagccctgccgttgacccaaggtcaactggtcctggtctggagcgacgaacacgttgggtcgaaatgtctgtggacgtacgaaatccaatttagtcaagatgggaaagcctacacgccagtgtctaggaaaccgagcacctttaatctgttcgtgttctcccctgacacaggagccgtgagcggtagctaccgagtgcgcgcgctggattactgggcgcggccgggaccatttagcgacccggtaccgtatctggaggtgccggttcctcggggtccgccaagcccaggcaatcca

SEQ ID NO: 4386 - DNA, 1959 bp, Artificial Sequence
  derived and/or modified sequence
atgcggcccctccgccctcgggcagcgctgctagcactcttggcttcgcttcttgccgctcccccagtagcgccagcagaggcgccccacctggtccatgtggacgccgcccgagcattgtggcccttgcggcggttctggaggtcaacaggcttctgccccccattacctcattcacaggctgaccaatacgtgttatcttgggaccagcagctcaacctggcctatgtcggagccgttccccatagggggattaagcaagtcaggacccattggctgctggagctggtgacaacaaggggctcaacgggccgcggtctgtcttacaacttcactcacttggatggttacctggacctactgcgcgaaaatcaactactgcctggctttgagctcatgggatctgcaagcgggcatttcacagactttgaggacaaacagcaggtgtttgaatggaaggatttggtgtcttcactggctcgcagatatatcgggcgctatggactggcccacgtttctaaatggaacttcgaaacatggaacgaacctgatcaccacgactttgacaatgtgagcatgactatgcaggggtttttgaattattatgatgcttgcagtgagggcttacgcgctgcttcacctgcactcaggctcgggggacctggagacagcttccacaccccccccaggagccccttgtcatggggtttgctgcgccactgtcacgacggtacgaacttctttaccggtgaagccggcgttcgacttgactacatctccctgcatagaaaaggagccagaagtagtatttcaatcctggagcaggagaaggtcgtggcacagcagataaggcaactgtttcccaagtttgctgacacgcccatttacaatgatgaggctgatcccctggttggatggagtctcccccagccctggcgggccgacgttacctacgccgcgatggtggttaaggtaatcgcccaacatcagaatctgctgttggctaatactacctctgcttttccatacgctctgctctctaatgacaatgcctttttaagttaccacccgcaccctttcgcacaacgaactctgacagcgcggttccaggttaacaatactcggcccccccatgtccagctattaagaaagccagtcctaacggctatgggacttctggctctactggatgaagaacagctgtgggccgaggtatctcaggcaggaacggttttggactcaaaccataccgtcggagttctcgcatccgcacatcggccgcaggggcctgcggatgcttggcgggccgcagtgctgatttacgccagcgatgacaccagggcccatcccaatcggagtgtcgcagtgacgttgcgtctacgcggcgtgcccccaggacccggtctggtgtacgttactagatatcttgataacggcctgtgttcccccgacggagaatggagaaggttgggaaggccagtctttcctaccgccgaacagtttcgtcgcatgagggccgccgaggacccggtcgctgcggcgccacggcccctccctgcgggcggacgtctcactttgcgccccgccctccgtctgccatcactgctactggtccatgtgtgtgcgcgaccagagaagcctccaggccaggtcacccggcttagggctctgccccttacacaaggccaactcgtgcttgtctggtctgacgagcatgttgggtctaagtgtctgtggacatatgagattcagtttagccaggacggaaaggcgtacaccccggtcagtcgaaagccaagcacctttaacctgttcgtgtttagcccagatacaggagctgtctccgggagttatcgagtaagagcactcgactactgggcgcgccccgggccatttagtgatccagtaccctacctcgaagtgcctgttccccgaggaccgccaagtccaggaaacccc

SEQ ID NO: 4387 - DNA, 1959 bp, Artificial Sequence
  derived and/or modified sequence
atgcggccactcagacccagggccgcgctcctcgccctgctggcgtcgcttctggcagctccgccagtggcccctgcagaggcacctcacctggttcacgttgatgcagcaagagcactgtggcctctgaggagattttggcggtccaccggcttttgtccacctcttccacactcacaggcagaccaatacgtgcttagctgggatcagcaactcaatttggcatacgtgggagcagtgccccataggggtattaagcaagtgagaacccactggcttctggaactggtgactacccgaggaagcaccggtcgcgggcttagctacaactttacccacctcgacggatacctcgacctgctcagagaaaatcaactccttcctgggtttgagcttatgggttccgcgtcgggtcattttactgattttgaggacaagcaacaggtgttcgaatggaaagatctggtgtcatcgctggcacggcggtacatcggtagatacggactggcacatgtgtcgaaatggaacttcgaaacttggaacgaacccgatcaccatgatttcgataacgtcagcatgactatgcagggatttttgaactactacgatgcttgttcggaaggcctcagggcggcctcgcccgcactgcgccttggagggcctggtgactcatttcatacccctccgcgctcacctctgtcgtggggactcctgagacattgtcatgatggcaccaacttctttactggcgaagcaggagtgaggcttgattacatcagcctccacagaaaaggtgcaagatcgagcatttcgattctggaacaggaaaaggtggtggctcagcaaattcggcagctctttcccaaatttgcagataccccaatctacaacgacgaagcggatccactggtcggctggtcccttcctcagccttggagagcagatgtcacctacgccgccatggtcgtcaaagttattgcacaacaccagaatttgctcctggctaacacgaccagcgcattcccatacgcactgctgtcgaacgataacgcatttctttcgtaccatccacatccatttgcacaaagaaccctgactgcgcgctttcaagtgaacaatactcgacctcctcacgtgcagctgctgcgtaaacctgtcctcaccgctatggggctcctggccctgcttgacgaggaacaactgtgggcggaagtgagccaagcaggaaccgtcctcgactcaaaccatactgtcggagtgctcgcctccgcgcaccgccctcagggaccggcagatgcctggagggcggcagtgttgatatacgcatcagatgacacgcgagcgcacccaaatcggtcggtggctgtgactctgcgccttaggggagtgcctcccgggccgggactggtgtacgtgactcggtacctggataatggcctttgttccccggacggagaatggcgcagactcggtcggccagtgtttccgaccgcagaacagtttcggagaatgcgggcagcagaagatcccgtggcagcagctccacgccccctgccagccggtggtaggctgaccctccgccctgctcttaggctgccttcgcttcttctggtgcatgtatgtgcccgtccggaaaaaccaccaggacaagtcacccgccttagggcccttcctcttactcaaggacagctcgtccttgtctggtccgatgagcatgtcggatccaagtgtctgtggacctacgaaattcaattttcccaagatggaaaagcatatactccggtttcgagaaagccatcaacgttcaacctgttcgtgttctccccagataccggagcagtgtccggtagctatagggtcagagcacttgattattgggcgcgccctgggcctttctcggatccagttccataccttgaggtgccggtcccacgcggtccccccagccctgggaacccg

SEQ ID NO: 4388 - DNA, 1959 bp, Artificial Sequence
  derived and/or modified sequence
atgaggccccttagacctcgagcagcacttctggcacttctcgcctccctccttgcggctccacccgtggcaccggccgaagccccccacctcgtgcacgtggacgcagcgagagcgctttggcctctgaggcgtttctggaggagcacgggattctgtccacctctccctcactcgcaagcagaccaatacgtgctgtcgtgggatcaacaacttaaccttgcatacgtgggtgccgtgcctcatcggggcattaagcaagtaagaacccactggctgctcgaactcgtcaccacgcgaggctccaccggtagggggctgtcctacaacttcacccatcttgacggatatcttgatctcctgcgggaaaatcagttgctgcctggcttcgagctcatgggatcggcctctggtcattttactgactttgaggacaagcagcaggtgttcgaatggaaggatcttgtgagctcgctcgctagaagatacattggtagatacggactggcccacgtgagtaaatggaattttgagacgtggaacgaacctgaccatcacgattttgataacgtgtccatgactatgcaaggctttctgaattactacgatgcctgttcggaagggctgagagcagcatcccctgcgctgcggttgggcggtccaggagattcgtttcacacgcctccaagatcgcccctctcctggggcctccttcgccattgtcatgacggaacgaactttttcaccggcgaagcaggagtgcgacttgattacatttcactgcatagaaagggcgctcgctcatccatctcaattcttgagcaagagaaggtggtcgcacaacaaatccgtcagcttttcccaaagtttgccgacactcctatttacaacgatgaagcagatccgctcgtcggttggtccctgccgcaaccttggcgtgctgacgtgacctacgcagcaatggtcgtgaaggtaattgcccagcaccagaatcttctgctcgccaacactactagcgcgtttccatacgcactgctgtcgaacgataacgcatttctttcataccacccccatccgtttgcacagcgcactctgaccgcacgatttcaagtgaacaacacccgcccacctcatgtgcaacttctgcgtaaaccagtgcttaccgcaatgggtcttttggccctgctcgacgaagaacagttgtgggccgaggtgtcacaagcaggcactgtgctggattcaaaccacaccgtgggagtcctggcctcggcgcacaggccgcagggacctgccgacgcctggcgggcagctgtcctcatctatgcatcagacgatactcgggcacatcctaatcgttcagtggcagttaccctgcggctgcgaggtgttccccctggacccggactggtgtatgtgacccgatacctcgataatgggctgtgctcgcctgatggagaatggagaaggcttggcaggccggtgtttcccaccgcggaacagtttcggcgaatgcgagcagcagaagatcctgtggcagcggcccccagacctctgccggcgggcggacgtctcactctccgacctgcactgagacttccgtctctgcttttggttcatgtctgcgcacgaccagagaagcctccaggacaagtcactcgtctccgggcgctgccgcttactcaaggacaactcgtgcttgtgtggtcggacgaacatgtcggtagcaaatgtctctggacttatgagattcagttcagccaggacggtaaagcctacacccccgtctcccggaagccttcaaccttcaaccttttcgtgttctcgcctgatactggtgccgtgtcaggttcgtacagggtgcgcgcactggattactgggccaggccagggccattttcagatcctgtgccttaccttgaagtcccagtgccaagaggtcccccctccccaggtaatccc

SEQ ID NO: 4389 - DNA, 2105 bp, Artificial Sequence
  derived and/or modified sequence
gggaaataagagagaaaagaagagtaagaagaaatataagagccaccatgcggccactcaggcccagggcagcccttctcgctctgctcgcgtcacttctcgcggcaccacccgtggcgccagctgaagcgccacacctggtacacgtcgatgccgcgagggcactctggccccttagacggttctggcggtcgactgggttctgtccaccccttccccattcccaagcagatcagtatgtcttgtcatgggaccagcagctgaacctggcatacgtgggagccgtcccgcacaggggcatcaagcaggtcagaactcactggctcttggagttggtaacgacacggggaagcacgggaagggggctctcatacaacttcacgcatctcgacgggtacttggatttgcttcgcgagaatcaactgctgccagggttcgagcttatggggtcggcctcgggacatttcacggacttcgaggacaagcagcaagtctttgagtggaaagatctcgtatcatcacttgcgcgcagatacatcggacggtatggattggcgcacgtatcgaaatggaatttcgaaacgtggaacgagcccgaccaccacgattttgacaacgtgtcgatgacaatgcaggggttcttgaactactatgatgcgtgcagcgaaggtcttagagccgcgtcccctgcgttgcgcctgggtggaccaggggacagcttccacacacccccgagatcaccgctgtcgtgggggcttttgcgacattgtcacgacggaaccaacttctttactggagaggctggtgtgagactggactacatctccctgcatcgcaagggagcgcggagctcgatctcgattcttgaacaggagaaggtagtggcacagcagattcggcagctcttccccaaattcgccgacacgcctatctacaacgatgaagcggatcccctcgtcggttggtcactcccccaaccttggcgagcggacgtgacgtatgccgccatggtggtaaaggtgatcgcgcaacaccagaatttgctgttggcgaatacaacatcagcgttcccatatgcgttgttgtccaacgacaatgccttcctgtcgtatcacccccatccctttgcgcagaggacactgacagcacggtttcaagtcaacaatacgaggccaccccatgtgcagctcttgagaaagccggtgttgaccgccatggggctcttggcactgctggatgaagaacagctttgggccgaggtgtcacaggcgggtactgtgttggattcaaaccacacagtgggggtactcgcgtccgcgcacagaccgcagggacccgcagacgcgtggagagctgcagtacttatctacgcgtcggacgacacgagagcccatccgaatcgctccgtggccgtaaccctgcggttgcgcggagtcccgcctggtcccggacttgtctacgtcaccagatatctcgataatggactgtgcagccccgacggggagtggcgacggctggggcgacccgtctttccgactgctgaacagtttagaagaatgcgagcagccgaagatcccgtcgccgctgcacctcgacctcttcccgctggtggacgattgacgctccgccctgcccttcgccttccctcgttgcttctggtgcatgtgtgtgccaggcccgagaaaccaccgggacaggtgacaaggcttagagcgctcccgctgacgcaagggcaactggtgttggtgtggtcggacgagcacgtagggtccaagtgcctctggacatatgagattcagtttagccaggatgggaaggcatatactcctgtctcacgaaaaccttcgaccttcaatctttttgtctttagccccgacactggggctgtatccggatcgtaccgggtgagggcgttggattactgggctaggcctggcccgtttagcgatccagtgccgtacttggaagtccctgtccccagaggaccgcctagccctggtaacccgtgataagctgccttctgcggggcttgccttctggccatgcccttcttctctcccttgcacctgtacctcttggtctttgaataaagcctgagtaggaag

SEQ ID NO: 4390 - DNA, 1962 bp, Artificial Sequence
  derived and/or modified sequence
atgagacccctgagacccagagccgccctgctggccctgctggccagcctgctggccgccccccccgtggcccccgccgaggccccccacctggtgcacgtggacgccgccagagccctgtggcccctgagaagattctggagaagcaccggcttctgcccccccctgccccacagccaggccgaccagtacgtgctgagctgggaccagcagctgaacctggcctacgtgggcgccgtgccccacagaggcatcaagcaggtgagaacccactggctgctggagctggtgaccaccagaggcagcaccggcagaggcctgagctacaacttcacccacctggacggctacctggacctgctgagagagaaccagctgctgcccggcttcgagctgatgggcagcgccagcggccacttcaccgacttcgaggacaagcagcaggtgttcgagtggaaggacctggtgagcagcctggccagaagatacatcggcagatacggcctggcccacgtgagcaagtggaacttcgagacctggaacgagcccgaccaccacgacttcgacaacgtgagcatgaccatgcagggcttcctgaactactacgacgcctgcagcgagggcctgagagccgccagccccgccctgagactgggcggccccggcgacagcttccacaccccccccagaagccccctgagctggggcctgctgagacactgccacgacggcaccaacttcttcaccggcgaggccggcgtgagactggactacatcagcctgcacagaaagggcgccagaagcagcatcagcatcctggagcaggagaaggtggtggcccagcagatcagacagctgttccccaagttcgccgacacccccatctacaacgacgaggccgaccccctggtgggctggagcctgccccagccctggagagccgacgtgacctacgccgccatggtggtgaaggtgatcgcccagcaccagaacctgctgctggccaacaccaccagcgccttcccctacgccctgctgagcaacgacaacgccttcctgagctaccacccccaccccttcgcccagagaaccctgaccgccagattccaggtgaacaacaccagacccccccacgtgcagctgctgagaaagcccgtgctgaccgccatgggcctgctggccctgctggacgaggagcagctgtgggccgaggtgagccaggccggcaccgtgctggacagcaaccacaccgtgggcgtgctggccagcgcccacagaccccagggccccgccgacgcctggagagccgccgtgctgatctacgccagcgacgacaccagagcccaccccaacagaagcgtggccgtgaccctgagactgagaggcgtgccccccggccccggcctggtgtacgtgaccagatacctggacaacggcctgtgcagccccgacggcgagtggagaagactgggcagacccgtgttccccaccgccgagcagttcagaagaatgagagccgccgaggaccccgtggccgccgcccccagacccctgcccgccggcggcagactgaccctgagacccgccctgagactgcccagcctgctgctggtgcacgtgtgcgccagacccgagaagccccccggccaggtgaccagactgagagccctgcccctgacccagggccagctggtgctggtgtggagcgacgagcacgtgggcagcaagtgcctgtggacctacgagatccagttcagccaggacggcaaggcctacacccccgtgagcagaaagcccagcaccttcaacctgttcgtgttcagccccgacaccggcgccgtgagcggcagctacagagtgagagccctggactactgggccagacccggccccttcagcgaccccgtgccctacctggaggtgcccgtgcccagaggcccccccagccccggcaacccctag

SEQ ID NO: 4391 - DNA, 1962 bp, Artificial Sequence
  derived and/or modified sequence
atgcggcctcttcgacccagggcagccttgctcgctttgctagcttccttgctggcggcacccccagtcgcccctgccgaggcccctcatcttgttcatgttgatgcagcacgggccttgtggccactcagacgtttttggcggagcaccggattctgtcccccactgccccactcccaggctgaccaatacgtgctgtcttgggaccagcagttaaatttggcttacgtcggcgcagtcccccacaggggaattaaacaggtgcggactcattggctgctggaactggtgaccaccagaggttcgactggccgcggactgtcctacaacttcacgcacctggatgggtatctcgacttgctcagggaaaaccaactcctcccaggctttgaactcatgggcagtgcttctggacacttcaccgacttcgaggacaaacagcaggtgtttgagtggaaggacctggtgtcctctctagctcgacggtacattgggcgctatggccttgcccatgtgtcgaaatggaactttgaaacatggaatgaacccgaccaccatgatttcgacaatgtgtcaatgaccatgcaggggttcttgaactactacgatgcctgctctgaaggcctgagagctgcatctcccgccttacgcctgggcggtcctggcgacagcttccatacacctccaagatctcccctctcctggggcttgctcagacattgtcacgacggaactaactttttcacaggtgaagcgggtgtacgactggattacatctccctgcatcgaaaaggcgcccggtcctccatttccatcctcgagcaagaaaaggtggtggctcagcagatccgccaattattccccaaattcgcagacacccccatctacaacgatgaagccgatcccctggtgggatggagcttacctcaaccttggcgcgccgatgttacctatgccgccatggttgttaaagtcatcgcccagcatcagaacctgctgctggctaacactacctctgcttttccatacgcactgcttagcaatgataacgcttttctgtcctaccatccccatccattcgcccaaaggaccttgacagccagattccaggtgaacaacaccagaccaccacatgtgcagctactccgaaaacctgtactgactgccatgggcttactggctctgttagacgaagaacagctgtgggcagaggtcagccaggcaggcacggtgctggacagcaatcataccgtgggtgtgctcgcttctgctcaccgccctcagggccccgctgatgcttggcgggccgccgtcctgatctacgcttctgatgacacccgtgcccaccctaatcgctcggtggccgtcacactccgactgagaggtgtgccccccggacctgggttagtatatgtgactagatatctagacaatggtctgtgcagccccgatggggaatggagacgccttggaagaccggtgttccctacagcagagcaattccgtcggatgcgagctgcggaagatcccgttgcagccgctccacggccgcttccggccggcggacgtctgacactcaggcccgcgttgcgccttccctccctgttgttagtgcatgtttgtgcacggccagagaagccacccggacaggtcactcgactgagggcccttcctctgacccagggacagctggttttagtgtggtcggatgagcatgttggtagtaagtgcctgtggacttacgagatccagttcagccaggatggaaaggcttacaccccagtttccagaaaacccagcaccttcaatctgtttgtgttcagcccagataccggagccgttagcggtagctacagggtacgtgccttagattactgggcccgtccaggtcccttttctgatccagtgccctatctggaggtacccgtacctcgggggccgcctagccctgggaacccctag

SEQ ID NO: 4392 - DNA, 1962 bp, Artificial Sequence
  derived and/or modified sequence
atgaggcccctgcggccccgggccgccctgctggccctgctggccagcctgctggccgcccctcctgtggccccagctgaggccccccacctggtgcacgtggatgctgcccgggccctgtggcccctgcggcgcttctggaggagcacaggcttctgcccccccctgccccacagccaggccgaccagtatgtgctgtcctgggaccagcagctgaacctggcctacgtgggcgctgtgccccaccggggcatcaagcaggtgaggacccactggctgctggagctggtgaccacccggggcagcacaggccggggcctgagctacaacttcacccacctggatggctacctggacctgctgcgggagaaccagctgctgcccggctttgagctgatgggcagcgccagcggccacttcacagactttgaggacaagcagcaggtgtttgagtggaaggacctggtgagcagcctggcccggcgctacatcggccgctatggcctggcccacgtgtccaagtggaactttgagacctggaatgaaccagaccaccacgactttgacaacgtgtccatgaccatgcagggcttcctgaactactatgatgcctgcagcgagggcctgcgggccgccagccctgccctgcggctgggcggccctggggacagcttccacaccccacccaggagccccctgtcctggggcctgctgcggcactgccatgatggcaccaacttcttcaccggggaggccggcgtgcggctggactacatcagcctgcacaggaagggggcccggagcagcatcagcatcctggagcaggagaaggtggtggcccagcagatccggcagctgttccccaagtttgctgacacccccatctacaatgatgaggccgaccccctggtgggctggagcctgccccagccctggagggcagatgtgacctatgctgccatggtggtgaaggtgattgcccagcaccagaacctgctgctggccaacaccaccagcgccttcccctatgccctgctgagcaatgacaatgccttcctgagctaccacccccacccctttgcccagaggaccctgacagcccgcttccaggtgaacaacacccggcccccccacgtgcagctgctgaggaagcctgtgctgacagccatgggcctgctggccctgctggatgaggagcagctgtgggccgaggtgtcccaggccggcaccgtgctggacagcaaccacacagtgggcgtgctggccagcgcccaccggccccagggccctgcagatgcctggagggctgctgtgctgatctatgccagtgatgacacccgggcccaccccaacagatctgtggccgtgaccctgcggctgcggggcgtgcccccaggccctggcctggtgtatgtgacccgctacctggacaatggcctgtgcagcccagatggagagtggaggcggctgggccggcctgtgttccccacagctgagcagttccggaggatgagagctgctgaggaccctgtggccgccgccccccggcccctgcctgctgggggccgcctgaccctgcggcctgccctgcggctgcccagcctgctgctggtgcacgtgtgtgcccggcctgagaagcccccaggccaggtgacccggctgcgggccctgcccctgacccagggccagctggtgctggtgtggagcgatgagcacgtgggcagcaagtgcctgtggacctatgagatccagttcagccaggacggcaaggcctacacccctgtgtccaggaagcccagcaccttcaacctgtttgtgttctccccagacacaggagctgtgtctggcagctacagagtgcgggccctggactactgggcccggcccggccccttcagtgaccctgtgccctacctggaggtgcctgtgccccggggcccccccagccctggcaacccctag

SEQ ID NO: 4393 - DNA, 1962 bp, Artificial Sequence
  derived and/or modified sequence
atgcggcccctgcggccccgggccgccctgctggccctgctggcctctcttctggctgctccccctgtggctccagccgaagccccacatctggtgcacgtggatgcagcaagagcactctggccactgaggaggttttggaggtcaacagggttctgccccccgctgccacacagtcaggccgatcagtatgtgcttagctgggatcagcagctgaatctggcttacgtcggcgccgttcctcacaggggaattaagcaggtcaggacccattggctgctggagctggtcactacaaggggatccaccggtcgtgggctttcttataacttcactcaccttgacggctatttggatctgctgagagaaaaccagttacttccgggattcgagctcatgggtagcgccagcggtcactttaccgatttcgaggacaaacagcaagtattcgagtggaaagatttagtctcatccctggctaggaggtacatagggcggtacggcctcgcccacgtgtccaagtggaatttcgaaacctggaatgagcccgaccatcatgatttcgacaatgtgagcatgaccatgcagggctttctgaattactatgatgcctgttccgaaggcttacgagccgccagtcctgcgctgaggctcggagggcccggtgattcattccacacccctcccagatctccactgagttggggcctgctacgccattgccacgatggaaccaatttttttaccggagaggcgggggtccgactcgactacatctcattacaccgcaagggagccaggagttccatcagtattcttgagcaggaaaaagtggttgcccagcagatccgccagttattccctaaattcgctgatactcccatttataacgatgaagcggatccactggtaggatggtccctcccccagccttggcgtgctgatgtgacgtatgcagctatggtagtgaaggttattgcacagcatcaaaatctgcttctcgctaatactacatctgcttttccgtacgcattactatccaacgataatgcatttctgtcttaccaccctcatccgttcgcacagcgcacgttgacggcaagatttcaggtaaacaataccagaccaccccacgtgcagctgctgcgcaagccagtgctgaccgctatgggtctcttggccctcctggacgaggaacaactgtgggccgaggtcagtcaagccggtactgtgcttgattccaaccacacagtaggagttctcgccagcgcccaccgacctcagggccctgccgacgcttggcgcgcggccgtgctaatctacgccagcgacgatacccgcgcccaccccaaccggtccgtggctgtaaccctgcgactgcggggtgtgcctcccgggccggggttggtctatgtcaccaggtacctggataacggcctgtgtagcccagatggcgagtggcggagactgggccgccccgtgttccccactgcagaacagtttcgcagaatgagagccgccgaagatcctgttgccgccgcacctcgtcctttacctgcaggagggaggctcaccctccggccagctctgaggttgccaagcctcctactggttcacgtgtgcgctcggcctgagaaaccccccggccaagtcacaagactgagagcgctgcccttgacacaaggccagctggtgctggtctggagcgatgagcatgtcgggagtaagtgtctctggacatacgagatacaattctcccaagacggtaaagcatacacacccgtttctaggaagcctagtactttcaacctgttcgtgttttcccctgacaccggcgcggtcagcggttcctatcgggttcgggctttagactattgggcccgtcccggacccttttccgacccagtgccctacctcgaggttccagtgccaagggggccgccgtccccagggaatccctag

SEQ ID NO: 4394 - DNA, 1962 bp, Artificial Sequence
  derived and/or modified sequence
atgagaccattgagaccaagggcggcattactagcattgctagcttcactgttggccgcaccaccggtggctcccgctgaagctccacatttagtacacgtggatgcagcaagggccttgtggcctctgcggagattctggaggtcgaccgggttctgcccacccctcccacactcacaggcagaccagtatgtcctgtcttgggaccaacagctaaatcttgcatacgtgggagctgtaccacacagaggtatcaagcaggtacgtacacattggctgctcgaactcgtgacgacacggggatctaccggcaggggtctgtcatataatttcacgcacctggatgggtacctggacctgctcagagagaatcagctgctcccaggctttgagcttatggggtcagcttctggacacttcacagatttcgaagacaagcagcaggtgtttgaatggaaggatctcgttagttcattggcacgcaggtacatcggaagatatggcctggctcatgtctctaagtggaactttgagacgtggaacgagcctgaccaccacgattttgacaatgtgtccatgacaatgcagggatttctcaattactatgatgcatgttctgaaggcctgcgcgctgcatctccggcactgaggttagggggacctggggactctttccacacccctcccaggagtccactatcctggggccttttgaggcattgccatgacggcactaactttttcaccggtgaggcaggcgtccggttggattatatttcacttcaccggaagggtgcacggtctagcataagtattctcgaacaagagaaggtcgtggcccagcagattaggcaattatttcctaagtttgccgacacccccatctacaacgacgaagccgatcctctcgtaggttggtctctcccccaaccatggcgagcagacgtgacctacgccgctatggtcgtcaaagtgattgcacaacaccagaatctcctacttgccaatacaacgagcgcattcccctacgcactgctgagtaacgataacgcatttctgtcctaccacccacacccatttgctcagcgcaccctaaccgcaagatttcaagtgaataatacccgacctccccacgtgcaactcctccgaaagccggtcttgactgccatggggctgctggctttgctggatgaggagcagctctgggccgaggtctcacaagcaggcaccgtgctggactccaaccacacggtgggagtgttagctagtgctcacaggccccagggcccagccgacgcctggagggcagctgtgctcatttatgcgtctgatgatacacgggctcaccccaatcggtccgtcgcagtgacactgaggcttaggggggttcctcccggacctggactggtgtatgtgacaagatacctagacaatgggctgtgtagccctgacggagaatggcggagacttggacgtcctgtgttccctacagctgaacaattccgaaggatgcgggctgcggaggacccggtggctgcggctcccagacccctgcccgctggcggacgactcacgctcagacctgctttgaggttgccgtcactccttctcgtgcatgtgtgcgctaggcctgagaagcctcctggacaggtgactcggctccgggcactacccctgacccaggggcaattggtgctggtctggtctgacgaacacgttggcagcaaatgcttgtggacgtacgagatccagttttcacaggacggaaaagcgtatactcccgttagccggaaaccgagcaccttcaacctgtttgtgtttagtcctgacaccggcgcagtcagcggcagttacagagttcgcgctctggactactgggccaggcccggtccctttagcgacccagtgccttatttggaggtgccagtccccaggggacccccatcacctgggaacccatag

SEQ ID NO: 4395 - DNA, 2163 bp, Artificial Sequence
  derived and/or modified sequence
gtcacatggggtgcgcgcccagactccgacccggaggcggaaccggcagtgcagcccgaagccccgcagtccccgagcacgcgtggccatgcgtcccctgcgcccccgcgccgcgctgctggcgctcctggcctcgctcctggccgcgcccccggtggccccggccgaggccccgcacctggtgcatgtggacgcggcccgcgcgctgtggcccctgcggcgcttctggaggagcacaggcttctgccccccgctgccacacagccaggctgaccagtacgtcctcagctgggaccagcagctcaacctcgcctatgtgggcgccgtccctcaccgcggcatcaagcaggtccggacccactggctgctggagcttgtcaccaccagggggtccactggacggggcctgagctacaacttcacccacctggacgggtacctggaccttctcagggagaaccagctcctcccagggtttgagctgatgggcagcgcctcgggccacttcactgactttgaggacaagcagcaggtgtttgagtggaaggacttggtctccagcctggccaggagatacatcggtaggtacggactggcgcatgtttccaagtggaacttcgagacgtggaatgagccagaccaccacgactttgacaacgtctccatgaccatgcaaggcttcctgaactactacgatgcctgctcggagggtctgcgcgccgccagccccgccctgcggctgggaggccccggcgactccttccacaccccaccgcgatccccgctgagctggggcctcctgcgccactgccacgacggtaccaacttcttcactggggaggcgggcgtgcggctggactacatctccctccacaggaagggtgcgcgcagctccatctccatcctggagcaggagaaggtcgtcgcgcagcagatccggcagctcttccccaagttcgcggacacccccatttacaacgacgaggcggacccgctggtgggctggtccctgccacagccgtggagggcggacgtgacctacgcggccatggtggtgaaggtcatcgcgcagcatcagaacctgctactggccaacaccacctccgccttcccctacgcgctcctgagcaacgacaatgccttcctgagctaccacccgcaccccttcgcgcagcgcacgctcaccgcgcgcttccaggtcaacaacacccgcccgccgcacgtgcagctgttgcgcaagccggtgctcacggccatggggctgctggcgctgctggatgaggagcagctctgggccgaagtgtcgcaggccgggaccgtcctggacagcaaccacacggtgggcgtcctggccagcgcccaccgcccccagggcccggccgacgcctggcgcgccgcggtgctgatctacgcgagcgacgacacccgcgcccaccccaaccgcagcgtcgcggtgaccctgcggctgcgcggggtgccccccggcccgggcctggtctacgtcacgcgctacctggacaacgggctctgcagccccgacggcgagtggcggcgcctgggccggcccgtcttccccacggcagagcagttccggcgcatgcgcgcggctgaggacccggtggccgcggcgccccgccccttacccgccggcggccgcctgaccctgcgccccgcgctgcggctgccgtcgcttttgctggtgcacgtgtgtgcgcgccccgagaagccgcccgggcaggtcacgcggctccgcgccctgcccctgacccaagggcagctggttctggtctggtcggatgaacacgtgggctccaagtgcctgtggacatacgagatccagttctctcaggacggtaaggcgtacaccccggtcagcaggaagccatcgaccttcaacctctttgtgttcagcccagacacaggtgctgtctctggctcctaccgagttcgagccctggactactgggcccgaccaggccccttctcggaccctgtgccgtacctggaggtccctgtgccaagagggcccccatccccgggcaatccatgagcctgtgctgagccccagtgggttgcacctccaccggcagtcagcgagctggggctgcactgtgcccatgctgccctcccatcaccccctttgcaatatatttttatatttta

SEQ ID NO: 4396 - DNA, 1962 bp, Artificial Sequence
  derived and/or modified sequence
atgaggccattaagacctcgcgctgccctcttggcattattagcatcattactggcggctcctccagtcgcgccggcggaggcaccacacttggtgcatgtggatgccgcgcgtgccctttggccccttagaaggttctggcgctcaactggcttctgcccccctctgcctcattcccaggccgaccagtatgtgctgagctgggaccaacaactgaacctcgcttatgtcggggcggtaccccacagggggattaagcaggtgcgcacgcattggctgctggaactcgtgactactagaggctcaaccgggcgcgggctgtcctataactttacacacctggatggctacttggacttgctgcgggagaaccagctacttcccgggttcgaactcatgggctccgcgtccggccactttactgattttgaggacaagcagcaagttttcgaatggaaagacttggtgagctcgctcgctcgccgttatatcggcagatatggactcgcgcacgtgtccaagtggaatttcgaaacctggaatgagccggatcaccacgactttgacaacgtgtccatgacaatgcagggctttctgaattactatgatgcatgtagtgagggccttagagccgcctctcccgccttgaggctcggaggtcctggagatagcttccacactccacctcgttcacccttaagttggggactactgcggcactgccatgatggcacaaattttttcaccggagaggccggcgttcgacttgattatatttcactccataggaagggtgctcggtcgtcgatatcaatcctcgagcaggaaaaagtcgtggcccagcagatcagacagttatttccaaaattcgcagatacccccatatacaatgacgaggccgatccactggtaggctggtcccttccccagccatggcgtgccgatgttacctacgcggcgatggtcgtgaaggtgattgcccagcaccaaaatttactccttgctaacacaacctccgcatttccatacgcccttctttcaaatgacaatgctttcctgagctaccatccccatcctttcgcccagcgcactcttaccgcccgcttccaggtcaataatactcggccaccacatgtgcagttactgcgcaaacccgtacttaccgctatgggcttgcttgcactcttggatgaagaacagttgtgggcagaagtctctcaggcagggacagtgctcgatagcaatcacaccgtaggagtgttagccagcgcccataggccacagggacccgcagatgcatggcgagctgccgtcctgatttatgcctctgatgatactagagcacatccgaataggtctgtcgcagtgactctgcggctgcgcggggtgccccccggcccaggtctcgtgtacgttacaagataccttgataatggattgtgtagcccagatggtgagtggaggcgcctcggccgtcccgtgttcccgaccgccgagcaattccgccggatgagggctgctgaggaccccgtggccgcagccccccgacccctccccgccggtggtagactgaccctacggccagcattgcgtctgccaagcttgctgctcgtgcatgtgtgtgctagaccggagaagccgccaggtcaggtcacaaggctgcgagccctgcccttaactcagggacagttggtcctggtgtggagcgatgagcatgttggcagcaaatgtctgtggacctatgaaattcagttttcccaggatggtaaggcgtacacaccagtgtccagaaagccatccacgtttaaccttttcgtgtttagccccgacacaggagctgtgagcggatcttaccgggtgagagcgctcgattattgggcaagaccagggcctttttccgatcctgtcccttacttggaagtgccagttcctcgggggcctccttctcctggcaatccttag

SEQ ID NO: 4397 - DNA, 1962 bp, Artificial Sequence
  derived and/or modified sequence
atgcggcccctcagaccacgcgccgcactcttggctctcctcgcatccctcctcgctgcccctcccgttgccccggcagaggcccctcatctcgttcacgtagatgccgcccgtgccctctggccattacgaagattctggcggtcaactgggttctgtccccccctgcctcactcacaggctgatcagtatgtattatcctgggaccagcagctgaatctagcttatgtgggagccgtcccacatcgggggatcaaacaggttcgaacccactggctgctggagctagtaacaacccgcgggtcaaccggtcgagggctcagctacaactttacacatctcgacgggtatctcgatcttctccgggaaaatcagctgctgcccggtttcgagctcatggggtctgcgtccggacacttcaccgactttgaggacaagcagcaagtcttcgagtggaaggatttggttagttctctggctagacgatacataggcaggtacggactcgcacacgtatctaaatggaattttgaaacctggaatgaacccgatcaccacgacttcgacaacgtttcaatgactatgcagggtttcttgaattactatgatgcctgcagcgagggattgcgcgcagctagcccagcccttcgtctgggcggccccggagattcgtttcatacccccccacgaagccctctgagttggggcctcttaagacactgccacgacggcaccaacttcttcacaggggaggccggagtaagactcgattatattagtctacaccgtaagggcgccagatctagtatcagcatccttgagcaggagaaagtagtggcccagcagatcagacaactgtttcccaagttcgcagacactcctatctacaacgacgaagccgacccactggtcggatggagcctccctcaaccatggagggccgatgtcacctatgctgcaatggttgttaaggtcatagctcagcaccaaaatttgctcttagccaatacaacctccgccttcccctacgctctcttgtccaacgacaacgcctttctcagctatcatccacatccctttgcccaaagaacattgacagcaaggtttcaggtgaataatacacgacccccccacgtacaattgcttcggaaacctgtgttaacggccatgggactgttggcactacttgacgaggagcagttatgggccgaagttagtcaagcgggcaccgtgctggacagcaaccatactgttggcgttctggcatccgctcaccgaccgcagggtcctgccgatgcctggagagctgctgttttgatttatgctagtgatgatacacgagcccaccctaataggtccgtcgctgtaaccctgcggctgagaggtgtcccccctggacctggtctcgtatatgtaacccggtatcttgacaacggactctgttcacccgatggcgagtggaggcgactggggcgtcccgtcttcccgacagccgagcaatttaggcgcatgcgcgccgctgaagaccctgttgcagctgcacctcgaccgctccctgccggaggcaggcttacccttcgaccagccctgcgactgccaagtctcctcctggttcatgtgtgcgcacgcccagagaagcctccaggacaggtgaccaggctgagggctctccctttaacacaaggccagttagtgcttgtttggtccgacgaacatgtaggctcgaaatgcttgtggacatacgaaatccaatttagccaggatgggaaagcatatacaccagttagccgcaagccaagtacattcaatctgtttgttttcagtcccgataccggcgccgtctcgggcagctaccgtgtaagggcactcgattattgggctcgtccaggccctttctccgatcctgtcccgtacctggaagtccccgttccacgtggacccccctctcccggcaacccctag

SEQ ID NO: 4398 - RNA, 2105 nt, Artificial Sequence
  derived and/or modified sequence
gggaaauaagagagaaaagaagaguaagaagaaauauaagagccaccaugcggccacucaggcccagggcagcccuucucgcucugcucgcgucacuucucgcggcaccacccguggcgccagcugaagcgccacaccugguacacgucgaugccgcgagggcacucuggccccuuagacgguucuggcggucgacuggguucuguccaccccuuccccauucccaagcagaucaguaugucuugucaugggaccagcagcugaaccuggcauacgugggagccgucccgcacaggggcaucaagcaggucagaacucacuggcucuuggaguugguaacgacacggggaagcacgggaagggggcucucauacaacuucacgcaucucgacggguacuuggauuugcuucgcgagaaucaacugcugccaggguucgagcuuauggggucggccucgggacauuucacggacuucgaggacaagcagcaagucuuugaguggaaagaucucguaucaucacuugcgcgcagauacaucggacgguauggauuggcgcacguaucgaaauggaauuucgaaacguggaacgagcccgaccaccacgauuuugacaacgugucgaugacaaugcagggguucuugaacuacuaugaugcgugcagcgaaggucuuagagccgcguccccugcguugcgccuggguggaccaggggacagcuuccacacacccccgagaucaccgcugucgugggggcuuuugcgacauugucacgacggaaccaacuucuuuacuggagaggcuggugugagacuggacuacaucucccugcaucgcaagggagcgcggagcucgaucucgauucuugaacaggagaagguaguggcacagcagauucggcagcucuuccccaaauucgccgacacgccuaucuacaacgaugaagcggauccccucgucgguuggucacucccccaaccuuggcgagcggacgugacguaugccgccauggugguaaaggugaucgcgcaacaccagaauuugcuguuggcgaauacaacaucagcguucccauaugcguuguuguccaacgacaaugccuuccugucguaucacccccaucccuuugcgcagaggacacugacagcacgguuucaagucaacaauacgaggccaccccaugugcagcucuugagaaagccgguguugaccgccauggggcucuuggcacugcuggaugaagaacagcuuugggccgaggugucacaggcggguacuguguuggauucaaaccacacaguggggguacucgcguccgcgcacagaccgcagggacccgcagacgcguggagagcugcaguacuuaucuacgcgucggacgacacgagagcccauccgaaucgcuccguggccguaacccugcgguugcgcggagucccgccuggucccggacuugucuacgucaccagauaucucgauaauggacugugcagccccgacggggaguggcgacggcuggggcgacccgucuuuccgacugcugaacaguuuagaagaaugcgagcagccgaagaucccgucgccgcugcaccucgaccucuucccgcugguggacgauugacgcuccgcccugcccuucgccuucccucguugcuucuggugcaugugugugccaggcccgagaaaccaccgggacaggugacaaggcuuagagcgcucccgcugacgcaagggcaacugguguugguguggucggacgagcacguaggguccaagugccucuggacauaugagauucaguuuagccaggaugggaaggcauauacuccugucucacgaaaaccuucgaccuucaaucuuuuugucuuuagccccgacacuggggcuguauccggaucguaccgggugagggcguuggauuacugggcuaggccuggcccguuuagcgauccagugccguacuuggaagucccuguccccagaggaccgccuagcccugguaacccgugauaagcugccuucugcggggcuugccuucuggccaugcccuucuucucucccuugcaccuguaccucuuggucuuugaauaaagccugaguaggaag

SEQ ID NO: 4399 - RNA, 1962 nt, Artificial Sequence
  derived and/or modified sequence
augaggccauuaagaccucgcgcugcccucuuggcauuauuagcaucauuacuggcggcuccuccagucgcgccggcggaggcaccacacuuggugcauguggaugccgcgcgugcccuuuggccccuuagaagguucuggcgcucaacuggcuucugccccccucugccucauucccaggccgaccaguaugugcugagcugggaccaacaacugaaccucgcuuaugucggggcgguaccccacagggggauuaagcaggugcgcacgcauuggcugcuggaacucgugacuacuagaggcucaaccgggcgcgggcuguccuauaacuuuacacaccuggauggcuacuuggacuugcugcgggagaaccagcuacuucccggguucgaacucaugggcuccgcguccggccacuuuacugauuuugaggacaagcagcaaguuuucgaauggaaagacuuggugagcucgcucgcucgccguuauaucggcagauauggacucgcgcacguguccaaguggaauuucgaaaccuggaaugagccggaucaccacgacuuugacaacguguccaugacaaugcagggcuuucugaauuacuaugaugcauguagugagggccuuagagccgccucucccgccuugaggcucggagguccuggagauagcuuccacacuccaccucguucacccuuaaguuggggacuacugcggcacugccaugauggcacaaauuuuuucaccggagaggccggcguucgacuugauuauauuucacuccauaggaagggugcucggucgucgauaucaauccucgagcaggaaaaagucguggcccagcagaucagacaguuauuuccaaaauucgcagauacccccauauacaaugacgaggccgauccacugguaggcuggucccuuccccagccauggcgugccgauguuaccuacgcggcgauggucgugaaggugauugcccagcaccaaaauuuacuccuugcuaacacaaccuccgcauuuccauacgcccuucuuucaaaugacaaugcuuuccugagcuaccauccccauccuuucgcccagcgcacucuuaccgcccgcuuccaggucaauaauacucggccaccacaugugcaguuacugcgcaaacccguacuuaccgcuaugggcuugcuugcacucuuggaugaagaacaguugugggcagaagucucucaggcagggacagugcucgauagcaaucacaccguaggaguguuagccagcgcccauaggccacagggacccgcagaugcauggcgagcugccguccugauuuaugccucugaugauacuagagcacauccgaauaggucugucgcagugacucugcggcugcgcggggugccccccggcccaggucucguguacguuacaagauaccuugauaauggauuguguagcccagauggugaguggaggcgccucggccgucccguguucccgaccgccgagcaauuccgccggaugagggcugcugaggaccccguggccgcagccccccgaccccuccccgccggugguagacugacccuacggccagcauugcgucugccaagcuugcugcucgugcaugugugugcuagaccggagaagccgccaggucaggucacaaggcugcgagcccugcccuuaacucagggacaguugguccugguguggagcgaugagcauguuggcagcaaaugucuguggaccuaugaaauucaguuuucccaggaugguaaggcguacacaccaguguccagaaagccauccacguuuaaccuuuucguguuuagccccgacacaggagcugugagcggaucuuaccgggugagagcgcucgauuauugggcaagaccagggccuuuuuccgauccugucccuuacuuggaagugccaguuccucgggggccuccuucuccuggcaauccuuag

SEQ ID NO: 4400 - RNA, 1962 nt, Artificial Sequence
  derived and/or modified sequence
augcggccccucagaccacgcgccgcacucuuggcucuccucgcaucccuccucgcugccccucccguugccccggcagaggccccucaucucguucacguagaugccgcccgugcccucuggccauuacgaagauucuggcggucaacuggguucugucccccccugccucacucacaggcugaucaguauguauuauccugggaccagcagcugaaucuagcuuaugugggagccgucccacaucgggggaucaaacagguucgaacccacuggcugcuggagcuaguaacaacccgcgggucaaccggucgagggcucagcuacaacuuuacacaucucgacggguaucucgaucuucuccgggaaaaucagcugcugcccgguuucgagcucauggggucugcguccggacacuucaccgacuuugaggacaagcagcaagucuucgaguggaaggauuugguuaguucucuggcuagacgauacauaggcagguacggacucgcacacguaucuaaauggaauuuugaaaccuggaaugaacccgaucaccacgacuucgacaacguuucaaugacuaugcaggguuucuugaauuacuaugaugccugcagcgagggauugcgcgcagcuagcccagcccuucgucugggcggccccggagauucguuucauacccccccacgaagcccucugaguuggggccucuuaagacacugccacgacggcaccaacuucuucacaggggaggccggaguaagacucgauuauauuagucuacaccguaagggcgccagaucuaguaucagcauccuugagcaggagaaaguaguggcccagcagaucagacaacuguuucccaaguucgcagacacuccuaucuacaacgacgaagccgacccacuggucggauggagccucccucaaccauggagggccgaugucaccuaugcugcaaugguuguuaaggucauagcucagcaccaaaauuugcucuuagccaauacaaccuccgccuuccccuacgcucucuuguccaacgacaacgccuuucucagcuaucauccacaucccuuugcccaaagaacauugacagcaagguuucaggugaauaauacacgacccccccacguacaauugcuucggaaaccuguguuaacggccaugggacuguuggcacuacuugacgaggagcaguuaugggccgaaguuagucaagcgggcaccgugcuggacagcaaccauacuguuggcguucuggcauccgcucaccgaccgcaggguccugccgaugccuggagagcugcuguuuugauuuaugcuagugaugauacacgagcccacccuaauagguccgucgcuguaacccugcggcugagagguguccccccuggaccuggucucguauauguaacccgguaucuugacaacggacucuguucacccgauggcgaguggaggcgacuggggcgucccgucuucccgacagccgagcaauuuaggcgcaugcgcgccgcugaagacccuguugcagcugcaccucgaccgcucccugccggaggcaggcuuacccuucgaccagcccugcgacugccaagucuccuccugguucaugugugcgcacgcccagagaagccuccaggacaggugaccaggcugagggcucucccuuuaacacaaggccaguuagugcuuguuugguccgacgaacauguaggcucgaaaugcuuguggacauacgaaauccaauuuagccaggaugggaaagcauauacaccaguuagccgcaagccaaguacauucaaucuguuuguuuucagucccgauaccggcgccgucucgggcagcuaccguguaagggcacucgauuauugggcucguccaggcccuuucuccgauccugucccguaccuggaaguccccguuccacguggaccccccucucccggcaaccccuag

SEQ ID NO: 4401 - protein, 583 aa, Artificial Sequence
  derived and/or modified sequence
MKLLHVFLLFLCFHLRFCKVTYTSQEDLVEKKCLAKKYTHLSCDKVFCQPWQRCIEGTCVCKLPYQCPKNGTAVCATNRRSFPTYCQQKSLECLHPGTKFLNNGTCTAEGKFSVSLKHGNTDSEGIVEVKLVDQDKTMFICKSSWSMREANVACLDLGFQQGADTQRRFKLSDLSINSTECLHVHCRGLETSLAECTFTKRRTMGYQDFADVVCYTQKADSPMDDFFQCVNGKYISQMKACDGINDCGDQSDELCCKACQGKGFHCKSGVCIPSQYQCNGEVDCITGEDEVGCAGFASVTQEETEILTADMDAERRRIKSLLPKLSCGVKNRMHIRRKRIVGGKRAQLGDLPWQVAIKDASGITCGGIYIGGCWILTAAHCLRASKTHRYQIWTTVVDWIHPDLKRIVIEYVDRIIFHENYNAGTYQNDIALIEMKKDGNKKDCELPRSIPACVPWSPYLFQPNDTCIVSGWGREKDNERVFSLQWGEVKLISNCSKFYGNRFYEKEMECAGTYDGSIDACKGDSGGPLVCMDANNVTYVWGVVSWGENCGKPEFPGVYTKVANYFDWISYHVGRPFISQYNV

SEQ ID NO: 4402 - protein, 321 aa, Artificial Sequence
  derived and/or modified sequence
QVTYTSQEDLVEKKCLAKKYTHLSCDKVFCQPWQRCIEGTCVCKLPYQCPKNGTAVCATNRRSFPTYCQQKSLECLHPGTKFLNNGTCTAEGKFSVSLKHGNTDSEGIVEVKLVDQDKTMFICKSSWSMREANVACLDLGFQQGADTQRRFKLSDLSINSTECLHVHCRGLETSLAECTFTKRRTMGYQDFADVVCYTQKADSPMDDFFQCVNGKYISQMKACDGINDCGDQSDELCCKACQGKGFHCKSGVCIPSQYQCNGEVDCITGEDEVGCAAFAELCIEETEILTADMDAERRRIKSLLPKLSCGVKNRMHIRRKR

SEQ ID NO: 4403 - protein, 377 aa, Artificial Sequence
  derived and/or modified sequence
MKLLHVFLLFLCFHLRFCKVTYTSQEDLVEKKCLAKKYTHLSCDKVFCQPWQRCIEGTCVCKLPYQCPKNGTAVCATNRRSFPTYCQQKSLECLHPGTKFLNNGTCTAEGKFSVSLKHGNTDSEGIVEVKLVDQDKTMFICKSSWSMREANVACLDLGFQQGADTQRRFKLSDLSINSTECLHVHCRGLETSLAECTFTKRRTMGYQDFADVVCYTQKADSPMDDFFQCVNGKYISQMKACDGINDCGDQSDELCCKACQGKGFHCKSGVCIPSQYQCNGEVDCITGEDEVGCAGFASVTQEETEILTADMDAERRRIKSLLPKLSCGVKNRMHIRRKRIVGGKRAQLGKMKQISLDIFKGLHRVYAILEFCCIILK

SEQ ID NO: 4404 - DNA, 1752 bp, Artificial Sequence
  derived and/or modified sequence
atgaaacttctccacgtgttcctgttgtttctctgtttccacctccggttctgtaaagtgacatacacctctcaggaagatcttgtcgaaaagaaatgcctggccaagaaatatactcacctgagctgtgacaaggtcttctgtcagccatggcagcgttgcatcgaggggacctgtgtgtgtaaactcccttatcaatgccccaaaaacggcacagctgtgtgcgccactaaccgccgcagttttcccacatactgtcaacagaaatctttggagtgtctgcaccccggcacaaagtttctgaataatggcacttgtacagccgaagggaagttcagcgtgtccttaaaacatgggaatacggatagcgaagggatagtggaggtgaagctggtcgaccaggacaagaccatgttcatatgcaagagttcttggagtatgagagaggccaatgtcgcatgcctggatctgggtttccagcagggggctgacacgcagcggaggtttaagctcagcgaccttagcattaactctaccgagtgtctccacgtacactgtaggggcctggagacctccctggccgaatgcacgtttactaaaagaagaaccatgggttaccaggacttcgccgatgtggtatgctatactcagaaagccgattcaccaatggatgacttcttccagtgcgtgaatggcaagtatatctcccagatgaaagcctgcgacggtatcaatgattgtggcgatcagagtgatgagttatgttgcaaggcttgtcagggtaaaggcttccattgcaaatccggcgtgtgcataccttcacagtaccagtgtaatggcgaagtcgactgcattactggtgaagatgaggtgggatgcgccgggttcgcgtccgtcacgcaggaggaaactgagatcctgactgcagacatggacgctgaaaggcgccgtattaagtctcttctacccaagctgtcctgcggggtgaagaataggatgcacatccggaggaaacgcatcgtgggtggaaaaagggcccagctgggcgaccttccttggcaggtggccatcaaagatgccagcggaattacatgtggtggcatctatatcggcgggtgttggattttaacagcagcccactgcctgagggcttctaaaactcataggtaccagatctggaccacagtcgtggattggatccacccagacctgaagcgaatcgttattgagtacgtagaccggattatctttcatgaaaactacaacgccggcacgtaccagaatgatatcgccctaatcgagatgaagaaagacgggaataaaaaggactgcgaactcccacgctcaatacccgcctgcgtcccttggagtccatatctgttccagcccaatgatacttgcatcgtgtctggttggggtcgagagaaagataacgaaagagtgttctccctccagtggggagaagtgaaactgatcagcaactgttccaagttttatgggaaccggttttacgaaaaggaaatggagtgcgccggcacttatgacgggtcaatcgacgcgtgtaaaggtgatagcggcggccccctggtgtgcatggatgcaaacaacgtgacatatgtgtggggcgtggtgagctggggagaaaattgtgggaagccggaattccctggagtgtatactaaggtggcaaactatttcgactggatttcttatcatgtggggagaccatttatcagtcagtacaacgtgtag

SEQ ID NO: 4405 - DNA, 966 bp, Artificial Sequence
  derived and/or modified sequence
caggttacctatacttctcaggaagaccttgttgaaaagaagtgtctggcgaaaaagtacacacacctgtcctgcgacaaggttttctgtcaaccttggcaaaggtgtattgaaggaacgtgcgtatgtaaactgccctatcaatgccctaaaaacgggaccgcggtatgcgcgactaatcgtagaagtttccctacctattgccagcagaaaagcctggagtgcctgcaccctggaaccaaattccttaataacggcacttgcacagccgaaggaaagtttagcgtaagtcttaagcacggtaacaccgatagtgaaggaattgtggaggttaagcttgtggaccaggacaaaacaatgttcatatgtaagtctagctggtcaatgagagaggccaacgtggcctgcctggatttggggttccaacagggtgctgatactcagcgacggttcaagctttccgacctgagtataaactcaaccgagtgcttacatgtgcactgccgggggttggagacgtccttggcagaatgtacattcactaaacggcgcacaatgggttatcaagatttcgctgacgtggtgtgctatacacagaaggcagattcccccatggacgattttttccagtgcgttaacgggaaatacattagccagatgaaggcctgtgatggtataaacgactgcggagaccagagcgacgagctctgctgtaaagcctgccagggcaaaggatttcactgcaagtctggggtgtgcattcctagtcagtaccaatgcaatggagaagtggattgcatcaccggagaagatgaggtcggttgcgctgcatttgctgagctgtgcattgaggagacagagatcctaacagctgacatggacgctgagcggcggcggataaagagccttctgcccaagctttcttgcggggtcaagaataggatgcatataaggcgcaagcgttag

SEQ ID NO: 4406 - DNA, 1134 bp, Artificial Sequence
  derived and/or modified sequence
atgaagctactgcacgtctttctcttattcctgtgctttcatttgcggttctgcaaggttacgtatacctcccaggaagacctggtcgagaagaagtgcctggctaagaaatacacacacctgtcctgcgataaagtcttttgtcagccttggcaaagatgcatcgaaggcacctgtgtgtgcaaactgccataccagtgtccaaaaaatgggacagccgtgtgtgcaaccaatcgacgctcattcccaacttactgtcaacagaagtccctcgagtgtctacatcccggcaccaagttcctaaacaacggcacttgcaccgccgaaggaaaattctctgtctcgctgaaacacggcaacaccgactcagagggaatcgtggaggtcaagcttgtagaccaagacaaaaccatgttcatttgcaagtcaagctggtccatgcgggaagctaacgttgcatgtttggatttgggattccaacagggcgccgatacgcagcgccgctttaagttgtccgatctttctattaatagcaccgagtgtctgcacgtgcattgtagggggttggagacatcactcgctgaatgcacattcaccaaacggagaacaatggggtatcaggactttgccgatgttgtttgttatacccagaaggctgactctcccatggatgactttttccaatgcgttaacggcaaatatatcagccagatgaaagcctgcgacggtataaacgactgcggagaccaatctgacgaactctgctgcaaagcttgccaaggaaaggggtttcattgcaagtcgggagtgtgtataccctcccagtaccaatgtaacggtgaggtggattgcatcacaggtgaagatgaggtagggtgtgcgggcttcgcatctgtcacccaggaggagaccgaaatcctgaccgctgatatggatgcagagcgcagacggatcaagtccttgttgcccaaactgtcatgcggggtcaagaaccgaatgcacatccgcaggaagcggattgtgggaggaaagcgggcgcaattagggaaaatgaagcagatctctctggatatctttaaggggcttcaccgtgtctatgctatcctggaattctgttgcatcatcctgaagtag

SEQ ID NO: 4407 - DNA, 1752 bp, Artificial Sequence
  derived and/or modified sequence
atgaagctgctgcacgtgttcctgctcttcctgtgcttccacctgcgcttctgcaaggtgacctacaccagccaggaggacctggtggagaagaagtgcctggccaagaagtacacccacctgagctgtgacaaggtgttctgccagccctggcagcgctgcatcgagggcacctgtgtgtgcaagctgccctaccagtgccccaagaatggaacagctgtgtgtgccaccaacagaagaagcttccccacctactgccagcagaagagcctggagtgcctgcaccctggcaccaagttcctgaacaacggcacctgcacagctgagggcaagttctctgtgtccctgaagcacggcaacacagattctgagggcatcgtggaggtgaagctggtggaccaggacaagaccatgttcatctgcaagagctcctggagcatgagggaggccaacgtggcctgcctggacctgggcttccagcagggcgctgacacccagaggcgcttcaagctgagtgacctgagcatcaacagcacagagtgcctgcacgtgcactgccggggcctggagaccagcctggctgaatgtaccttcaccaagaggaggaccatgggctaccaggactttgctgatgtggtgtgctacacccagaaggctgacagccccatggatgacttcttccagtgtgtgaatggcaagtacatcagccagatgaaggcctgtgatggcatcaatgactgtggggaccagagtgatgagctgtgctgcaaggcctgccagggcaagggcttccactgcaagagcggcgtgtgcatccccagccagtaccagtgcaatggagaggtggactgcatcaccggggaggatgaggtgggctgtgccggctttgcctctgtgacccaggaggagacagagatcctgacagctgacatggatgctgagcggcggcgcatcaagagcctgctgcccaagctgagctgtggggtgaagaacaggatgcacatccggaggaagagaattgtgggcggcaagagggcccagctgggggacctgccctggcaggtggccatcaaggatgccagcggcatcacctgtggcggcatctacatcggcggctgctggatcctgacagctgcccactgcctgcgggccagcaagacccaccgctaccagatctggaccaccgtggtggactggatccacccagacctgaagagaattgtgattgaatatgtggaccgcatcatcttccacgagaactacaatgccggcacctaccagaatgacatcgccctgattgagatgaagaaggatggcaacaagaaggactgtgagctgcccaggagcatcccagcctgtgtgccctggagcccctacctgttccagcccaatgacacctgcatcgtgtctggctggggccgggagaaggacaatgaaagagtcttcagcctgcagtggggcgaggtgaagctgatcagcaactgcagcaagttctacggcaaccgcttctatgagaaggagatggagtgtgccggcacctatgatggcagcattgatgcctgcaagggggacagcggcggccccctggtgtgcatggatgccaacaacgtgacctacgtgtggggcgtggtgtcctggggcgagaactgtgggaagccagagttccctggggtgtacaccaaggtggccaactactttgactggatctcctaccacgtgggccggcccttcatcagccagtacaacgtgtag

SEQ ID NO: 4408 - DNA, 966 bp, Artificial Sequence
  derived and/or modified sequence
caggtgacctacaccagccaggaggacctggtggagaagaagtgcctggccaagaagtacacccacctgagctgtgacaaggtgttctgccagccctggcagcgctgcatcgagggcacctgtgtgtgcaagctgccctaccagtgccccaagaatggaacagctgtgtgtgccaccaacagaagaagcttccccacctactgccagcagaagagcctggagtgcctgcaccctggcaccaagttcctgaacaacggcacctgcacagctgagggcaagttctctgtgtccctgaagcacggcaacacagattctgagggcatcgtggaggtgaagctggtggaccaggacaagaccatgttcatctgcaagagctcctggagcatgagggaggccaacgtggcctgcctggacctgggcttccagcagggcgctgacacccagaggcgcttcaagctgagtgacctgagcatcaacagcacagagtgcctgcacgtgcactgccggggcctggagaccagcctggctgaatgtaccttcaccaagaggaggaccatgggctaccaggactttgctgatgtggtgtgctacacccagaaggctgacagccccatggatgacttcttccagtgtgtgaatggcaagtacatcagccagatgaaggcctgtgatggcatcaatgactgtggggaccagagtgatgagctgtgctgcaaggcctgccagggcaagggcttccactgcaagagcggcgtgtgcatccccagccagtaccagtgcaatggagaggtggactgcatcaccggggaggatgaggtgggctgtgccgcctttgctgagctgtgcatcgaggagacagagatcctgacagctgacatggatgctgagcggcggcgcatcaagagcctgctgcccaagctgagctgtggggtgaagaacaggatgcacatccggaggaagaggtag

SEQ ID NO: 4409 - DNA, 1134 bp, Artificial Sequence
  derived and/or modified sequence
atgaagctgctgcacgtgttcctgctcttcctgtgcttccacctgcgcttctgcaaggtgacctacaccagccaggaggacctggtggagaagaagtgcctggccaagaagtacacccacctgagctgtgacaaggtgttctgccagccctggcagcgctgcatcgagggcacctgtgtgtgcaagctgccctaccagtgccccaagaatggaacagctgtgtgtgccaccaacagaagaagcttccccacctactgccagcagaagagcctggagtgcctgcaccctggcaccaagttcctgaacaacggcacctgcacagctgagggcaagttctctgtgtccctgaagcacggcaacacagattctgagggcatcgtggaggtgaagctggtggaccaggacaagaccatgttcatctgcaagagctcctggagcatgagggaggccaacgtggcctgcctggacctgggcttccagcagggcgctgacacccagaggcgcttcaagctgagtgacctgagcatcaacagcacagagtgcctgcacgtgcactgccggggcctggagaccagcctggctgaatgtaccttcaccaagaggaggaccatgggctaccaggactttgctgatgtggtgtgctacacccagaaggctgacagccccatggatgacttcttccagtgtgtgaatggcaagtacatcagccagatgaaggcctgtgatggcatcaatgactgtggggaccagagtgatgagctgtgctgcaaggcctgccagggcaagggcttccactgcaagagcggcgtgtgcatccccagccagtaccagtgcaatggagaggtggactgcatcaccggggaggatgaggtgggctgtgccggctttgcctctgtgacccaggaggagacagagatcctgacagctgacatggatgctgagcggcggcgcatcaagagcctgctgcccaagctgagctgtggggtgaagaacaggatgcacatccggaggaagagaattgtgggcggcaagagggcccagctgggcaagatgaagcagatcagcctggacatcttcaagggcctgcaccgggtgtatgccatcctggagttctgctgcatcatcctgaagtag

SEQ ID NO: 4410 - DNA, 1752 bp, Artificial Sequence
  derived and/or modified sequence
atgaagctgctgcacgtgttcctgctgttcctgtgcttccacctgcgcttctgtaaggtgacgtatacgtcacaggaagatttggtagagaaaaaatgcttggcaaaaaagtatacacatctgagctgcgacaaggtattctgtcagccttggcaacggtgcatagaagggacgtgcgtttgtaaactgccataccagtgtcccaaaaatgggacggccgtctgcgccacaaatcgtagatctttccctacctactgtcagcagaagtcactggagtgtctgcacccaggaaccaaatttctgaataacggcacatgtacggccgagggtaagttttccgtctccctcaaacatggaaacaccgattccgaaggcatagtggaggtgaagttggtagatcaggacaagacgatgttcatttgtaagagtagctggagcatgcgggaggcaaatgtggcctgcctggacctcggatttcagcagggcgcagatacacagagacgcttcaagctgtcagacctgtccataaacagcaccgagtgcttgcacgtgcactgtcggggactagaaactagtctggctgaatgcacctttactaaacgacggacaatgggatatcaggacttcgcagacgtggtgtgttacacgcagaaagccgattctcctatggatgactttttccagtgtgtaaatggaaagtatatctcccagatgaaagcgtgtgacggcattaacgactgcggggaccagagtgatgaactgtgttgcaaagcatgtcagggtaaaggcttccattgtaagagtggcgtttgtattcctagccaatatcaatgtaacggggaagttgactgcataactggcgaggacgaagtgggctgtgccgggttcgccagcgtcacccaggaggaaacagaaatcttaacagccgatatggacgctgaaagaaggcgtattaagagcctgctccccaagctgtcctgcggagtcaaaaacaggatgcacattaggaggaagaggatagtaggagggaaaagggcacaacttggcgacctcccatggcaagttgccatcaaagatgcatccggtattacctgcggcggaatttacattggtggctgctggatcctgacagccgctcattgcctgagggccagcaagacgcatcgctaccagatttggactaccgttgtggactggattcatccagatttgaaacgtatcgtgatcgagtacgtggataggataatatttcatgagaactacaacgcaggtacctatcagaatgacatcgcactgatagagatgaagaaagacggaaacaagaaggactgtgaattgccacgatctattccagcgtgcgtaccctggtctccatatctgtttcagcccaacgacacctgcatagtatcaggttggggacgcgagaaggataatgagcgagtgttctcgttgcaatggggcgaagtgaaattgatttcgaattgcagcaaattctacggaaatcgtttttatgagaaggagatggagtgcgccgggacctacgatgggagcatcgatgcatgcaagggcgactctggcggccctttagtttgtatggatgctaataacgtcacatacgtgtggggggtcgtgagctggggcgagaactgtggtaaacctgagttcccaggtgtctacacaaaggtcgctaattacttcgactggataagctaccatgtagggcgccctttcatctcccagtataatgtgtag

SEQ ID NO: 4411 - DNA, 966 bp, Artificial Sequence
  derived and/or modified sequence
caggtgacctacaccagccaggaggacctggtggagaagaagtgcttggcgaagaaatacacacacctaagctgtgacaaagtcttctgccaaccttggcagagatgcatcgagggcacatgtgtctgtaagctgccctaccagtgcccgaaaaacggtacagcagtgtgtgcaacaaataggcgctctttccccacttactgtcagcaaaagagcctcgagtgtctgcaccccgggaccaaattccttaataatggcacttgtaccgccgagggcaaattttccgtctctctgaaacatggcaacacagattctgaaggaatcgtggaagtcaaactcgtggaccaggacaaaacgatgttcatttgtaagagttcctggagcatgagggaggccaatgttgcctgtttggacctcggctttcagcaaggcgccgatacacagaggcgcttcaaactaagcgatctctcaatcaattccactgaatgccttcatgtgcactgcaggggcctggagaccagcctggccgaatgtacatttaccaagcgccgcaccatggggtatcaggacttcgctgatgtcgtatgttacacccagaaagccgatagtcctatggacgacttcttccagtgcgtaaacgggaagtacatcagtcagatgaaggcatgtgatggcattaatgactgtggtgatcaatctgatgagctttgctgtaaggcgtgccagggaaaaggatttcactgcaagtcaggtgtctgcatccctagtcagtaccagtgtaacggagaggtggattgtatcacgggcgaggacgaagttggctgcgcagcctttgccgagctttgcatcgaggagaccgaaatactcacagccgatatggacgccgagaggagacgaatcaagtcactcctaccaaaactgtcttgtggtgtcaagaaccgcatgcacattaggcgcaagcgctag

SEQ ID NO: 4412 - DNA, 1134 bp, Artificial Sequence
  derived and/or modified sequence
atgaagctgctgcacgtgttcctgctgttcctgtgcttccacctgcgattttgcaaggttacatatacaagtcaagaagacttggtggaaaaaaaatgtcttgcaaagaagtacacgcatcttagctgcgataaggtcttttgccaaccgtggcagaggtgtatcgagggcacctgcgtgtgcaagctaccataccaatgcccgaagaacggcactgcggtctgcgccaccaacaggagatcctttcccacctactgccagcagaaaagtctcgagtgccttcatcccggcacaaaatttctgaacaatggcacttgtacagctgaggggaagttttctgtgtcactgaagcacggcaatactgatagtgaaggtattgttgaggtgaagctcgtggatcaggacaagaccatgtttatatgtaaatcctcctggtctatgagagaggcgaatgtagcgtgcctggatctgggctttcagcagggcgctgatacgcagaggcgtttcaaactgagcgatttatcgattaattccacagaatgcctgcatgtgcattgcagaggactggagacaagtctggctgagtgcacgtttacaaagcggcgcacaatgggctatcaggattttgctgatgtcgtatgctatacacagaaggccgattctcctatggacgatttctttcagtgtgtgaacgggaaatacatctcccagatgaaagcctgcgatggcattaacgactgtggagatcagtctgacgaactttgctgcaaggcatgccagggcaaggggttccactgcaagtctggcgtgtgcatcccgagccagtaccagtgtaacggggaagtcgactgtattactggagaggatgaagtaggttgtgctggctttgccagcgtcacccaggaagaaaccgaaattctgacggctgacatggatgctgagcgccggaggattaagtctctattacccaaacttagctgtggggtcaagaatagaatgcacatccgtagaaaacgaatcgtggggggtaagagagctcagcttgggaagatgaaacagatctcactggacatcttcaagggcctgcaccgcgtttacgcaattctggagttctgttgcatcattctgaagtag

SEQ ID NO: 4413 - DNA, 1752 bp, Artificial Sequence
  derived and/or modified sequence
atgaaacttcttcatgtgtttctcttgtttctatgtttccatctacgcttttgtaaggttacatatacgtcccaggaggacctggttgaaaagaaatgcttagctaagaagtatacacacctgagttgcgataaagtcttctgtcagccctggcagaggtgcattgaaggcacctgtgtgtgtaaactcccctatcagtgtcccaaaaacggcaccgctgtatgcgccaccaacaggaggagttttccaacttattgccagcagaaatcccttgaatgcctacatcccggaacaaaattcctcaataatggcacatgcaccgccgagggcaaattcagtgtatcactcaagcacggtaacactgatagtgagggaatcgtggaagttaagctggtggaccaagataagactatgtttatctgcaaaagtagttggagcatgcgggaagcgaatgtggcctgtctggatttgggcttccaacagggagctgatacacagaggagattcaagctgtctgatctgtccatcaattcaacggagtgtctccatgtgcactgtaggggccttgaaacctcccttgcagagtgcacctttacgaagcggagaacaatggggtaccaagattttgccgacgttgtctgctacactcaaaaggccgattcacctatggatgacttcttccagtgtgttaatggaaagtacatctcccaaatgaaggcttgtgatggtattaacgattgtggcgaccaaagtgacgagttgtgctgcaaagcgtgccaggggaagggtttccattgtaaaagcggtgtctgcatcccttcacagtaccaatgcaacggcgaggttgattgcatcaccggagaggacgaggtgggatgcgctggcttcgcctcagttactcaggaggaaacagagatcttaaccgcggatatggatgccgaaagaaggcgcatcaagtccctgttgccaaagctcagctgtggggtcaagaatcggatgcacattaggcggaaaagaatagttggaggcaagcgcgctcagttaggtgacttgccatggcaggtcgcaatcaaagacgcaagcggaattacatgcggtggcatctacataggcggttgttggatcctgaccgccgctcattgtctgagggcttctaagacacatcgttaccaaatttggacgactgttgtagattggattcacccagacctgaagcgaatagttattgaatatgtagaccgtattattttccatgaaaactataacgcgggtacataccagaacgatatcgctctgatcgagatgaaaaaggatggaaataaaaaggactgtgaactgccgcgatccattcccgcatgcgtgccatggagcccttaccttttccaacctaatgatacctgtatcgtgtctgggtggggccgtgaaaaagataatgagcgggtgttttcgctgcagtggggtgaggtgaaactgatatcgaattgcagcaagttctacggtaaccgattttacgaaaaagagatggagtgtgctggaacatacgatggttccattgatgcctgcaagggcgacagcgggggacccttggtctgcatggatgcgaacaacgtgacttatgtgtggggcgtcgttagctggggggagaactgtggcaaacccgaattccctggagtgtacaccaaggtggcaaactatttcgactggatcagctaccatgttgggagaccctttattagtcagtataacgtgtag

SEQ ID NO: 4414 - DNA, 966 bp, Artificial Sequence
  derived and/or modified sequence
caggtgacatacacctcacaggaggatcttgtcgaaaagaagtgtctggctaagaaatacacacatttgtcttgtgacaaggtgttctgtcaaccgtggcagcgctgcatcgagggaacttgtgtgtgcaaactgccttatcagtgccccaaaaatggcactgctgtatgtgccaccaatcgacggagttttcccacctactgccaacaaaaaagtttggagtgcctccaccccggtaccaagttcttgaacaacggcacatgcactgccgaggggaagtttagtgtgtcgctaaaacatggaaacactgattcagagggaattgtagaggtgaagctcgtggatcaagacaaaacgatgtttatttgcaagtcaagctggtccatgagagaggcaaacgttgcctgccttgacctaggcttccagcaaggcgctgatactcagcgacgtttcaagctcagcgatttatctatcaactcaaccgaatgcctgcacgtgcactgtagaggattggagactagtctcgccgagtgtacctttaccaagaggcgtacaatgggataccaggactttgcagatgtcgtgtgctacacacagaaggccgactcacccatggacgactttttccaatgcgtcaacggcaagtacatcagtcagatgaaggcctgcgacggtatcaatgactgcggcgaccaaagtgacgagctctgttgtaaagcctgccaggggaaggggttccattgcaaaagtggcgtttgcattccaagccagtatcagtgcaacggagaggttgactgcatcaccggggaggatgaggtcggctgcgcagcattcgcggaactctgcatcgaggagacagagattttgactgccgatatggatgctgaaagacgacgcattaagtctttgcttccaaagctgtcctgcggagtgaagaatcgtatgcacattcgacgaaaaagatag

SEQ ID NO: 4415 - DNA, 1134 bp, Artificial Sequence
  derived and/or modified sequence
atgaagctgttacatgtgttcctgctctttctttgcttccacttacgcttctgcaaggtgacgtacaccagtcaggaggatttagtcgagaagaaatgcctcgcgaaaaaatatacgcacctgagttgcgacaaggtcttctgccaaccctggcagcgctgcattgaaggcacttgcgtgtgtaagctgccttatcagtgccccaaaaatgggaccgccgtatgtgccactaatagaagaagttttcctacttactgccagcaaaagagtcttgagtgtctccatcctggcaccaagttcctgaataacgggacctgcaccgctgaaggaaaattttctgtgagtcttaagcacgggaataccgactccgaggggatcgttgaggttaagcttgtagatcaggataaaaccatgttcatatgtaaatcttcttggagtatgcgagaagccaatgtggcctgcctggacctggggttccaacagggggcagatacccagagacgttttaaactctctgatctcagcataaattccaccgagtgccttcacgtacactgtcggggtttggaaacgtcattagccgaatgcacatttaccaaacggcgtactatgggttatcaggatttcgcagatgtggtgtgctatacccagaaggctgattcccctatggacgacttctttcagtgtgtgaatggaaaatacattagtcagatgaaggcgtgcgacggcatcaacgattgtggagatcagtctgatgagttgtgttgcaaagcctgccagggtaaaggcttccactgcaagagcggggtttgcatcccttcacagtaccagtgtaacggtgaggtggactgtataaccggcgaggacgaggtcgggtgtgctggttttgctagcgtgacccaagaggagactgaaatactgacagccgatatggacgccgagcggcgtaggatcaagtccctgctgcctaaacttagctgtggggtcaagaatcgaatgcacattaggaggaagcggatagtcgggggaaagcgagcacaattaggaaaaatgaagcagatcagtctcgatatctttaaaggcttacaccgggtctacgctattctcgagttctgttgtattattttaaagtag

SEQ ID NO: 4416 - DNA, 2157 bp, Artificial Sequence
  derived and/or modified sequence
tctttaatgggaaggccattttttggtttcagttacggtaaatctctctggatttcagccaaattctttcagagttcaaaagtacaaagctctttaggaggtttgttcttttgaaacattttttcagaggttaaaaattaaatttcaaaagaatacctggagtggaaaagagttctcagcagagacaaagaccccgaacacctccaacatgaagcttcttcatgttttcctgttatttctgtgcttccacttaaggttttgcaaggtcacttatacatctcaagaggatctggtggagaaaaagtgcttagcaaaaaaatatactcacctctcctgcgataaagtcttctgccagccatggcagagatgcattgagggcacctgtgtttgtaaactaccgtatcagtgcccaaagaatggcactgcagtgtgtgcaactaacaggagaagcttcccaacatactgtcaacaaaagagtttggaatgtcttcatccagggacaaagtttttaaataacggaacatgcacagccgaaggaaagtttagtgtttccttgaagcatggaaatacagattcagagggaatagttgaagtaaaacttgtggaccaagataagacaatgttcatatgcaaaagcagctggagcatgagggaagccaacgtggcctgccttgaccttgggtttcaacaaggtgctgatactcaaagaaggtttaagttgtctgatctctctataaattccactgaatgtctacatgtgcattgccgaggattagagaccagtttggctgaatgtacttttactaagagaagaactatgggttaccaggatttcgctgatgtggtttgttatacacagaaagcagattctccaatggatgacttctttcagtgtgtgaatgggaaatacatttctcagatgaaagcctgtgatggtatcaatgattgtggagaccaaagtgatgaactgtgttgtaaagcatgccaaggcaaaggcttccattgcaaatcgggtgtttgcattccaagccagtatcaatgcaatggtgaggtggactgcattacaggggaagatgaagttggctgtgcaggctttgcatctgtgactcaagaagaaacagaaattttgactgctgacatggatgcagaaagaagacggataaaatcattattacctaaactatcttgtggagttaaaaacagaatgcacattcgaaggaaacgaattgtgggaggaaagcgagcacaactgggagacctcccatggcaggtggcaattaaggatgccagtggaatcacctgtgggggaatttatattggtggctgttggattctgactgctgcacattgtctcagagccagtaaaactcatcgttaccaaatatggacaacagtagtagactggatacaccccgaccttaaacgtatagtaattgaatacgtggatagaattattttccatgaaaactacaatgcaggcacttaccaaaatgacatcgctttgattgaaatgaaaaaagacggaaacaaaaaagattgtgagctgcctcgttccatccctgcctgtgtcccctggtctccttacctattccaacctaatgatacatgcatcgtttctggctggggacgagaaaaagataacgaaagagtcttttcacttcagtggggtgaagttaaactaataagcaactgctctaagttttacggaaatcgtttctatgaaaaagaaatggaatgtgcaggtacatatgatggttccatcgatgcctgtaaaggggactctggaggccccttagtctgtatggatgccaacaatgtgacttatgtctggggtgttgtgagttggggggaaaactgtggaaaaccagagttcccaggtgtttacaccaaagtggccaattattttgactggattagctaccatgtaggaaggccttttatttctcagtacaatgtataaaattgtgatctctctcttcattctattctttttctctcaagagttccatttaatggaaataaaacggtataattaataattctctaggggggaaaaatgaagcaaatctcactggatatttttaaaggtctccacagagtttatgccatattggaattttgttgtataattctcaaataaatattttggtgaagcat

SEQ ID NO: 4417 - DNA, 963 bp, Artificial Sequence
  derived and/or modified sequence
caggtcacttatacatctcaagaggatctggtggagaaaaagtgcttagcaaaaaaatatactcacctctcctgcgataaagtcttctgccagccatggcagagatgcattgagggcacctgtgtttgtaaactaccgtatcagtgcccaaagaatggcactgcagtgtgtgcaactaacaggagaagcttcccaacatactgtcaacaaaagagtttggaatgtcttcatccagggacaaagtttttaaataacggaacatgcacagccgaaggaaagtttagtgtttccttgaagcatggaaatacagattcagagggaatagttgaagtaaaacttgtggaccaagataagacaatgttcatatgcaaaagcagctggagcatgagggaagccaacgtggcctgccttgaccttgggtttcaacaaggtgctgatactcaaagaaggtttaagttgtctgatctctctataaattccactgaatgtctacatgtgcattgccgaggattagagaccagtttggctgaatgtacttttactaagagaagaactatgggttaccaggatttcgctgatgtggtttgttatacacagaaagcagattctccaatggatgacttctttcagtgtgtgaatgggaaatacatttctcagatgaaagcctgtgatggtatcaatgattgtggagaccaaagtgatgaactgtgttgtaaagcatgccaaggcaaaggcttccattgcaaatcgggtgtttgcattccaagccagtatcaatgcaatggtgaggtggactgcattacaggggaagatgaagttggctgtgcagcatttgcagaactatgcatagaagaaacagaaattttgactgctgacatggatgcagaaagaagacggataaaatcattattacctaaactatcttgtggagttaaaaacagaatgcacattcgaaggaaacga

SEQ ID NO: 4418 - DNA, 1218 bp, Artificial Sequence
  derived and/or modified sequence
aaatttcaaaagaatacctggagtggaaaagagttctcagcagagacaaagaccccgaacacctccaacatgaagcttcttcatgttttcctgttatttctgtgcttccacttaaggttttgcaaggtcacttatacatctcaagaggatctggtggagaaaaagtgcttagcaaaaaaatatactcacctctcctgcgataaagtcttctgccagccatggcagagatgcattgagggcacctgtgtttgtaaactaccgtatcagtgcccaaagaatggcactgcagtgtgtgcaactaacaggagaagcttcccaacatactgtcaacaaaagagtttggaatgtcttcatccagggacaaagtttttaaataacggaacatgcacagccgaaggaaagtttagtgtttccttgaagcatggaaatacagattcagagggaatagttgaagtaaaacttgtggaccaagataagacaatgttcatatgcaaaagcagctggagcatgagggaagccaacgtggcctgccttgaccttgggtttcaacaaggtgctgatactcaaagaaggtttaagttgtctgatctctctataaattccactgaatgtctacatgtgcattgccgaggattagagaccagtttggctgaatgtacttttactaagagaagaactatgggttaccaggatttcgctgatgtggtttgttatacacagaaagcagattctccaatggatgacttctttcagtgtgtgaatgggaaatacatttctcagatgaaagcctgtgatggtatcaatgattgtggagaccaaagtgatgaactgtgttgtaaagcatgccaaggcaaaggcttccattgcaaatcgggtgtttgcattccaagccagtatcaatgcaatggtgaggtggactgcattacaggggaagatgaagttggctgtgcaggctttgcatctgtgactcaagaagaaacagaaattttgactgctgacatggatgcagaaagaagacggataaaatcattattacctaaactatcttgtggagttaaaaacagaatgcacattcgaaggaaacgaattgtgggaggaaagcgagcacaactgggaaaaatgaagcaaatctcactggatatttttaaaggtctccacagagtttatgccatattggaattttgttgtataattctcaaataaatattttggtgaagc

SEQ ID NO: 4419 - DNA, 1752 bp, Artificial Sequence
  derived and/or modified sequence
atgaagctgctgcacgtgttcctgctgttcctgtgcttccacctgagattctgcaaggtgacctacaccagccaggaggacctggtggagaagaagtgcctggccaagaagtacacccacctgagctgcgacaaggtgttctgccagccctggcagagatgcatcgagggcacctgcgtgtgcaagctgccctaccagtgccccaagaacggcaccgccgtgtgcgccaccaacagaagaagcttccccacctactgccagcagaagagcctggagtgcctgcaccccggcaccaagttcctgaacaacggcacctgcaccgccgagggcaagttcagcgtgagcctgaagcacggcaacaccgacagcgagggcatcgtggaggtgaagctggtggaccaggacaagaccatgttcatctgcaagagcagctggagcatgagagaggccaacgtggcctgcctggacctgggcttccagcagggcgccgacacccagagaagattcaagctgagcgacctgagcatcaacagcaccgagtgcctgcacgtgcactgcagaggcctggagaccagcctggccgagtgcaccttcaccaagagaagaaccatgggctaccaggacttcgccgacgtggtgtgctacacccagaaggccgacagccccatggacgacttcttccagtgcgtgaacggcaagtacatcagccagatgaaggcctgcgacggcatcaacgactgcggcgaccagagcgacgagctgtgctgcaaggcctgccagggcaagggcttccactgcaagagcggcgtgtgcatccccagccagtaccagtgcaacggcgaggtggactgcatcaccggcgaggacgaggtgggctgcgccggcttcgccagcgtgacccaggaggagaccgagatcctgaccgccgacatggacgccgagagaagaagaatcaagagcctgctgcccaagctgagctgcggcgtgaagaacagaatgcacatcagaagaaagagaatcgtgggcggcaagagagcccagctgggcgacctgccctggcaggtggccatcaaggacgccagcggcatcacctgcggcggcatctacatcggcggctgctggatcctgaccgccgcccactgcctgagagccagcaagacccacagataccagatctggaccaccgtggtggactggatccaccccgacctgaagagaatcgtgatcgagtacgtggacagaatcatcttccacgagaactacaacgccggcacctaccagaacgacatcgccctgatcgagatgaagaaggacggcaacaagaaggactgcgagctgcccagaagcatccccgcctgcgtgccctggagcccctacctgttccagcccaacgacacctgcatcgtgagcggctggggcagagagaaggacaacgagagagtgttcagcctgcagtggggcgaggtgaagctgatcagcaactgcagcaagttctacggcaacagattctacgagaaggagatggagtgcgccggcacctacgacggcagcatcgacgcctgcaagggcgacagcggcggccccctggtgtgcatggacgccaacaacgtgacctacgtgtggggcgtggtgagctggggcgagaactgcggcaagcccgagttccccggcgtgtacaccaaggtggccaactacttcgactggatcagctaccacgtgggcagacccttcatcagccagtacaacgtgtag

SEQ ID NO: 4420 - DNA, 966 bp, Artificial Sequence
  derived and/or modified sequence
caggtgacctacaccagccaggaggacctggtggagaagaagtgcctggccaagaagtacacccacctgagctgcgacaaggtgttctgccagccctggcagagatgcatcgagggcacctgcgtgtgcaagctgccctaccagtgccccaagaacggcaccgccgtgtgcgccaccaacagaagaagcttccccacctactgccagcagaagagcctggagtgcctgcaccccggcaccaagttcctgaacaacggcacctgcaccgccgagggcaagttcagcgtgagcctgaagcacggcaacaccgacagcgagggcatcgtggaggtgaagctggtggaccaggacaagaccatgttcatctgcaagagcagctggagcatgagagaggccaacgtggcctgcctggacctgggcttccagcagggcgccgacacccagagaagattcaagctgagcgacctgagcatcaacagcaccgagtgcctgcacgtgcactgcagaggcctggagaccagcctggccgagtgcaccttcaccaagagaagaaccatgggctaccaggacttcgccgacgtggtgtgctacacccagaaggccgacagccccatggacgacttcttccagtgcgtgaacggcaagtacatcagccagatgaaggcctgcgacggcatcaacgactgcggcgaccagagcgacgagctgtgctgcaaggcctgccagggcaagggcttccactgcaagagcggcgtgtgcatccccagccagtaccagtgcaacggcgaggtggactgcatcaccggcgaggacgaggtgggctgcgccgccttcgccgagctgtgcatcgaggagaccgagatcctgaccgccgacatggacgccgagagaagaagaatcaagagcctgctgcccaagctgagctgcggcgtgaagaacagaatgcacatcagaagaaagagatag

SEQ ID NO: 4421 - DNA, 1134 bp, Artificial Sequence
  derived and/or modified sequence
atgaagctgctgcacgtgttcctgctgttcctgtgcttccacctgagattctgcaaggtgacctacaccagccaggaggacctggtggagaagaagtgcctggccaagaagtacacccacctgagctgcgacaaggtgttctgccagccctggcagagatgcatcgagggcacctgcgtgtgcaagctgccctaccagtgccccaagaacggcaccgccgtgtgcgccaccaacagaagaagcttccccacctactgccagcagaagagcctggagtgcctgcaccccggcaccaagttcctgaacaacggcacctgcaccgccgagggcaagttcagcgtgagcctgaagcacggcaacaccgacagcgagggcatcgtggaggtgaagctggtggaccaggacaagaccatgttcatctgcaagagcagctggagcatgagagaggccaacgtggcctgcctggacctgggcttccagcagggcgccgacacccagagaagattcaagctgagcgacctgagcatcaacagcaccgagtgcctgcacgtgcactgcagaggcctggagaccagcctggccgagtgcaccttcaccaagagaagaaccatgggctaccaggacttcgccgacgtggtgtgctacacccagaaggccgacagccccatggacgacttcttccagtgcgtgaacggcaagtacatcagccagatgaaggcctgcgacggcatcaacgactgcggcgaccagagcgacgagctgtgctgcaaggcctgccagggcaagggcttccactgcaagagcggcgtgtgcatccccagccagtaccagtgcaacggcgaggtggactgcatcaccggcgaggacgaggtgggctgcgccggcttcgccagcgtgacccaggaggagaccgagatcctgaccgccgacatggacgccgagagaagaagaatcaagagcctgctgcccaagctgagctgcggcgtgaagaacagaatgcacatcagaagaaagagaatcgtgggcggcaagagagcccagctgggcaagatgaagcagatcagcctggacatcttcaagggcctgcacagagtgtacgccatcctggagttctgctgcatcatcctgaagtag

SEQ ID NO: 4422 - protein, 98 aa, Artificial Sequence
  derived and/or modified sequence
MEPPNPLGEQYFKRTMPRIPTLKNLEDLVTEYHGNFSAWSGVSKGLAESLQPDYSERLCLVSEIPPKGGALGEGPGASPCNQHSPYWAPPCYTLKPET

SEQ ID NO: 4423 - protein, 157 aa, Artificial Sequence
  derived and/or modified sequence
MLKPSLPFTSLLFLQLPLLGVGLNTTILTPNGNEDTTADFFLTTMPTDSLSVSTLPLPEVQCFVFNVEYMNCTWNSSSEPQPTNLTLHYWYKNSDNDKVQKCSHYLFSEEITSGCQLQKKEIHLYQTFVVQLQDPREPRRQATQMLKLQNLGTISGL

SEQ ID NO: 4424 - protein, 369 aa, Artificial Sequence
  derived and/or modified sequence
MLKPSLPFTSLLFLQLPLLGVGLNTTILTPNGNEDTTADFFLTTMPTDSLSVSTLPLPEVQCFVFNVEYMNCTWNSSSEPQPTNLTLHYWYKNSDNDKVQKCSHYLFSEEITSGCQLQKKEIHLYQTFVVQLQDPREPRRQATQMLKLQNLVIPWAPENLTLHKLSESQLELNWNNRFLNHCLEHLVQYRTDWDHSWTEQSVDYRHKFSLPSVDGQKRYTFRVRSRFNPLCGSAQHWSEWSHPIHWGSNTSKENPFLFALEAVVISVGSMGLIISLLCVYFWLERTMPRIPTLKNLEDLVTEYHGNFSAWSGVSKGLAESLQPDYSERLCLVSEIPPKGGALGEGPGASPCNQHSPYWAPPCYTLKPET

SEQ ID NO: 4425 - protein, 179 aa, Artificial Sequence
  derived and/or modified sequence
MGMKTPQLEQSVDYRHKFSLPSVDGQKRYTFRVRSRFNPLCGSAQHWSEWSHPIHWGSNTSKENPFLFALEAVVISVGSMGLIISLLCVYFWLERTMPRIPTLKNLEDLVTEYHGNFSAWSGVSKGLAESLQPDYSERLCLVSEIPPKGGALGEGPGASPCNQHSPYWAPPCYTLKPET

SEQ ID NO: 4426 - DNA, 297 bp, Artificial Sequence
  derived and/or modified sequence
atggaaccacccaatccacttggggagcagtacttcaaacgtacaatgccaaggatacctacactgaaaaatttggaagatctcgtgacggaataccacggcaactttagtgcttggagtggggttagtaagggactggctgagtctctgcagcccgattactctgagcgcttatgcttggttagtgagatcccccccaagggtggtgcccttggtgagggcccgggggccagcccatgcaatcagcactcaccttattgggctcctccgtgctatacgctcaagcctgagacctag

SEQ ID NO: 4427 - DNA, 474 bp, Artificial Sequence
  derived and/or modified sequence
atgctcaaaccttcactcccttttacgtcacttctgttcctgcagttgccccttctgggggtgggcttaaacaccacgattctcactcccaatgggaacgaggacacgacagctgactttttccttacgacaatgcccacggattctctatcggtaagtaccctccccttgccagaagtacaatgtttcgtcttcaatgtcgagtacatgaattgtacctggaattcctcgtcagagcctcagcccactaaccttacattgcactactggtacaaaaatagcgataatgacaaggttcagaaatgctcacactatcttttttcagaagagataactagcggatgccagctgcagaaaaaagagattcacctgtaccagacctttgtggtgcaactccaggacccacgggaacccagaaggcaggccactcagatgctcaaattgcagaatcttggcacgatttctgggctgtag

SEQ ID NO: 4428 - DNA, 1110 bp, Artificial Sequence
  derived and/or modified sequence
atgctgaaaccctccttgccgttcacatctctgctgtttctgcagctcccactgttaggcgtaggacttaacactactatcctgactcccaacgggaacgaagacactactgctgatttcttcttaaccacaatgcctacggacagcctctctgtctcaacactacctctccccgaagttcagtgtttcgttttcaatgtggagtatatgaactgtacatggaattcatcgagtgaaccccagcccactaacctcaccctccactattggtataagaactccgacaatgacaaagtgcagaaatgctcccattatctcttctctgaagaaattacctccggatgtcagctccaaaaaaaggaaattcacctctaccagacgttcgtggtccagttacaagacccgcgagagcctagaaggcaagcaacccaaatgctgaagctccaaaacttagttataccctgggccccagaaaatctgacactgcacaagctgagcgaatcgcagttagaattgaactggaacaatagattcctcaatcattgcctcgagcatctggtgcagtaccgcaccgactgggatcactcctggaccgagcagtcagttgattatagacataagttctcactgccgtccgtggatggccagaagcgatacacatttcgggttaggtcccgctttaatccactctgtggcagtgctcagcattggtcggagtggagccatcccatccattgggggtcaaatacatccaaggagaatccttttctgttcgctctggaggccgttgtaatctccgttggaagcatgggcctgattatctcattactgtgtgtctacttctggctggagaggactatgccaagaatacccaccctgaaaaacctagaggacctggtcacagaataccatgggaattttagtgcctggtcgggggtgtctaagggcctcgccgagtccctgcagcccgattactccgaacggctgtgcctggtgagcgagattccccctaagggcggcgccctgggcgaaggcccaggggcttccccatgcaaccagcactctccatattgggctccaccttgttatacccttaagccagaaacatag

SEQ ID NO: 4429 - DNA, 540 bp, Artificial Sequence
  derived and/or modified sequence
atggggatgaaaacgccccagttggaacaaagcgtggactacaggcacaaattctccctcccgagcgtcgatggtcagaaaagatatacatttcgagttaggtcgagattcaacccgttgtgcggttcagcccagcactggtctgaatggagtcaccccatccactggggcagcaatacgtctaaggaaaacccttttctgtttgccctagaggccgtagtgatatcagtcggaagcatgggactgatcatctcactgctgtgtgtgtacttttggttggagagaacaatgccaagaatcccgacgctaaagaatttggaggatctggttacagagtatcacggcaactttagcgcctggagcggcgttagcaagggacttgccgaatcacttcagccggattactctgagcgactgtgtctcgtgtcagagatccccccaaaaggaggagccctgggagagggccccggggcttcaccatgcaatcagcactctccttattgggcccccccttgctacacactgaagcctgaaacatag

SEQ ID NO: 4430 - DNA, 297 bp, Artificial Sequence
  derived and/or modified sequence
atggagccacccaatccactgggggagcaatacttcaaaaggacgatgccccgaattcccaccctgaagaacctagaggatcttgttactgaataccacgggaacttttcggcctggagtggtgtgtctaagggactggctgagagtctgcagccagactacagtgaacgactctgcctcgtcagtgagattcccccaaaaggaggggcccttggggaggggcctggggcctccccatgcaaccagcatagcccctactgggcccccccatgttacaccctaaagcctgaaacctga

SEQ ID NO: 4431 - DNA, 1933 bp, Artificial Sequence
  derived and/or modified sequence
gtagtgggtgagggacccaggttcctgacacagacagactacacccagggaatgaagagcaagcgccatgttgaagccatcattaccattcacatccctcttattcctgcagctgcccctgctgggagtggggctgaacacgacaattctgacgcccaatgggaatgaagacaccacagctgatttcttcctgaccactatgcccactgactccctcagtgtttccactctgcccctcccagaggttcagtgttttgtgttcaatgtcgagtacatgaattgcacttggaacagcagctctgagccccagcctaccaacctcactctgcattattggtacaagaactcggataatgataaagtccagaagtgcagccactatctattctctgaagaaatcacttctggctgtcagttgcaaaaaaaggagatccacctctaccaaacatttgttgttcagctccaggacccacgggaacccaggagacaggccacacagatgctaaaactgcagaatctgggaacaatcagtggattatagacataagttctccttgcctagtgtggatgggcagaaacgctacacgtttcgtgttcggagccgctttaacccactctgtggaagtgctcagcattggagtgaatggagccacccaatccactgggggagcaatacttcaaaagagaatcctttcctgtttgcattggaagccgtggttatctctgttggctccatgggattgattatcagccttctctgtgtgtatttctggctggaacggtgagatttggagaagcccagaaaaatgaggggaacggtagctgacaatagcagaggagggttttgcagggtctttaggagtaaaggatgagacagtaagtaatgagagattacccaagagggtttggtgatggaaggaagccacaggcacagagaacacagaatcactttatttcatatgggacaactgggagaagggtgataaaaaagctttaacctatgtgctcctgctccctctttctcccctgtcaggacgatgccccgaattcccaccctgaagaacctagaggatcttgttactgaataccacgggaacttttcggtgagaacgctgtcataagcatgctgcagtctatcaactgccaactgcctgccagcaagacagacagagtgtgggggtgggggcagagaggagagggaaggaggccctgcactaactgtcaggatgtggccgaccaaatggggcatggactatacagagagagacacacacagaagtgcagattatagattgaatgaggcagatggcaactggtattgggggcccaggagcctgtgtatcccttctgtaatcaattacagtggttgcagacatcatgagtactcctttggcacagagctcggtcttttacttcctgcccctaattgacccctgacctggacatatctgtctttaggcctggagtggtgtgtctaagggactggctgagagtctgcagccagactacagtgaacgactctgcctcgtcagtgagattcccccaaaaggaggggcccttggggaggggcctggggcctccccatgcaaccagcatagcccctactgggcccccccatgttacaccctaaagcctgaaacctgaaccccaatcctctgacagaagaaccccagggtcctgtagccctaagtggtactaactttccttcattcaacccacctgcgtctcatactcacctcaccccactgtggctgatttggaattttgtgcccccatgtaagcaccccttcatttggcattccccacttgagaattacccttttgccccgaacatgtttttcttctccctccctctttccctcccttcctctttccatctaccctccgattgttcctgaaccgatgagaaataaagtttctgttgataatcatc

SEQ ID NO: 4432 - DNA, 1534 bp, Artificial Sequence
  derived and/or modified sequence
agaggaaacgtgtgggtggggaggggtagtgggtgagggacccaggttcctgacacagacagactacacccagggaatgaagagcaagcgccatgttgaagccatcattaccattcacatccctcttattcctgcagctgcccctgctgggagtggggctgaacacgacaattctgacgcccaatgggaatgaagacaccacagctgatttcttcctgaccactatgcccactgactccctcagtgtttccactctgcccctcccagaggttcagtgttttgtgttcaatgtcgagtacatgaattgcacttggaacagcagctctgagccccagcctaccaacctcactctgcattattggtacaagaactcggataatgataaagtccagaagtgcagccactatctattctctgaagaaatcacttctggctgtcagttgcaaaaaaaggagatccacctctaccaaacatttgttgttcagctccaggacccacgggaacccaggagacaggccacacagatgctaaaactgcagaatctggtgatcccctgggctccagagaacctaacacttcacaaactgagtgaatcccagctagaactgaactggaacaacagattcttgaaccactgtttggagcacttggtgcagtaccggactgactgggaccacagctggactgaacaatcagtggattatagacataagttctccttgcctagtgtggatgggcagaaacgctacacgtttcgtgttcggagccgctttaacccactctgtggaagtgctcagcattggagtgaatggagccacccaatccactgggggagcaatacttcaaaagagaatcctttcctgtttgcattggaagccgtggttatctctgttggctccatgggattgattatcagccttctctgtgtgtatttctggctggaacggacgatgccccgaattcccaccctgaagaacctagaggatcttgttactgaataccacgggaacttttcggcctggagtggtgtgtctaagggactggctgagagtctgcagccagactacagtgaacgactctgcctcgtcagtgagattcccccaaaaggaggggcccttggggaggggcctggggcctccccatgcaaccagcatagcccctactgggcccccccatgttacaccctaaagcctgaaacctgaaccccaatcctctgacagaagaaccccagggtcctgtagccctaagtggtactaactttccttcattcaacccacctgcgtctcatactcacctcaccccactgtggctgatttggaattttgtgcccccatgtaagcaccccttcatttggcattccccacttgagaattacccttttgccccgaacatgtttttcttctccctcagtctggcccttccttttcgcaggattcttcctccctccctctttccctcccttcctctttccatctaccctccgattgttcctgaaccgatgagaaataaagtttctgttgataatcatcaaaaa

SEQ ID NO: 4433 - DNA, 540 bp, Artificial Sequence
  derived and/or modified sequence
atgggaatgaagacaccacagctggaacaatcagtggattatagacataagttctccttgcctagtgtggatgggcagaaacgctacacgtttcgtgttcggagccgctttaacccactctgtggaagtgctcagcattggagtgaatggagccacccaatccactgggggagcaatacttcaaaagagaatcctttcctgtttgcattggaagccgtggttatctctgttggctccatgggattgattatcagccttctctgtgtgtatttctggctggaacggacgatgccccgaattcccaccctgaagaacctagaggatcttgttactgaataccacgggaacttttcggcctggagtggtgtgtctaagggactggctgagagtctgcagccagactacagtgaacgactctgcctcgtcagtgagattcccccaaaaggaggggcccttggggaggggcctggggcctccccatgcaaccagcatagcccctactgggcccccccatgttacaccctaaagcctgaaacctga

SEQ ID NO: 4434 - DNA, 297 bp, Artificial Sequence
  derived and/or modified sequence
atggagccccccaaccccctgggggagcagtacttcaagaggaccatgccccgcatccccaccctgaagaacctggaggacctggtgacagagtaccacggcaacttcagcgcctggagcggcgtgtccaagggcctggccgagagcctgcagcctgactacagcgagcggctgtgcctggtgtctgagatcccccccaagggcggggccctgggggagggccctggggccagcccctgcaaccagcacagcccctactgggccccaccctgctacaccctgaagccagagacctag

SEQ ID NO: 4435 - DNA, 474 bp, Artificial Sequence
  derived and/or modified sequence
atgctgaagcccagcctgcccttcaccagcctgctcttcctgcagctgcccctgctgggcgtgggcctgaacaccaccatcctgaccccaaatggaaatgaagacaccacagctgacttcttcctgaccaccatgcccacagacagcctgtctgtgtccaccctgcccctgcctgaggtgcagtgctttgtgttcaacgtggagtacatgaactgcacctggaacagcagcagcgagccccagcccaccaacctgaccctgcactactggtacaagaacagcgacaatgacaaggtgcagaagtgcagccactacctgttcagcgaggagatcaccagcggctgccagctgcagaagaaggagatccacctgtaccagacctttgtggtgcagctgcaggacccccgggagccccggcggcaggccacccagatgctgaagctgcagaacctgggcaccatcagcggcctgtag

SEQ ID NO: 4436 - DNA, 1110 bp, Artificial Sequence
  derived and/or modified sequence
atgctgaagcccagcctgcccttcaccagcctgctcttcctgcagctgcccctgctgggcgtgggcctgaacaccaccatcctgaccccaaatggaaatgaagacaccacagctgacttcttcctgaccaccatgcccacagacagcctgtctgtgtccaccctgcccctgcctgaggtgcagtgctttgtgttcaacgtggagtacatgaactgcacctggaacagcagcagcgagccccagcccaccaacctgaccctgcactactggtacaagaacagcgacaatgacaaggtgcagaagtgcagccactacctgttcagcgaggagatcaccagcggctgccagctgcagaagaaggagatccacctgtaccagacctttgtggtgcagctgcaggacccccgggagccccggcggcaggccacccagatgctgaagctgcagaacctggtgatcccctgggcccctgagaacctgaccctgcacaagctgtctgagagccagctggagctgaactggaacaaccgcttcctgaaccactgcctggagcacctggtgcagtacagaacagactgggaccacagctggacagagcagagcgtggactaccgccacaagttcagcctgcccagcgtggatggccagaagcgctacaccttccgggtgcgcagccgcttcaaccccctgtgtggcagcgcccagcactggagcgagtggagccaccccatccactggggcagcaacaccagcaaagaaaaccccttcctgtttgccctggaggccgtggtgatctctgtgggctccatgggcctcatcatcagcctgctgtgtgtgtacttctggctggagaggaccatgccccgcatccccaccctgaagaacctggaggacctggtgacagagtaccacggcaacttcagcgcctggagcggcgtgtccaagggcctggccgagagcctgcagcctgactacagcgagcggctgtgcctggtgtctgagatcccccccaagggcggggccctgggggagggccctggggccagcccctgcaaccagcacagcccctactgggccccaccctgctacaccctgaagccagagacctag

SEQ ID NO: 4437 - DNA, 540 bp, Artificial Sequence
  derived and/or modified sequence
atgggcatgaagaccccccagctggagcagagcgtggactaccgccacaagttcagcctgcccagcgtggatggccagaagcgctacaccttccgggtgcgcagccgcttcaaccccctgtgtggcagcgcccagcactggagcgagtggagccaccccatccactggggcagcaacaccagcaaagaaaaccccttcctgtttgccctggaggccgtggtgatctctgtgggctccatgggcctcatcatcagcctgctgtgtgtgtacttctggctggagaggaccatgccccgcatccccaccctgaagaacctggaggacctggtgacagagtaccacggcaacttcagcgcctggagcggcgtgtccaagggcctggccgagagcctgcagcctgactacagcgagcggctgtgcctggtgtctgagatcccccccaagggcggggccctgggggagggccctggggccagcccctgcaaccagcacagcccctactgggccccaccctgctacaccctgaagccagagacctag

SEQ ID NO: 4438 - DNA, 297 bp, Artificial Sequence
  derived and/or modified sequence
atggagccccccaaccccctgggcgagcagtacttcaagcggaccatgcctcgcataccgactcttaagaacctcgaagatctggtgacagaatatcatgggaacttttccgcttggtctggagttagcaagggtttggcggagtcccttcaaccagattactctgagcggctgtgccttgtcagtgagatcccaccaaaagggggggcacttggcgagggccctggcgcgtctccctgcaaccagcacagtccctattgggcgccgccttgctataccttgaaacctgaaacgtag

SEQ ID NO: 4439 - DNA, 474 bp, Artificial Sequence
  derived and/or modified sequence
atgctgaagcccagcctgcccttcaccagcctgctgttcctgcagctgccactccttggcgtgggtctgaacaccacaatcctcacaccaaatggaaacgaagacacaaccgctgatttcttccttacaaccatgcctaccgatagtttgagcgttagcacactacctctgcccgaggtgcagtgctttgtctttaatgtggagtacatgaactgtacttggaatagctcttctgaaccacagccaacaaacctcaccttgcactattggtacaagaatagcgataatgacaaggtacagaagtgttcacactatctttttagcgaagaaatcacatcaggctgtcagctgcaaaaaaaggaaatccacctgtaccaaacattcgtcgtgcagcttcaggatcctcgcgaacctagacgtcaggcgacacagatgctgaaactgcagaacttaggaaccatctctggtctctag

SEQ ID NO: 4440 - DNA, 1110 bp, Artificial Sequence
  derived and/or modified sequence
atgctgaagcccagcctgcccttcaccagcctgctgttcctgcagctccccctgctgggcgttggcttgaacacaactatcctcacccccaacggcaatgaagatactacggccgatttctttctcacaaccatgccaactgattccctttctgtgtcaaccttaccactgcctgaggtccaatgcttcgttttcaacgtagagtacatgaactgcacctggaattctagcagtgagccccaacccaccaacttaacgctgcactattggtataagaactctgacaatgacaaggttcagaagtgtagccattatctcttcagcgaggagatcacgtctggatgtcaactgcagaagaaggaaattcatctgtatcaaacgtttgtcgtccaactccaagaccctcgcgaaccgagacggcaggcgactcaaatgttgaagttacagaacctcgtgatcccatgggctcccgagaatctaaccctccacaaactatctgagagtcagcttgagcttaactggaataatcggttcctcaaccactgcttggagcacctcgtacaataccgaaccgactgggatcattcctggaccgagcaatcagtggactaccgacacaagtttagtctgccatcagtggacggccagaagcgatacacttttagagtccgatctcgatttaatccactctgcgggtccgcccagcactggtcggaatggtcccacccaattcattggggctctaacacatcgaaagagaatccgtttctatttgctcttgaggccgtagtgatctctgtggggagcatggggctgatcattagtctcttgtgtgtgtacttttggctcgaacggaccatgcctagaatccctactctgaagaatttggaagatctggttacggagtatcatggcaacttttcagcctggtcgggtgtcagcaaggggctcgccgagtccctgcaaccagactactccgaacgcctttgcctggtgtccgaaattccacccaagggcggtgccctcggcgaaggccctggcgccagtccctgtaatcagcatagcccctactgggccccgccttgctatacacttaaacccgagacatag

SEQ ID NO: 4441 - DNA, 540 bp, Artificial Sequence
  derived and/or modified sequence
atgggcatgaagaccccccagctggagcagagcgtggactaccggcacaaattttccttgcccagcgtggatgggcaaaaacgatatactttccgcgtcagatcacgcttcaatcccctctgcggaagcgcccagcactggagcgagtggagtcatcctattcactgggggagcaacacaagcaaggaaaacccgtttttgtttgcattggaggcagtagtcatttctgtcggctcaatgggtctgattatcagtctgctctgcgtctacttctggctggagcgaacaatgcccaggatccctaccctcaaaaatctcgaggatctcgtgactgagtaccatgggaacttcagcgcatggtccggcgtgagtaagggcctggcggagtctctacaaccagactactctgagcgactctgcctggtgtcggagattccgcctaagggaggagcactgggcgagggcccgggagccagtccctgcaatcagcactctccttactgggctcctccctgttacacgctgaagcctgaaacctag

SEQ ID NO: 4442 - DNA, 297 bp, Artificial Sequence
  derived and/or modified sequence
atggaacccccaaaccccttgggggagcagtactttaaacgcacaatgccacgtatccccactctgaagaacttggaggacctggtgaccgagtatcatgggaatttcagtgcgtggagcggagtgtctaaagggctggccgaaagcttgcagcctgattactctgagaggctgtgtctggtgtccgagatcccgccaaaaggaggcgctctgggagagggcccaggggcaagtccttgcaatcaacattcaccctactgggcacccccttgttataccctcaaaccagaaacctag

SEQ ID NO: 4443 - DNA, 474 bp, Artificial Sequence
  derived and/or modified sequence
atgcttaaaccgagtctgccattcaccagccttctcttccttcaactgcctttgctaggcgtaggactgaacacgaccatcctcacccccaatggcaatgaggatacgaccgcagacttctttctgaccacaatgccgaccgatagcctgtcagtttccaccctgcctctcccggaagtgcaatgcttcgtgttcaatgtggaatatatgaactgtacttggaattctagctccgaacctcaaccgacaaacttgactctacattactggtacaagaactcagataatgataaagtccaaaaatgctcacattacctgtttagtgaggagattacttccgggtgtcagctgcagaagaaggagattcacctgtaccagacctttgtggttcaattgcaggacccgagagagccccgaagacaggcaactcagatgctcaaactgcaaaatcttggtactatatctggactgtag

SEQ ID NO: 4444 - DNA, 1110 bp, Artificial Sequence
  derived and/or modified sequence
atgttaaagccgtctctaccttttacatctctcctgtttctccagctgcccctcctcggagtaggcctgaacacgacgatcctcactcctaacgggaacgaggacactaccgcggattttttccttacaaccatgccaaccgactcgctaagtgtgtcaacactaccactgcctgaagtgcagtgctttgttttcaatgtggagtacatgaactgcacgtggaacagctcaagcgagcctcagccgaccaacttaaccctgcactattggtataaaaacagcgacaacgataaagtgcagaaatgttcccactatttgttctctgaggagataacatctggctgtcaactgcagaagaaagagattcatctgtatcaaacctttgtagtgcagctgcaggaccctagggaaccacggagacaggctacacagatgctgaaactgcagaacctagtgataccctgggctccggaaaaccttaccctccataaactgagtgaatcacaacttgagctgaactggaacaaccggtttctcaatcactgcctcgaacaccttgtccagtaccgcacagattgggatcactcatggactgagcagtctgtcgactataggcacaaattttctctgccttctgtagatggtcagaaacgctatacattccgcgtaaggtcaagattcaaccccctgtgtggcagcgctcagcactggtcagaatggtcacacccaatacactggggctctaacactagcaaggagaatccgtttctgttcgcactggaggcggtcgttattagcgtaggatctatgggactaattattagtcttctttgtgtttacttttggctagagcgcactatgcccaggatccctactctcaagaaccttgaagacttggttactgaataccacggaaactttagcgcttggtctggggtgagcaagggattggccgagagtctccagcctgactattcagagcgcttatgtttggtgagtgagatcccaccaaagggaggcgctttaggagaaggccctggggctagcccttgtaaccagcacagtccatactgggctcccccatgctacacattgaagccggagacttag

SEQ ID NO: 4445 - DNA, 540 bp, Artificial Sequence
  derived and/or modified sequence
atgggcatgaaaaccccacagctggaacaatccgtagactatagacacaagttttccttgccaagtgtggatggccagaaacgctataccttccgcgtgaggtccaggtttaacccattgtgcgggtccgctcagcactggtctgagtggtcccatcccatccactgggggagtaatacttccaaagaaaatccttttctgttcgcattggaggccgtcgtgatctctgtggggagcatgggactcatcatatctctcctttgcgtatatttctggctcgagagaacgatgcctcgtatccctaccctgaagaatttggaggacctggtcacagagtatcacggcaacttcagcgcatggtccggagtctcaaagggtctcgctgagtctctgcagcctgactatagtgaacgcttgtgcctcgtgtcagaaatccctcccaagggtggggcactcggtgaaggccctggggcatccccatgcaatcagcacagcccctactgggctcctccatgctacactctcaaacctgaaacatag

SEQ ID NO: 4446 - DNA, 297 bp, Artificial Sequence
  derived and/or modified sequence
atggagccccccaaccccctgggcgagcagtacttcaagagaaccatgcccagaatccccaccctgaagaacctggaggacctggtgaccgagtaccacggcaacttcagcgcctggagcggcgtgagcaagggcctggccgagagcctgcagcccgactacagcgagagactgtgcctggtgagcgagatcccccccaagggcggcgccctgggcgagggccccggcgccagcccctgcaaccagcacagcccctactgggcccccccctgctacaccctgaagcccgagacctag

SEQ ID NO: 4447 - DNA, 474 bp, Artificial Sequence
  derived and/or modified sequence
atgctgaagcccagcctgcccttcaccagcctgctgttcctgcagctgcccctgctgggcgtgggcctgaacaccaccatcctgacccccaacggcaacgaggacaccaccgccgacttcttcctgaccaccatgcccaccgacagcctgagcgtgagcaccctgcccctgcccgaggtgcagtgcttcgtgttcaacgtggagtacatgaactgcacctggaacagcagcagcgagccccagcccaccaacctgaccctgcactactggtacaagaacagcgacaacgacaaggtgcagaagtgcagccactacctgttcagcgaggagatcaccagcggctgccagctgcagaagaaggagatccacctgtaccagaccttcgtggtgcagctgcaggaccccagagagcccagaagacaggccacccagatgctgaagctgcagaacctgggcaccatcagcggcctgtag

SEQ ID NO: 4448 - DNA, 1110 bp, Artificial Sequence
  derived and/or modified sequence
atgctgaagcccagcctgcccttcaccagcctgctgttcctgcagctgcccctgctgggcgtgggcctgaacaccaccatcctgacccccaacggcaacgaggacaccaccgccgacttcttcctgaccaccatgcccaccgacagcctgagcgtgagcaccctgcccctgcccgaggtgcagtgcttcgtgttcaacgtggagtacatgaactgcacctggaacagcagcagcgagccccagcccaccaacctgaccctgcactactggtacaagaacagcgacaacgacaaggtgcagaagtgcagccactacctgttcagcgaggagatcaccagcggctgccagctgcagaagaaggagatccacctgtaccagaccttcgtggtgcagctgcaggaccccagagagcccagaagacaggccacccagatgctgaagctgcagaacctggtgatcccctgggcccccgagaacctgaccctgcacaagctgagcgagagccagctggagctgaactggaacaacagattcctgaaccactgcctggagcacctggtgcagtacagaaccgactgggaccacagctggaccgagcagagcgtggactacagacacaagttcagcctgcccagcgtggacggccagaagagatacaccttcagagtgagaagcagattcaaccccctgtgcggcagcgcccagcactggagcgagtggagccaccccatccactggggcagcaacaccagcaaggagaaccccttcctgttcgccctggaggccgtggtgatcagcgtgggcagcatgggcctgatcatcagcctgctgtgcgtgtacttctggctggagagaaccatgcccagaatccccaccctgaagaacctggaggacctggtgaccgagtaccacggcaacttcagcgcctggagcggcgtgagcaagggcctggccgagagcctgcagcccgactacagcgagagactgtgcctggtgagcgagatcccccccaagggcggcgccctgggcgagggccccggcgccagcccctgcaaccagcacagcccctactgggcccccccctgctacaccctgaagcccgagacctag

SEQ ID NO: 4449 - DNA, 540 bp, Artificial Sequence
  derived and/or modified sequence
atgggcatgaagaccccccagctggagcagagcgtggactacagacacaagttcagcctgcccagcgtggacggccagaagagatacaccttcagagtgagaagcagattcaaccccctgtgcggcagcgcccagcactggagcgagtggagccaccccatccactggggcagcaacaccagcaaggagaaccccttcctgttcgccctggaggccgtggtgatcagcgtgggcagcatgggcctgatcatcagcctgctgtgcgtgtacttctggctggagagaaccatgcccagaatccccaccctgaagaacctggaggacctggtgaccgagtaccacggcaacttcagcgcctggagcggcgtgagcaagggcctggccgagagcctgcagcccgactacagcgagagactgtgcctggtgagcgagatcccccccaagggcggcgccctgggcgagggccccggcgccagcccctgcaaccagcacagcccctactgggcccccccctgctacaccctgaagcccgagacctag

SEQ ID NO: 4450 - protein, 1382 aa, Artificial Sequence
  derived and/or modified sequence
MATGGRRGAAAAPLLVAVAALLLGAAGHLYPGEVCPGMDIRNNLTRLHELENCSVIEGHLQILLMFKTRPEDFRDLSFPKLIMITDYLLLFRVYGLESLKDLFPNLTVIRGSRLFFNYALVIFEMVHLKELGLYNLMNITRGSVRIEKNNELCYLATIDWSRILDSVEDNYIVLNKDDNEECGDICPGTAKGKTNCPATVINGQFVERCWTHSHCQKVCPTICKSHGCTAEGLCCHSECLGNCSQPDDPTKCVACRNFYLDGRCVETCPPPYYHFQDWRCVNFSFCQDLHHKCKNSRRQGCHQYVIHNNKCIPECPSGYTMNSSNLLCTPCLGPCPKVCHLLEGEKTIDSVTSAQELRGCTVINGSLIINIRGGNNLAAELEANLGLIEEISGYLKIRRSYALVSLSFFRKLRLIRGETLEIGNYSFYALDNQNLRQLWDWSKHNLTITQGKLFFHYNPKLCLSEIHKMEEVSGTKGRQERNDIALKTNGDQASCENELLKFSYIRTSFDKILLRWEPYWPPDFRDLLGFMLFYKEAPYQNVTEFDGQDACGSNSWTVVDIDPPLRSNDPKSQNHPGWLMRGLKPWTQYAIFVKTLVTFSDERRTYGAKSDIIYVQTDATNPSVPLDPISVSNSSSQIILKWKPPSDPNGNITHYLVFWERQAEDSELFELDYCLKGLKLPSRTWSPPFESEDSQKHNQSEYEDSAGECCSCPKTDSQILKELEESSFRKTFEDYLHNVVFVPRKTSSGTGAEDPRPSRKRRSLGDVGNVTVAVPTVAAFPNTSSTSVPTSPEEHRPFEKVVNKESLVISGLRHFTGYRIELQACNQDTPEERCSVAAYVSARTMPEAKADDIVGPVTHEIFENNVVHLMWQEPKEPNGLIVLYEVSYRRYGDEELHLCVSRKHFALERGCRLRGLSPGNYSVRIRATSLAGNGSWTEPTYFYVTDYLDVPSNIAKIIIGPLIFVFLFSVVIGSIYLFLRKRQPDGPLGPLYASSNPEYLSASDVFPCSVYVPDEWEVSREKITLLRELGQGSFGMVYEGNARDIIKGEAETRVAVKTVNESASLRERIEFLNEASVMKGFTCHHVVRLLGVVSKGQPTLVVMELMAHGDLKSYLRSLRPEAENNPGRPPPTLQEMIQMAAEIADGMAYLNAKKFVHRDLAARNCMVAHDFTVKIGDFGMTRDIYETDYYRKGGKGLLPVRWMAPESLKDGVFTTSSDMWSFGVVLWEITSLAEQPYQGLSNEQVLKFVMDGGYLDQPDNCPERVTDLMRMCWQFNPKMRPTFLEIVNLLKDDLHPSFPEVSFFHSEENKAPESEELEMEFEDMENVPLDRSSHCQREEAGGRDGGSSLGFKRSYEEHIPYTHMNGGKKNGRILTLPRSNPS

SEQ ID NO: 4451 - DNA, 4149 bp, Artificial Sequence
  derived and/or modified sequence
atggccactgggggaaggcggggggcagctgcggctcctttgctcgttgccgtggctgccctgctgctgggcgccgccggacatctatatcccggcgaggtctgccctggaatggatattcgaaacaacctgaccaggctgcatgagctggagaattgttctgtgatcgagggacatctgcagattctgctgatgtttaagacacgcccagaggacttcagggatctgtctttcccaaaactcatcatgatcacggattacttgcttctgttcagagtgtacgggctggagtccctgaaagacctctttcctaatttgacagtcattcggggttcacggctgtttttcaactacgcgctcgttatatttgagatggttcatctgaaggaactgggactctataatctgatgaacattacaaggggatccgtccgaattgaaaaaaataatgagctctgctatctggcgacaattgactggtccaggatcctcgattccgtagaagataattatattgtgcttaacaaagatgataacgaggaatgtggcgatatttgccctggaaccgccaaagggaaaacgaactgccccgcaacagtcatcaatgggcagttcgtggaacgctgctggacacacagtcactgccagaaggtttgtcctacaatctgtaagagtcacggctgcaccgcagagggcttatgttgtcattccgaatgccttggcaactgtagtcaacccgacgaccccactaaatgtgtggcctgccgaaacttctatctggatggtcggtgcgtggaaacatgcccccccccgtactatcactttcaggattggcggtgcgtgaacttttccttttgtcaggatctccaccacaagtgcaagaattctaggcggcagggctgtcatcagtacgtcatccacaacaataagtgtattccagaatgccctagcggttatactatgaacagttccaatctcctttgcacaccttgtttgggaccctgtccaaaggtgtgccacctgctggagggcgagaagacgattgatagtgtcacatctgcccaagagctgcgaggctgcacagtcatcaacgggagtctgattataaacataagaggaggaaataatctggccgcggagctggaagcaaaccttggtcttatcgaggaaataagtggatatctgaagatccgccgcagctacgctctcgtgtcattgtccttttttcgtaagcttcggctcattaggggcgaaacactcgaaatcggtaattatagtttctatgccctggacaaccagaacctgcgccagctgtgggactggagcaaacataaccttactatcacccaaggcaaattgtttttccactataatccaaaactttgtctcagtgaaattcataaaatggaggaagtaagcgggacaaagggccggcaggagcgcaacgacattgccctcaaaacaaatggagatcaggcttcttgcgagaatgaattgttaaaattctcatatatacgaacctcttttgacaagattctgctcagatgggaaccctattggccgccagattttagggatctgcttggcttcatgcttttctataaggaggccccctatcagaatgtcacggagttcgacgggcaggatgcgtgcggctcaaatagctggactgtggtggacatcgatcctcctctgcgatctaatgacccaaagtctcagaaccacccggggtggctcatgcgaggcctgaagccatggacacagtacgccatttttgtgaaaactttggtaactttcagcgacgagcggcggacctacggcgctaagtctgacataatctacgtccagacagatgctaccaatccgagtgtccccctggaccccatcagtgtaagcaattcttccagccagatcatactgaaatggaaacctccatcagaccccaacggtaacatcacccactatctggtgttctgggaacggcaagccgaagattctgagctctttgagctggactactgccttaaaggactgaagttgcccagcagaacttggagtcctccttttgaatcagaggactcacaaaagcacaatcagtccgaatatgaggacagcgctggggagtgttgcagttgtcccaagacagatagccagattcttaaggagttagaagaaagctcctttaggaaaacttttgaagactaccttcataatgtcgtcttcgtaccacgtaagacctcttctgggacgggcgcggaagatccaaggccctccagaaaaaggcgaagcctgggtgacgtgggcaacgttaccgtcgctgtgccgacagttgccgccttccccaacacaagttccacctccgtcccaactagtcccgaagagcaccgcccctttgagaaggtggtgaataaggagtctttggttatttccggattgaggcattttactggatatcggatagaattgcaagcttgtaaccaggacacgcctgaggaacgctgctccgtggcggcatacgtgtctgctcggactatgcccgaggctaaagctgacgatatagtggggcctgttacccacgaaatcttcgaaaacaacgtggtgcatctgatgtggcaggagccaaaggaacccaacggccttatagtgttgtacgaggtttcatatagacgctatggagacgaggagctccatttatgcgtgtcaagaaagcactttgccctggagcggggctgtaggctgagagggctcagccccggcaattactccgtccggatcagagccacctcccttgctggtaacggaagctggactgagccaacgtatttttacgtgactgattatcttgacgttccctcaaacatagcgaaaatcattatcggccctctgattttcgtctttctgttctccgtggtcattgggagcatctacctcttcttacgaaaaaggcagcccgatggcccattaggacctttgtatgcctcgagtaaccctgagtacctgtcagctagcgacgtcttcccatgttccgtgtacgtgcccgacgagtgggaggttagtcgggagaaaataaccctccttcgggagctcgggcagggttcatttgggatggtctatgagggcaatgcgcgggacataattaagggcgaggctgaaaccagagtcgctgtgaaaacagtcaacgagagcgcatcacttagggagcgaatcgagttcctgaacgaggcctccgtaatgaaaggttttacgtgccatcacgttgtgagactgctgggcgtagtctccaagggccagcccactcttgtcgtcatggagctgatggcccatggagaccttaaaagctacctgcggagcctgcgtcccgaggcggagaacaaccctggaaggcccccaccgaccctccaggaaatgatacagatggccgcggagatcgccgacggcatggcctacctgaatgctaaaaaattcgtgcaccgagatctggctgccagaaattgcatggtggcccacgatttcacggtcaaaatcggggatttcggcatgaccagagatatctacgaaaccgactattaccgcaaaggaggtaaaggactgctgccggtgagatggatggcccccgagagcctgaaggatggggtatttactaccagctccgacatgtggtccttcggagtcgtgctttgggagattacttccctcgccgagcagccctatcagggcctgtctaacgagcaggtgctgaaatttgttatggatggcggttacctcgaccagccagacaattgccccgaacgagtaaccgatctgatgaggatgtgctggcagttcaatcctaaaatgcggcctactttccttgaaatcgtgaatctgctgaaggacgatctccacccttctttcccagaagtgagtttctttcatagcgaggaaaacaaggccccggagtcagaggagttagaaatggaatttgaggacatggaaaacgtacctctagaccgcagcagccattgtcaaagagaagaggctgggggcagagacgggggttccagcctcggtttcaaacgatcatatgaagaacatataccttatacacacatgaatggcggtaaaaaaaacggccgaatcctgaccctcccgcggagcaacccctcatag

SEQ ID NO: 4452 - DNA, 9059 bp, Artificial Sequence
  derived and/or modified sequence
gagaaggacgcgcggcccccagcgcctcttgggtggccgcctcggagcatgacccccgcgggccagcgccgcgcgctctgatccgaggagaccccgcgctcccgcagccatggccaccgggggccggcggggggcggcggccgcgccgctgctggtggcggtggccgcgctgctactgggcgccgcgggccacctgtaccccggagaggtgtgtcccggcatggatatccggaacaacctcactaggttgcatgagctggagaattgctctgtcatcgaaggacacttgcagatactcttgatgttcaaaacgaggcccgaagatttccgagacctcagtttccccaaactcatcatgatcactgattacttgctgctcttccgggtctatgggctcgagagcctgaaggacctgttccccaacctcacggtcatccggggatcacgactgttctttaactacgcgctggtcatcttcgagatggttcacctcaaggaactcggcctctacaacctgatgaacatcacccggggttctgtccgcatcgagaagaacaatgagctctgttacttggccactatcgactggtcccgtatcctggattccgtggaggataattacatcgtgttgaacaaagatgacaacgaggagtgtggagacatctgtccgggtaccgcgaagggcaagaccaactgccccgccaccgtcatcaacgggcagtttgtcgaacgatgttggactcatagtcactgccagaaagtttgcccgaccatctgtaagtcacacggctgcaccgccgaaggcctctgttgccacagcgagtgcctgggcaactgttctcagcccgacgaccccaccaagtgcgtggcctgccgcaacttctacctggacggcaggtgtgtggagacctgcccgcccccgtactaccacttccaggactggcgctgtgtgaacttcagcttctgccaggacctgcaccacaaatgcaagaactcgcggaggcagggctgccaccagtacgtcattcacaacaacaagtgcatccctgagtgtccctccgggtacacgatgaattccagcaacttgctgtgcaccccatgcctgggtccctgtcccaaggtgtgccacctcctagaaggcgagaagaccatcgactcggtgacgtctgcccaggagctccgaggatgcaccgtcatcaacgggagtctgatcatcaacattcgaggaggcaacaatctggcagctgagctagaagccaacctcggcctcattgaagaaatttcagggtatctaaaaatccgccgatcctacgctctggtgtcactttccttcttccggaagttacgtctgattcgaggagagaccttggaaattgggaactactccttctatgccttggacaaccagaacctaaggcagctctgggactggagcaaacacaacctcaccatcactcaggggaaactcttcttccactataaccccaaactctgcttgtcagaaatccacaagatggaagaagtttcaggaaccaaggggcgccaggagagaaacgacattgccctgaagaccaatggggaccaggcatcctgtgaaaatgagttacttaaattttcttacattcggacatcttttgacaagatcttgctgagatgggagccgtactggccccccgacttccgagacctcttggggttcatgctgttctacaaagaggccccttatcagaatgtgacggagttcgacgggcaggatgcgtgtggttccaacagttggacggtggtagacattgacccacccctgaggtccaacgaccccaaatcacagaaccacccagggtggctgatgcggggtctcaagccctggacccagtatgccatctttgtgaagaccctggtcaccttttcggatgaacgccggacctatggggccaagagtgacatcatttatgtccagacagatgccaccaacccctctgtgcccctggatccaatctcagtgtctaactcatcatcccagattattctgaagtggaaaccaccctccgaccccaatggcaacatcacccactacctggttttctgggagaggcaggcggaagacagtgagctgttcgagctggattattgcctcaaagggctgaagctgccctcgaggacctggtctccaccattcgagtctgaagattctcagaagcacaaccagagtgagtatgaggattcggccggcgaatgctgctcctgtccaaagacagactctcagatcctgaaggagctggaggagtcctcgtttaggaagacgtttgaggattacctgcacaacgtggttttcgtccccagaaaaacctcttcaggcactggtgccgaggaccctaggccatctcggaaacgcaggtcccttggcgatgttgggaatgtgacggtggccgtgcccacggtggcagctttccccaacacttcctcgaccagcgtgcccacgagtccggaggagcacaggccttttgagaaggtggtgaacaaggagtcgctggtcatctccggcttgcgacacttcacgggctatcgcatcgagctgcaggcttgcaaccaggacacccctgaggaacggtgcagtgtggcagcctacgtcagtgcgaggaccatgcctgaagccaaggctgatgacattgttggccctgtgacgcatgaaatctttgagaacaacgtcgtccacttgatgtggcaggagccgaaggagcccaatggtctgatcgtgctgtatgaagtgagttatcggcgatatggtgatgaggagctgcatctctgcgtctcccgcaagcacttcgctctggaacggggctgcaggctgcgtgggctgtcaccggggaactacagcgtgcgaatccgggccacctcccttgcgggcaacggctcttggacggaacccacctatttctacgtgacagactatttagacgtcccgtcaaatattgcaaaaattatcatcggccccctcatctttgtctttctcttcagtgttgtgattggaagtatttatctattcctgagaaagaggcagccagatgggccgctgggaccgctttacgcttcttcaaaccctgagtatctcagtgccagtgatgtgtttccatgctctgtgtacgtgccggacgagtgggaggtgtctcgagagaagatcaccctccttcgagagctggggcagggctccttcggcatggtgtatgagggcaatgccagggacatcatcaagggtgaggcagagacccgcgtggcggtgaagacggtcaacgagtcagccagtctccgagagcggattgagttcctcaatgaggcctcggtcatgaagggcttcacctgccatcacgtggtgcgcctcctgggagtggtgtccaagggccagcccacgctggtggtgatggagctgatggctcacggagacctgaagagctacctccgttctctgcggccagaggctgagaataatcctggccgccctccccctacccttcaagagatgattcagatggcggcagagattgctgacgggatggcctacctgaacgccaagaagtttgtgcatcgggacctggcagcgagaaactgcatggtcgcccatgattttactgtcaaaattggagactttggaatgaccagagacatctatgaaacggattactaccggaaagggggcaagggtctgctccctgtacggtggatggcaccggagtccctgaaggatggggtcttcaccacttcttctgacatgtggtcctttggcgtggtcctttgggaaatcaccagcttggcagaacagccttaccaaggcctgtctaatgaacaggtgttgaaatttgtcatggatggagggtatctggatcaacccgacaactgtccagagagagtcactgacctcatgcgcatgtgctggcaattcaaccccaagatgaggccaaccttcctggagattgtcaacctgctcaaggacgacctgcaccccagctttccagaggtgtcgttcttccacagcgaggagaacaaggctcccgagagtgaggagctggagatggagtttgaggacatggagaatgtgcccctggaccgttcctcgcactgtcagagggaggaggcggggggccgggatggagggtcctcgctgggtttcaagcggagctacgaggaacacatcccttacacacacatgaacggaggcaagaaaaacgggcggattctgaccttgcctcggtccaatccttcctaacagtgcctaccgtggcgggggcgggcaggggttcccattttcgctttcctctggtttgaaagcctctggaaaactcaggattctcacgactctaccatgtccaatggagttcagagatcgttcctatacatttctgttcatcttaaggtggactcgtttggttaccaatttaactagtcctgcagaggatttaactgtgaacctggagggcaaggggtttccacagttgctgctcctttggggcaacgacggtttcaaaccaggattttgtgttttttcgttccccccacccgcccccagcagatggaaagaaagcacctgtttttacaaattctttttttttttttttttttttgctggtgtctgagcttcagtataaaagacaaaacttcctgtttgtggaacaaaagttcgaaagaaaaaacaaaacaaaaacacccagccctgttccaggagaatttcaagttttacaggttgagcttcaagatggtttttttggttttttttttttctctcatccaggctgaaggattttttttttctttacaaaatgagttcctcaaattgaccaatagctgctgctttcatattttggataagggtctgtggtcccggcgtgtgctcacgtgtgtatgcacgtgtgtgtgtccattagacacggctgatgtgtgtgcaaagtatccatgcggagttgatgctttgggaattggctcatgaaggttcttctcaagggtgcgagctcatccccctctctccttccttcttattgactgggagactgtgctctcgacagattcttcttgtgtcagaagtctagcctcaggtttctaccctcccttcacattggtggccaagggaggagcatttcatttggagtgattatgaatcttttcaagaccaaaccaagctaggacattaaaaaaaaaaaaagaaaaagaaagaaaaaacaaaatggaaaaaggaaaaaaaaaaagaactgagatgacagagttttgagaatatatttgtaccatatttaatttttaaagtctctggtattagcctcataagttattgactattccccggggttggcggggagtggggacatgagttggtctgcctgttgtggggccgggaaggggagggagtcaggcacaagtggcctctttgtttggtcttaaaggcatccatttctgggaatgaagccatgttcgctgctaacacttttggatgttgtgaggccacgtggagtgtgtgagagactaggttttatggatggtctggttcaggtaccaggtctgctggaaggttcctgttcggataagctggtagctacctagctctgagcctgccttcaagaacacctgtgttcatcctctgattctctgtgtgtacctcttgtggcgtttcctctcccgggtgtgaacatcctaaccgttattgtgcaaacccaagaacgtcagatcccaaagcacaacaacctggatggactttgggaacatctaagcaatgtaagagagaggtgcactgagagtacgtcttggtcccctccaccctgagagcatctgacggtcctcagtactgaactcccggaagctgctctgagcccggtgacctcatctgggccaggtgtggtgcctgagctgaatgctcaggtgcttacagtgttgcaatccctaagagagtagagtctggaggagaaaccgtgaaaaagaccttacacaccaccaagaacttccgaatgggcgtgaatccaccgtttcttctctttgcaaaaagaaccaccacagctgctcaaagaacacagtgaactcatcactttggttcatcaaaaaatcatcgcccatgcgttattcctgagtgcattttcttacaactttttgactgcttccttttcttcttctcttaagagttgtgggcttaagaatgggatagagtcataatggcaacctccaagccctctcaattcttgattaagaacacaggtagacatgaatcccaattgtctattgctatcttatttatatgattcgggaaaatacagcatgtaaaaatattgctgaggagcctcagtgattgggtacaagaagcaagagtacagaaattatttttgccaaatttattttgtaaatatgagggtctgtacctaaatttaaaaaaaaaacacgtagaactaggtattttgttctcttcttagtaaatttgtagtggttgtatactacactagctgcaattttcacatttttctaattcagaaaggtttttcttatattaggggaaaaagtatttattttaatatataaaatcactctgaaaatcactctcataaaaaatggagcgcatgtaaatttttatcaaagaaaaataaacaggtgaatgggggatagtgattttcttttttcagcacagtctacctcagtgtattgttaagatgtgattcaatcatggacatctttgagatttcagaattctacctggaaccggtctgaatcagggaacgtgtgtatcagctgattcgaatgccagggaccagtaagaattttgagggagggagttgggatggagaaggtatggcctttatgcgagcatagatccttttcttcctggctggtaatattcttctctgaatttaatcttcctttaaaaaaaaatcctccatctattgtcactatgttccccaaacataaactaagttccaggctgtcatgatgtatctgatatatggggtaacccagcaaggtgtaccttcctttggtgagagatggctgccggggcaaagacgggctttgattcagagcaagcattcccacctgttccatggaatccccctgaagtgagcacaaaggtgccctgggctccctgatggtttatgcccactcctttcaggctggtgatgcaccttacacacaaacacctaatgcaatgtctttttaaattctccaagtgggatgggagcatgtgagggaaattccaatccaaaacccattaatgtgctgaacgctttttttttttttttttttttttttgcaacaacaccttggacctctgtgttggggtttgactgacctcaagctgatattattggaccttgtgcagctttgataacccatgtgagagtctaggcaggaccagtggggcccaaatcttgctgctcttgtacttttaggcactgcccttgcagactcacctttctccacctgccctggagaaaggtagggtgtgctgggcctgccccttgcaaatgggattcaccagtttcatttatttgactctactgccacagtgaaaagagcaaacagctattgggttgcaaacctcctttgacattaggaaatgttgactttgtaacaataaaactttggtcctagaaagacacggttgtcctgggagtttgtagtgttaagttgcaacaacaacaacaaaaagcaacaaaaccagcttaggataacactttttgttgcttgttcttaaagatgtctcactatgattaaaacccttttcattaatgtagtgaaagccacacaggagttccttcttccaggaggagaataccaagcacatcactttctctctgcatcagtgatgtcaaatacgcatcagaaaatgttcaggttttaggagctgtcctaggtgctgtttcatcattggaagcagtgagaaagagaagcactgctgcttgtctggatataggctgaggatgattgagagaagctgtgggaactgacacaagggtctgcataggtcatcctgtgaccctggggactatgttaccaactgacagacagatctttcactgtatcctagcagggcaggtagtccaccaagaaatgtgcttattggattgggaggtgtttatttgtagtctgctgtaacacgtgtgaaagagcaggagcgtcatcagcatatgacttgcgctggtcatccggtaaatggatgtgctgtagtcccagtgctaatcatttctctccttcacagtgggtggaagtttagggttaaatgtcctttgaatgtcacctggtgagtccttgacaccttaggctcttcagaaacaatggttttgttgaggatggggaacagggaatgccgattttatatacatggtacacagagaggggtgtcacttcagaaaatcttccagcatgttcttcagaatattaatttatatgcgaggtgaggttgggaatgaaaagaacaggtcagcacttttttttttcctagaacatacaaaagaacatggtggactttcagggagtgcaatggaaggtgaatatttccttaagggtccccgagaaatgggagtgaggggaggggacacaatggctttttgagcttacttttaccttctgatactagtcaaggtccagaaccagccaccagccaaatttctatctgggtgcgggccactgaaaatccttgttaaaaaccagatcacaaatctggggctcttggtcccattggagaaggaaggaagagcctcaaaataagtgtgcacccatgcacatattcaggaacagcttgtttagtctttacactttgcctgaaagttgcttctcctcgtccctttgtgtgcctgggtggcctcggccctgtgcgttggcaacgcaggatcaaatgtgctgcagcttttgcagaaaacaactcagaaacacaaaaccccccaacagctcaattattattttttcaatgttttcctacaagagccaagtagcaccatgtacagaagacgcctttttttttggaatattgaaatcgttctgcatgtaaaatatgggataatgacctgtttatattaaaattctgattaaattatctgagaata

SEQ ID NO: 4453 - DNA, 4149 bp, Artificial Sequence
  derived and/or modified sequence
atggccactggaggaagaagaggagctgctgctgcccccctgctggtggccgtggccgccctgctgctgggcgccgccggccacctgtacccaggagaggtgtgccccggcatggacatccggaacaacctgacccggctgcacgagctggagaactgcagcgtcatcgagggccacctgcagatcctgctgatgttcaagaccaggcctgaggacttccgggacctgtccttccccaagctgatcatgatcacagactacctgctgctcttccgggtgtatggcctggagagcctgaaggacctcttccccaacctgaccgtcatccggggcagccgcctcttcttcaactatgccctggtgatctttgagatggtgcacctgaaggagctgggcctgtacaacctgatgaacatcacccggggctctgtgcgcatcgagaagaacaatgagctgtgctacctggccaccatcgactggagccgcatcctggacagcgtggaggacaactacatcgtgctgaacaaggatgacaatgaagaatgtggggacatctgccctggaacagccaagggcaagaccaactgcccagccaccgtcatcaatggccagtttgtggagcgctgctggacccacagccactgccagaaggtgtgccccaccatctgcaagagccacggctgcacagctgagggcctgtgctgccacagcgagtgcctgggcaactgcagccagccagatgaccccaccaagtgtgtggcctgcaggaacttctacctggatggccgctgtgtggagacctgccccccaccctactaccacttccaggactggaggtgtgtgaacttctccttctgccaggacctgcaccacaagtgcaagaacagccggcggcagggctgccaccagtatgtgatccacaacaacaagtgcatccctgagtgccccagcggctacaccatgaacagcagcaacctgctgtgcaccccctgcctgggcccctgccccaaggtgtgccacctgctggagggggagaagaccatcgacagcgtgaccagcgcccaggagctgcggggctgcaccgtcatcaatggcagcctcatcatcaacatccggggcggcaacaacctggccgctgagctggaggccaacctgggcctcatcgaggagatcagcggctacctgaagatccgccgctcctatgccctggtgtccctgtccttcttcaggaagctgcggctcatccggggggagaccctggagatcggcaactacagcttctacgccctggacaaccagaacctgcggcagctgtgggactggagcaagcacaacctgaccatcacccagggcaagctgttcttccactacaaccccaagctgtgcctgtctgagatccacaagatggaggaggtgtctggcaccaagggccggcaggagagaaatgacatcgccctgaagaccaatggagaccaggccagctgtgaaaatgagctgctgaagttctcctacatccgcaccagctttgacaagatcctgctgcgctgggagccctactggcccccagacttccgggacctgctgggcttcatgctgttctacaaggaggccccctaccagaatgtgacagaatttgatggccaggatgcctgtggcagcaacagctggacagtggtggacattgatcctcccctgcggagcaatgaccccaagagccagaaccaccctggctggctgatgaggggcctgaagccctggacccagtatgccatctttgtgaagaccctggtgaccttcagtgatgaaagaaggacctacggggccaagagtgacatcatctacgtgcagacagatgccaccaaccccagcgtgcccctggaccccatctctgtgagcaacagcagcagccagatcatcctgaagtggaagccacccagcgaccccaatggaaacatcacccactacctggtgttctgggagcggcaggccgaggacagcgagctgtttgagctggactactgcctgaagggcctgaagctgcccagcaggacctggagccccccatttgaaagtgaggacagccagaagcacaaccagagtgaatatgaagattctgctggggagtgctgcagctgccccaagacagacagccagatcctgaaggagctggaggagagcagcttcaggaagacctttgaggactacctgcacaacgtggtgtttgtgcccaggaagaccagcagcggcaccggggctgaggacccccggcccagcaggaagagaagaagcctgggagatgtgggcaatgtgacagtggccgtgcccaccgtggccgccttccccaacaccagcagcacctctgtgcccaccagccctgaggagcaccggccctttgagaaggtggtgaacaaggagagcctggtgatcagcggcctgcggcacttcaccggctaccgcatcgagctgcaggcctgcaaccaggacaccccagaggagcgctgcagcgtggccgcctacgtgtctgcccggaccatgcctgaggccaaggcagatgacatcgtgggccctgtgacccatgagatctttgaaaataatgtggtgcacctgatgtggcaggagcccaaggagcccaacggcctgattgtgctgtatgaggtgtcctacagaagatatggagatgaggagctgcacctgtgtgtgtccaggaagcactttgccctggagcggggctgccgcctgcggggcctgagccctggcaactacagcgtgcgcatccgggccaccagcctggccggaaatggctcctggacagagcccacctacttctacgtgacagactacctggatgtgcccagcaacatcgccaagatcatcatcggccccctcatctttgtgttcctgttctctgtggtgattggcagcatctacctgttcctgaggaagaggcagccagatggccccctgggccccctgtatgccagcagcaaccctgagtacctgagcgccagtgatgtgttcccctgcagcgtgtatgtgcctgatgagtgggaggtgtcccgggagaagatcaccctgctgcgggagctgggccagggcagctttggcatggtgtatgagggcaatgcccgggacatcatcaagggggaggccgagaccagggtggccgtgaagacagtgaatgaaagtgccagcctgcgggagagaattgagttcctgaatgaggcctctgtgatgaagggcttcacctgccaccacgtggtgcggctgctgggcgtggtgtccaagggccagcccaccctggtggtgatggagctgatggcccacggggacctgaagagctacctgcggagcctgcggcctgaggccgagaacaaccctggccggcccccacccaccctgcaggagatgatccagatggctgctgagattgctgatggcatggcctacctgaatgccaagaagtttgtgcaccgggacctggccgccaggaactgcatggtggcccatgacttcaccgtgaagattggagactttggcatgacccgggacatctatgaaacagactactacaggaagggcggcaagggcctgctgcctgtgcgctggatggcccctgagagcctgaaggatggagtcttcaccaccagcagtgacatgtggagctttggagtggtgctgtgggagatcaccagcctggccgagcagccctaccagggcctgagcaatgagcaggtgctgaagtttgtgatggatggcggctacctggaccagcctgacaactgcccagagcgggtgacagacctgatgaggatgtgctggcagttcaaccccaagatgaggcccaccttcctggagatcgtgaacctgctgaaggatgacctgcaccccagcttccctgaggtgtccttcttccacagcgaggagaacaaggcccctgagagcgaggagctggagatggagtttgaggacatggagaatgtgcccctggacaggagcagccactgccagcgggaggaggccggcggcagagatggcggcagcagcctgggcttcaagaggagctatgaggagcacatcccctacacccacatgaatggaggcaagaagaatggccgcatcctgaccctgcccaggagcaaccccagctag

SEQ ID NO: 4454 - DNA, 4149 bp, Artificial Sequence
  derived and/or modified sequence
atggccaccggcggccggcggggcgccgccgccgcccccctgctggtagccgtcgccgcattactgctgggagcagcagggcatttatatcctggagaggtctgtcctggaatggacatccggaacaacctgactcgtctgcatgagttggagaattgtagcgtgatcgaaggccatctgcagattctgctgatgttcaaaacccggcctgaagacttccgcgatctcagttttccaaagctgatcatgataaccgactatctactcttgtttcgcgtgtatggtctcgagagccttaaggatctttttcctaaccttacagtgatcaggggctctcgcttgtttttcaattacgccctggtgatcttcgaaatggtgcacctgaaggagctgggtctctacaatctcatgaatataactcgaggaagcgtgcgtatcgagaaaaacaatgaactgtgctacctggcaacaattgattggtctaggattttagacagcgtggaggataattatatagttttgaacaaggacgacaatgaggagtgtggagacatctgccctggcactgctaaaggcaagacaaattgtccggcaacagttattaacggacaatttgtggaacggtgctggacgcattcacactgtcagaaggtttgtcccaccatttgtaaaagccacggctgtaccgctgaaggcttgtgttgtcacagcgagtgcctgggaaattgctctcaaccagacgacccaacaaaatgtgtggcatgtagaaatttctaccttgatggacggtgcgttgaaacatgcccaccgccttattatcatttccaggactggaggtgtgtgaatttttcgttctgtcaggacctccaccacaagtgcaagaactcacgcaggcagggatgccaccagtatgttattcacaacaataagtgtatccccgaatgcccttccggctatacaatgaatagttctaatctgttatgcaccccttgtctgggaccctgccccaaagtttgtcacctgctggagggcgaaaaaaccattgatagtgtcacttctgcacaggaactccgggggtgtacggtcatcaatggcagccttatcatcaatatccgaggaggtaataaccttgcagcagagcttgaggccaacctcggcttgatagaagaaattagcggatacctgaaaattcggaggagctacgccttggtctccctgtcttttttccggaaattgcgattgatcagaggggaaactctcgaaatcggcaattactccttctacgccttagacaatcaaaacttgagacaactatgggattggtccaagcacaacctgacaatcacccagggtaaattgttctttcactacaatccaaagttgtgtctctctgagatccataaaatggaagaggtttcgggtacaaagggtagacaggaaaggaacgatatcgctctgaagacaaacggcgaccaggcaagctgtgagaacgagctcctgaagttcagctatattcgcaccagcttcgataaaattttattgaggtgggaaccttactggcctcctgacttccgggatctgctgggattcatgctgttttataaagaggctccctatcagaacgtcaccgaattcgacggtcaggacgcctgcggttcgaactcatggacggttgtggacatagatccccccctccggtctaacgatcctaaatctcagaatcaccctggctggctgatgcggggtttaaaaccttggacgcagtacgctatattcgtgaaaactttagttacgttttccgacgagcgtagaacttatggcgctaaatccgatataatttatgtacagactgatgctactaacccatctgtgcctcttgacccgataagcgtatctaactcatcctctcagatcatcctcaaatggaagccaccctcagatcccaacggcaatataacacattacctggtcttttgggaacgccaggctgaggactctgaattatttgaactcgactactgtctgaaggggctgaaactgcccagtcgcacttggagcccgccttttgagtccgaagactctcagaaacacaaccaatccgagtacgaggatagcgccggcgagtgctgttcctgtccaaagaccgacagccagatactgaaggagctcgaagaatctagcttccgcaaaacatttgaagattatcttcataatgttgtgtttgtcccgaggaaaacctcatcaggtacaggtgcagaagacccaagaccctctaggaagcgacggtcattgggggatgtgggcaatgttacggtagccgtccctactgtcgccgcatttcccaatacttctagcacttctgtgccgacttcgccggaggaacatcgcccctttgagaaggtcgtgaataaagagagccttgttatctcaggtcttaggcacttcaccggatacagaattgagctgcaagcttgtaaccaggatacacccgaggagaggtgtagcgtggccgcctacgtgagcgctaggacaatgcccgaagccaaagcagatgatatagtaggcccagtaacacatgagatcttcgagaacaatgttgttcatctcatgtggcaggagccgaaagaacctaacggcctcatcgtgctgtatgaggtgtcgtatcggcgatacggagacgaggagttgcacctgtgtgtgagccgcaagcactttgccctcgaaagaggctgtcggctgcgaggtttgtcacctggaaattatagcgtcaggatccgagctacgtccctcgctggtaatggctcctggacagaacctacatacttctatgttaccgactatctggacgttcccagcaacatcgccaaaatcattatcgggccactgatcttcgtattcctgtttagcgtcgtcatcggcagtatctatttatttctgcgcaagagacagccggacggacctctggggcctctatatgccagctccaatcccgaataccttagtgcatccgatgtatttccttgttctgtgtatgtgccagacgagtgggaagtctcacgcgagaagatcactctactacgagaacttggccaggggtctttcggcatggtgtatgagggaaacgcgcgcgacatcatcaagggagaggcagaaacgcgagttgcagtcaaaacagtaaacgaaagtgcctctttacgcgagaggattgagttcctcaatgaggcctccgtcatgaagggtttcacctgccatcatgtcgtacggttattgggagtggtatctaaaggtcagcccacactcgtggttatggagctgatggcgcatggcgatcttaaatcttacctgagatctctgagacctgaagccgagaataacccgggtcgccctcctcctacgctccaggaaatgatccaaatggcagcagaaattgctgatggcatggcctacttgaacgcaaagaagttcgttcaccgggatttagcagcaagaaactgcatggtcgcccacgacttcacggtgaagatcggagattttggcatgacacgcgatatatatgagaccgattattaccgcaaaggtggaaaaggactgctgccagtgcgttggatggcaccagagagtttgaaagatggcgtctttacaacgagctctgacatgtggtccttcggcgtcgtgctgtgggagatcacaagcctggcagagcagccataccaaggtctatccaatgagcaggtgcttaagtttgttatggatggcggatacctggatcaacctgataattgccccgagagagtcacggatctgatgcgtatgtgctggcagtttaatcctaagatgcgcccgacattcctcgagattgtgaacctgctgaaagatgatctgcatccgagcttcccagaggtcagcttttttcattcggaggaaaacaaggcccctgaatccgaggaattagaaatggagttcgaggatatggaaaacgtgccacttgatagatctagccattgccaacgtgaggaagccggggggcgtgatggaggcagcagcttgggcttcaaacgcagctatgaggagcacatcccttacacccacatgaatgggggcaagaaaaatggaaggatcttgaccctgccaaggagcaacccaagttag

SEQ ID NO: 4455 - DNA, 4149 bp, Artificial Sequence
  derived and/or modified sequence
atggcaactggcggaaggagaggcgcagctgctgcccctctgctcgtggctgtggccgctctgctgctcggagctgccggacacctctacccaggtgaagtgtgcccagggatggacatccgcaataacctcacaaggttgcacgagttagagaactgtagtgtcattgaaggacatctgcagatattgctcatgtttaaaacaaggccagaggacttccgcgacctaagtttccctaagctgatcatgatcacggactacctgttgttgttcagggtgtacggcctcgagagcttaaaagatctcttccccaatctgaccgttattaggggttctagattattctttaattacgcactggtcatctttgagatggtccacttgaaagagttaggtctctataacctgatgaatattactcggggaagcgtccggattgagaaaaacaacgagctgtgctacctggccaccatagattggagccggatactggactcagtcgaagataactacatcgtgttgaataaggacgataatgaggagtgcggtgacatatgtcctggcaccgcgaaggggaagaccaactgtcccgcaactgtgatcaatggtcaattcgtggagcgatgctggacccactctcactgtcagaaagtgtgccctaccatttgcaaatcccacggatgtacagcggagggcctgtgttgccatagcgagtgcctcggaaattgcagccagcccgatgatccgaccaagtgtgtagcatgcaggaacttttatttggacggcaggtgcgtcgagacatgcccacccccttattaccactttcaggattggaggtgcgtcaacttctcattctgccaggatcttcatcacaagtgtaagaacagtcggaggcaggggtgtcatcaatacgtgatccacaataacaagtgtatacccgagtgccccagcgggtacactatgaactcgagcaatctcctttgtacaccatgcctgggtccctgccccaaggtgtgccacctgctcgaaggggaaaagacgatcgacagcgttactagtgctcaagaattgcgtggctgcacagtaattaacgggtcattgataattaatattcggggaggcaataacctcgccgctgagttggaggcaaacctgggactcatagaggagatatcaggctatctcaagatcagacggagctacgccttagtcagtctatctttttttcgcaagctgcgccttatcaggggagaaaccctcgaaattgggaactattccttttacgccctggacaaccagaaccttagacagctgtgggattggtccaagcataaccttaccatcactcaagggaagctctttttccattataatcccaagttatgcttatctgaaatacataaaatggaagaggtaagcggaaccaagggaagacaggaacggaatgatatagcccttaagacaaacggagaccaggccagctgtgagaatgaattgctgaaattttcctatattcgaacgagttttgacaaaatcctcttgcggtgggaaccctactggcctccggatttccgagatctcctgggattcatgctgttctacaaagaagcgccatatcagaacgttaccgaattcgatggccaggacgcctgcgggagtaacagctggactgtggtcgacattgacccgcctttgcggagcaacgatccaaagtctcagaaccatcctgggtggcttatgcgtggactgaagccctggacacaatacgccatctttgtcaagacgttggtgactttctccgacgagagaaggacatacggcgcaaagagcgacataatttatgttcagacagacgccaccaacccgtcagtgccactggatccaatttccgttagcaatagcagcagccaaattatcctgaaatggaaaccccctagtgatcccaacggaaacataacacactatctggtgttttgggaaagacaggccgaggacagcgaattattcgagttggattactgtctgaaaggattaaaactgccatcgcggacatggtcacccccattcgaatccgaagatagtcagaaacacaatcagagcgaatacgaagactctgcaggggaatgttgtagctgtccaaagacagattcccagatattgaaggagctggaagagtcgtcatttcgaaaaacctttgaagattatttacacaatgtcgtgttcgttcccagaaagacgtcttcagggaccggcgctgaagatcctcgtccttctcggaaaagacgaagtctcggggatgtcggcaacgttacggtggcagtcccaaccgtggcagctttccctaacacctcaagcactagcgtgccaacttcaccggaggaacatagacctttcgaaaaggtagtgaacaaagaatcattggtgatttctggtctccggcacttcacaggctacaggatcgagctgcaagcatgcaatcaggatactcccgaggagcgttgtagcgtggctgcctacgtgtctgcgcgaacgatgcccgaggccaaggccgatgacatcgtgggccctgtcacacatgagatcttcgagaacaacgtagttcacctgatgtggcaagagcctaaggagcctaatggactcatagtgctgtacgaggtgtcctacagacggtacggcgatgaggaactacatctttgtgtatcccgtaagcacttcgccctggagcgtgggtgtagattacggggactgagcccaggaaactacagcgttagaatccgcgcaacaagccttgccggtaatggttcctggacggagcctacctacttttatgtgacagactacttagacgtcccaagcaacatcgctaaaattattattggacccctgatatttgtctttctgttcagcgtggtgatcggatctatatacctgttcctgagaaaacgccagcctgacggcccactgggaccgctctacgcgagctccaatcctgaatacctctccgctagtgacgtgtttccgtgctccgtctacgtccctgatgaatgggaagtgtccagggaaaaaataacactgctaagggagctggggcagggatcctttggaatggtgtacgagggaaatgcacgggacatcatcaagggcgaggccgagacacgcgtggcggtgaagacagtaaatgaaagcgcatcgctgcgggagcggatcgaatttctgaatgaagcttccgtaatgaaagggttcacatgccatcacgttgtgcggctgctgggcgtcgtatcgaaaggacagccaacgctggtggtgatggagctgatggcccacggggacctcaagagctacttgagatctttgagacctgaggctgaaaacaacccgggtcgcccacctcccacgctgcaggagatgattcagatggcagccgaaatcgcggacgggatggcctacctaaacgcaaaaaagtttgtgcacagggatctggcagctaggaactgtatggtagctcatgatttcacagtgaaaattggcgacttcgggatgacccgggacatctacgagacggactattatcgtaaaggagggaagggactgctgcctgtccggtggatggcgccagaatctctgaaagatggcgtgtttactacctcgtctgacatgtggtctttcggggtagttctgtgggaaatcacttccctggcagaacagccttatcaggggctgtccaatgagcaggtgcttaaatttgtcatggacggcggttatctggaccaacccgataattgccctgaacgggtcaccgatctgatgcgaatgtgctggcagtttaatcccaaaatgcgccctacgtttctggagatcgtaaatctcctgaaggacgatttgcacccctctttccccgaagtgtctttcttccatagcgaggaaaataaggcccctgaatctgaagaactggagatggagttcgaggatatggagaacgtgccccttgatagatcaagtcattgccagcgggaggaggcgggaggacgggacggaggttcatccttgggatttaagcgcagctacgaggaacatatcccttatacccacatgaatggcggtaagaagaatggtagaatcttgacattgccccgttccaatccctcgtag

SEQ ID NO: 4456 - DNA, 4149 bp, Artificial Sequence
  derived and/or modified sequence
atggccaccggcggcagaagaggcgccgccgccgcccccctgctggtggccgtggccgccctgctgctgggcgccgccggccacctgtaccccggcgaggtgtgccccggcatggacatcagaaacaacctgaccagactgcacgagctggagaactgcagcgtgatcgagggccacctgcagatcctgctgatgttcaagaccagacccgaggacttcagagacctgagcttccccaagctgatcatgatcaccgactacctgctgctgttcagagtgtacggcctggagagcctgaaggacctgttccccaacctgaccgtgatcagaggcagcagactgttcttcaactacgccctggtgatcttcgagatggtgcacctgaaggagctgggcctgtacaacctgatgaacatcaccagaggcagcgtgagaatcgagaagaacaacgagctgtgctacctggccaccatcgactggagcagaatcctggacagcgtggaggacaactacatcgtgctgaacaaggacgacaacgaggagtgcggcgacatctgccccggcaccgccaagggcaagaccaactgccccgccaccgtgatcaacggccagttcgtggagagatgctggacccacagccactgccagaaggtgtgccccaccatctgcaagagccacggctgcaccgccgagggcctgtgctgccacagcgagtgcctgggcaactgcagccagcccgacgaccccaccaagtgcgtggcctgcagaaacttctacctggacggcagatgcgtggagacctgcccccccccctactaccacttccaggactggagatgcgtgaacttcagcttctgccaggacctgcaccacaagtgcaagaacagcagaagacagggctgccaccagtacgtgatccacaacaacaagtgcatccccgagtgccccagcggctacaccatgaacagcagcaacctgctgtgcaccccctgcctgggcccctgccccaaggtgtgccacctgctggagggcgagaagaccatcgacagcgtgaccagcgcccaggagctgagaggctgcaccgtgatcaacggcagcctgatcatcaacatcagaggcggcaacaacctggccgccgagctggaggccaacctgggcctgatcgaggagatcagcggctacctgaagatcagaagaagctacgccctggtgagcctgagcttcttcagaaagctgagactgatcagaggcgagaccctggagatcggcaactacagcttctacgccctggacaaccagaacctgagacagctgtgggactggagcaagcacaacctgaccatcacccagggcaagctgttcttccactacaaccccaagctgtgcctgagcgagatccacaagatggaggaggtgagcggcaccaagggcagacaggagagaaacgacatcgccctgaagaccaacggcgaccaggccagctgcgagaacgagctgctgaagttcagctacatcagaaccagcttcgacaagatcctgctgagatgggagccctactggccccccgacttcagagacctgctgggcttcatgctgttctacaaggaggccccctaccagaacgtgaccgagttcgacggccaggacgcctgcggcagcaacagctggaccgtggtggacatcgacccccccctgagaagcaacgaccccaagagccagaaccaccccggctggctgatgagaggcctgaagccctggacccagtacgccatcttcgtgaagaccctggtgaccttcagcgacgagagaagaacctacggcgccaagagcgacatcatctacgtgcagaccgacgccaccaaccccagcgtgcccctggaccccatcagcgtgagcaacagcagcagccagatcatcctgaagtggaagccccccagcgaccccaacggcaacatcacccactacctggtgttctgggagagacaggccgaggacagcgagctgttcgagctggactactgcctgaagggcctgaagctgcccagcagaacctggagcccccccttcgagagcgaggacagccagaagcacaaccagagcgagtacgaggacagcgccggcgagtgctgcagctgccccaagaccgacagccagatcctgaaggagctggaggagagcagcttcagaaagaccttcgaggactacctgcacaacgtggtgttcgtgcccagaaagaccagcagcggcaccggcgccgaggaccccagacccagcagaaagagaagaagcctgggcgacgtgggcaacgtgaccgtggccgtgcccaccgtggccgccttccccaacaccagcagcaccagcgtgcccaccagccccgaggagcacagacccttcgagaaggtggtgaacaaggagagcctggtgatcagcggcctgagacacttcaccggctacagaatcgagctgcaggcctgcaaccaggacacccccgaggagagatgcagcgtggccgcctacgtgagcgccagaaccatgcccgaggccaaggccgacgacatcgtgggccccgtgacccacgagatcttcgagaacaacgtggtgcacctgatgtggcaggagcccaaggagcccaacggcctgatcgtgctgtacgaggtgagctacagaagatacggcgacgaggagctgcacctgtgcgtgagcagaaagcacttcgccctggagagaggctgcagactgagaggcctgagccccggcaactacagcgtgagaatcagagccaccagcctggccggcaacggcagctggaccgagcccacctacttctacgtgaccgactacctggacgtgcccagcaacatcgccaagatcatcatcggccccctgatcttcgtgttcctgttcagcgtggtgatcggcagcatctacctgttcctgagaaagagacagcccgacggccccctgggccccctgtacgccagcagcaaccccgagtacctgagcgccagcgacgtgttcccctgcagcgtgtacgtgcccgacgagtgggaggtgagcagagagaagatcaccctgctgagagagctgggccagggcagcttcggcatggtgtacgagggcaacgccagagacatcatcaagggcgaggccgagaccagagtggccgtgaagaccgtgaacgagagcgccagcctgagagagagaatcgagttcctgaacgaggccagcgtgatgaagggcttcacctgccaccacgtggtgagactgctgggcgtggtgagcaagggccagcccaccctggtggtgatggagctgatggcccacggcgacctgaagagctacctgagaagcctgagacccgaggccgagaacaaccccggcagacccccccccaccctgcaggagatgatccagatggccgccgagatcgccgacggcatggcctacctgaacgccaagaagttcgtgcacagagacctggccgccagaaactgcatggtggcccacgacttcaccgtgaagatcggcgacttcggcatgaccagagacatctacgagaccgactactacagaaagggcggcaagggcctgctgcccgtgagatggatggcccccgagagcctgaaggacggcgtgttcaccaccagcagcgacatgtggagcttcggcgtggtgctgtgggagatcaccagcctggccgagcagccctaccagggcctgagcaacgagcaggtgctgaagttcgtgatggacggcggctacctggaccagcccgacaactgccccgagagagtgaccgacctgatgagaatgtgctggcagttcaaccccaagatgagacccaccttcctggagatcgtgaacctgctgaaggacgacctgcaccccagcttccccgaggtgagcttcttccacagcgaggagaacaaggcccccgagagcgaggagctggagatggagttcgaggacatggagaacgtgcccctggacagaagcagccactgccagagagaggaggccggcggcagagacggcggcagcagcctgggcttcaagagaagctacgaggagcacatcccctacacccacatgaacggcggcaagaagaacggcagaatcctgaccctgcccagaagcaaccccagctag

SEQ ID NO: 4457 - protein, 283 aa, Artificial Sequence
  derived and/or modified sequence
MNGEEQYYAATQLYKDPCAFQRGPAPEFSASPPACLYMGRQPPPPPPHPFPGALGALEQGSPPDISPYEVPPLADDPAVAHLHHHLPAQLALPHPPAGPFPEGAEPGVLEEPNRVQLPFPWMKSTKAHAWKGQWAGGAYAAEPEENKRTRTAYTRAQLLELEKEFLFNKYISRPRRVELAVMLNLTERHIKIWFQNRRMKWKKEEDKKRGGGTAVGGGGVAEPEQDCAVTSGEELLALPPPPPPGGAVPPAAPVAAREGRLPPGLSASPQPSSVAPRRPQEPR

SEQ ID NO: 4458 - DNA, 2573 bp, Artificial Sequence
  derived and/or modified sequence
gggtggcgccgggagtgggaacgccacacagtgccaaatccccggctccagctcccgactcccggctcccggctcccggctcccggtgcccaatcccgggccgcagccatgaacggcgaggagcagtactacgcggccacgcagctttacaaggacccatgcgcgttccagcgaggcccggcgccggagttcagcgccagcccccctgcgtgcctgtacatgggccgccagcccccgccgccgccgccgcacccgttccctggcgccctgggcgcgctggagcagggcagccccccggacatctccccgtacgaggtgccccccctcgccgacgaccccgcggtggcgcaccttcaccaccacctcccggctcagctcgcgctcccccacccgcccgccgggcccttcccggagggagccgagccgggcgtcctggaggagcccaaccgcgtccagctgcctttcccatggatgaagtctaccaaagctcacgcgtggaaaggccagtgggcaggcggcgcctacgctgcggagccggaggagaacaagcggacgcgcacggcctacacgcgcgcacagctgctagagctggagaaggagttcctattcaacaagtacatctcacggccgcgccgggtggagctggctgtcatgttgaacttgaccgagagacacatcaagatctggttccaaaaccgccgcatgaagtggaaaaaggaggaggacaagaagcgcggcggcgggacagctgtcgggggtggcggggtcgcggagcctgagcaggactgcgccgtgacctccggcgaggagcttctggcgctgccgccgccgccgccccccggaggtgctgtgccgcccgctgcccccgttgccgcccgagagggccgcctgccgcctggccttagcgcgtcgccacagccctccagcgtcgcgcctcggcggccgcaggaaccacgatgagaggcaggagctgctcctggctgaggggcttcaaccactcgccgaggaggagcagagggcctaggaggaccccgggcgtggaccacccgccctggcagttgaatggggcggcaattgcggggcccaccttagaccgaaggggaaaacccgctctctcaggcgcatgtgccagttggggccccgcgggtagatgccggcaggccttccggaagaaaaagagccattggtttttgtagtattggggccctcttttagtgatactggattggcgttgtttgtggctgttgcgcacatccctgccctcctacagcactccaccttgggacctgtttagagaagccggctcttcaaagacaatggaaactgtaccatacacattggaaggctccctaacacacacagcggggaagctgggccgagtaccttaatctgccataaagccattcttactcgggcgacccctttaagtttagaaataattgaaaggaaatgtttgagttttcaaagatcccgtgaaattgatgccagtggaatacagtgagtcctcctcttcctcctcctcctcttccccctccccttcctcctcctcctcttcttttccctcctcttcctcttcctcctgctctcctttcctccccctcctcttttccctcctcttcctcttcctcctgctctcctttcctccccctcctctttctcctcctcctcctcttcttccccctcctctccctcctcctcttcttccccctcctctccctcctcctcttcttctccctcctcttcctcttcctcctcttccacgtgctctcctttcctccccctcctcttgctccccttcttccccgtcctcttcctcctcctcctcttcttctccctcctcttcctcctcctctttcttcctgacctctttctttctcctcctcctccttctacctccccttctcatccctcctcttcctcttctctagctgcacacttcactactgcacatcttataacttgcacccctttcttctgaggaagagaacatcttgcaaggcagggcgagcagcggcagggctggcttaggagcagtgcaagagtccctgtgctccagttccacactgctggcagggaaggcaaggggggacgggcctggatctgggggtgagggagaaagatggacccctgggtgaccactaaaccaaagatattcggaactttctatttaggatgtggacgtaattcctgttccgaggtagaggctgtgctgaagacaagcacagtggcctggtgcgccttggaaaccaacaactattcacgagccagtatgaccttcacatctttagaaattatgaaaacgtatgtgattggagggtttggaaaaccagttatcttatttaacattttaaaaattacctaacagttatttacaaacaggtctgtgcatcccaggtctgtcttcttttcaaggtctgggccttgtgctcgggttatgtttgtgggaaatgcttaataaatactgataatatgggaagagatgaaaactgattctcctcactttgtttcaaacctttctggcagtgggatgattcgaattcacttttaaaattaaattagcgtgttttgttttg

SEQ ID NO: 4459 - DNA, 216 bp, Artificial Sequence
  derived and/or modified sequence
atgaagatcgtgcacgtgaacgtgatgggcgtgggcggctggggcgccgtgttcctggacatgtggcacgtgacccaggagagcaagagacccatcatcagcaagatgcccgcctggatcttcccctgccaccccctggacgagcagacctaccacatggccctgaacgccgccaccttccccaagaacgccacctggatcggccccctgtggtag

SEQ ID NO: 4460 - DNA, 852 bp, Artificial Sequence
  derived and/or modified sequence
atgaatggcgaggaacagtactacgcagcaactcaattatacaaggatccctgcgctttccagcgagggcctgctcccgaatttagcgcctcgccacctgcatgtctctatatgggccgccagcccccgcctccacccccacatccttttcccggagctctcggggctcttgagcaaggcagcccaccagatatctccccctatgaagtgcctccactcgcagacgatcccgccgtggcacacctgcatcatcatctgcccgcccagcttgcgctgccccatcctccagccggcccatttccagaaggagccgagccaggagtgctcgaggagcctaatcgagttcaactgccattcccttggatgaaaagtaccaaggcccatgcctggaaggggcagtgggcgggcggagcatacgccgctgagcccgaggagaataaaaggaccagaaccgcttatacaagggcccagctcctggaactcgagaaagagttcctattcaacaagtatatctctcgccctcgccgggtggaactggcagtgatgctgaatctgaccgaacggcatatcaagatttggttccagaatagacgaatgaagtggaaaaaggaggaagataagaaacgcggaggggggacggccgttgggggcggcggagtcgccgagcctgagcaggattgcgcagttacaagcggagaggaattactggcccttccaccccccccccctcccggaggggcagtgccacccgccgcacctgtggccgctcgtgaaggaagacttcctcccggtctcagcgccagtccacagccttcttctgtcgctcctagaagaccccaagaaccccgatag

SEQ ID NO: 4461 - DNA, 852 bp, Artificial Sequence
  derived and/or modified sequence
atgaatggagaggagcagtactatgctgccacccagctgtacaaggacccctgtgccttccagaggggccctgcccctgagttcagcgccagccccccagcctgcctgtacatgggccggcagcccccacctcctccaccccaccccttccctggggccctgggcgccctggagcagggcagccccccagacatcagcccctatgaggtgccccccctggctgatgatcctgctgtggcccacctgcaccaccacctgcctgcccagctggccctgccccaccccccagctggccccttccctgagggcgctgagcccggggtgctggaggagcccaacagagtgcagctgcccttcccctggatgaagagcaccaaggcccacgcctggaagggccagtgggccggcggggcctatgctgctgagcctgaggagaacaagaggaccaggacagcctacacccgggcccagctgctggagctggagaaggagttcctgttcaacaagtacatcagccggcccaggagagtggagctggccgtgatgctgaacctgacagagcggcacatcaagatctggttccagaacagaaggatgaagtggaagaaggaggaggacaagaagaggggcggcggcacagctgtgggcggcggcggcgtggccgagcctgagcaggactgtgctgtgaccagcggggaggagctgctggccctgcccccacctcctcctcctgggggcgctgtgcccccagctgcccctgtggccgcccgggagggccgcctgcccccaggcctgagcgccagcccccagcccagctctgtggccccccggcggccccaggagcccaggtag

SEQ ID NO: 4462 - DNA, 852 bp, Artificial Sequence
  derived and/or modified sequence
atgaacggcgaggagcagtactacgccgccacccagctgtacaaggacccctgcgctttccagaggggccctgcacccgaattctccgccagcccccccgcctgtctgtacatgggcagacagccgccgccccccccccctcacccctttcccggcgcattgggggctcttgagcagggctccccacccgacatctctccatacgaagtgccacctttggccgacgatcccgctgttgctcatctgcatcaccacttgccagcacaacttgcgctgcctcacccgcctgctggtccgttccccgagggtgctgaacctggggttctggaagagcccaaccgagtccagttaccgtttccctggatgaagtcaaccaaggcgcacgcttggaaaggtcagtgggcagggggcgcctatgctgccgagcccgaggagaacaagagaacccgcaccgcttatacccgggcgcaacttcttgaactggagaaagagtttctcttcaacaagtacatatcacgtccccggagggtggagttggctgtcatgttgaacctgactgagcgtcacatcaagatctggttccagaacaggagaatgaaatggaaaaaggaagaggataaaaagcggggaggaggtactgccgtgggaggaggaggcgtggccgagcctgagcaggattgtgctgttacatcaggagaggagctgctagccctccccccaccgccaccaccagggggcgctgtccccccagctgctcccgttgccgctcgtgagggaagattacccccaggtctatcagcttcaccgcagcccagctcagtagctcctcgccgccctcaggagcccagatag

SEQ ID NO: 4463 - DNA, 2501 bp, Artificial Sequence
  derived and/or modified sequence
aaagcgagcaggggtggcgccgggagtgggaacgccacacagtgccaaatccccggctccagctcccgactcccggctcccggctcccggctcccggtgcccaatcccgggccgcagccatgaacggcgaggagcagtactacgcggccacgcagctttacaaggacccatgcgcgttccagcgaggcccggcgccggagttcagcgccagcccccctgcgtgcctgtacatgggccgccagcccccgccgccgccgccgcacccgttccctggcgccctgggcgcgctggagcagggcagccccccggacatctccccgtacgaggtgccccccctcgccgacgaccccgcggtggcgcaccttcaccaccacctcccggctcagctcgcgctcccccacccgcccgccgggcccttcccggagggagccgagccgggcgtcctggaggagcccaaccgcgtccagctgcctttcccatggatgaagtctaccaaagctcacgcgtggaaaggccagtgggcaggcggcgcctacgctgcggagccggaggagaacaagcggacgcgcacggcctacacgcgcgcacagctgctagagctggagaaggagttcctattcaacaagtacatctcacggccgcgccgggtggagctggctgtcatgttgaacttgaccgagagacacatcaagatctggttccaaaaccgccgcatgaagtggaaaaaggaggaggacaagaagcgcggcggcgggacagctgtcgggggtggcggggtcgcggagcctgagcaggactgcgccgtgacctccggcgaggagcttctggcgctgccgccgccgccgccccccggaggtgctgtgccgcccgctgcccccgttgccgcccgagagggccgcctgccgcctggccttagcgcgtcgccacagccctccagcgtcgcgcctcggcggccgcaggaaccacgatgagaggcaggagctgctcctggctgaggggcttcaaccactcgccgaggaggagcagagggcctaggaggaccccgggcgtggaccacccgccctggcagttgaatggggcggcaattgcggggcccaccttagaccgaaggggaaaacccgctctctcaggcgcatgtgccagttggggccccgcgggtagatgccggcaggccttccggaagaaaaagagccattggtttttgtagtattggggccctcttttagtgatactggattggcgttgtttgtggctgttgcgcacatccctgccctcctacagcactccaccttgggacctgtttagagaagccggctcttcaaagacaatggaaactgtaccatacacattggaaggctccctaacacacacagcggggaagctgggccgagtaccttaatctgccataaagccattcttactcgggcgacccctttaagtttagaaataattgaaaggaaatgtttgagttttcaaagatcccgtgaaattgatgccagtggaatacagtgagtcctcctcttcctcctcctcctcttccccctccccttcctcctcctcctcttcttttccctcctcttcctcttcctcctgctctcctttcctccccctcctcttttccctcctcttcctcttcctcctgctctcctttcctccccctcctctttctcctcctcctcctcttcttccccctcctctccctcctcctcttcttccccctcctctccctcctcctcttcttctccctcctcttcctcttcctcctcttccacgtgctctcctttcctccccctcctcttgctccccttcttccccgtcctcttcctcctcctcctcttcttctccctcctcttcctcctcctctttcttcctgacctctttctttctcctcctcctccttctacctccccttctcatccctcctcttcctcttctctagctgcacacttcactactgcacatcttataacttgcacccctttcttctgaggaagagaacatcttgcaaggcagggcgagcagcggcagggctggcttaggagcagtgcaagagtccctgtgctccagttccacactgctggcagggaaggcaaggggggacgggcctggatctgggggtgagggagaaagatggacccctgggtgaccactaaaccaaagatattcggaactttctatttaggatgtggacgtaattcctgttccgaggtagaggctgtgctgaagacaagcacagtggcctggtgcgccttggaaaccaacaactattcacgagccagtatgaccttcacatctttagaaattatgaaaacgtatgtgattggagggtttggaaaaccagttatcttatttaacattttaaaaattacctaacagttatttacaaacaggtctgtgcatcccaggtctgtcttcttttcaaggtctgggccttgtgctcgggttatgtttgtgggaaatgcttaataaatactgataatatgggaagagatgaaaactga

SEQ ID NO: 4464 - DNA, 852 bp, Artificial Sequence
  derived and/or modified sequence
atgaacggcgaagagcagtattatgcggctacccagttatataaagacccgtgtgctttccagcggggacccgctcccgagttttccgcgagccctccagcttgtttgtatatgggccgacagcctcctccccctcctccgcatccgtttcctggggcactaggggcattagagcaaggctcgccacctgacatttctccctacgaagtgcctccgcttgcagacgaccctgcagtggctcacttgcaccatcacctccctgctcagctggctctgccacatccccctgccggaccgttcccagaaggggcagaacccggagtgctggaagagccaaaccgagtgcagctaccattcccctggatgaaatccaccaaggcccatgcctggaaaggccagtgggccggtggggcttacgctgccgagcccgaggaaaacaaacgaacacgcacagcttacacaagggcacagttgttggagttggagaaagaatttctctttaataagtacatatcgcgccctagaagggtcgaactggcagtcatgttaaacctgactgagcgccacataaagatctggttccagaaccgccgaatgaagtggaagaaagaggaagacaagaaacgcggtggcggaaccgcagtgggcggtggcggtgtagccgagcctgagcaagactgcgcagtcacctccggcgaagagctcctcgcacttcctcctcccccacctcccggaggcgctgtgcccccagccgcacctgttgccgctcgtgagggcagactgcctcctgggctatctgccagcccacagccatcttcagtggctccacggcgtccgcaggagccgagatag

SEQ ID NO: 4465 - DNA, 852 bp, Artificial Sequence
  derived and/or modified sequence
atgaacggcgaggagcagtactacgccgccacccagctgtacaaggacccctgcgccttccagagaggccccgcccccgagttcagcgccagcccccccgcctgcctgtacatgggcagacagcccccccccccccccccccaccccttccccggcgccctgggcgccctggagcagggcagcccccccgacatcagcccctacgaggtgccccccctggccgacgaccccgccgtggcccacctgcaccaccacctgcccgcccagctggccctgccccacccccccgccggccccttccccgagggcgccgagcccggcgtgctggaggagcccaacagagtgcagctgcccttcccctggatgaagagcaccaaggcccacgcctggaagggccagtgggccggcggcgcctacgccgccgagcccgaggagaacaagagaaccagaaccgcctacaccagagcccagctgctggagctggagaaggagttcctgttcaacaagtacatcagcagacccagaagagtggagctggccgtgatgctgaacctgaccgagagacacatcaagatctggttccagaacagaagaatgaagtggaagaaggaggaggacaagaagagaggcggcggcaccgccgtgggcggcggcggcgtggccgagcccgagcaggactgcgccgtgaccagcggcgaggagctgctggccctgccccccccccccccccccggcggcgccgtgccccccgccgcccccgtggccgccagagagggcagactgccccccggcctgagcgccagcccccagcccagcagcgtggcccccagaagaccccaggagcccagatag

SEQ ID NO: 4466 - protein, 1073 aa, Artificial Sequence
  derived and/or modified sequence
MAAAGQLCLLYLSAGLLSRLGAAFNLDTREDNVIRKYGDPGSLFGFSLAMHWQLQPEDKRLLLVGAPRAEALPLQRANRTGGLYSCDITARGPCTRIEFDNDADPTSESKEDQWMGVTVQSQGPGGKVVTCAHRYEKRQHVNTKQESRDIFGRCYVLSQNLRIEDDMDGGDWSFCDGRLRGHEKFGSCQQGVAATFTKDFHYIVFGAPGTYNWKGIVRVEQKNNTFFDMNIFEDGPYEVGGETEHDESLVPVPANSYLGFSLDSGKGIVSKDEITFVSGAPRANHSGAVVLLKRDMKSAHLLPEHIFDGEGLASSFGYDVAVVDLNKDGWQDIVIGAPQYFDRDGEVGGAVYVYMNQQGRWNNVKPIRLNGTKDSMFGIAVKNIGDINQDGYPDIAVGAPYDDLGKVFIYHGSANGINTKPTQVLKGISPYFGYSIAGNMDLDRNSYPDVAVGSLSDSVTIFRSRPVINIQKTITVTPNRIDLRQKTACGAPSGICLQVKSCFEYTANPAGYNPSISIVGTLEAEKERRKSGLSSRVQFRNQGSEPKYTQELTLKRQKQKVCMEETLWLQDNIRDKLRPIPITASVEIQEPSSRRRVNSLPEVLPILNSDEPKTAHIDVHFLKEGCGDDNVCNSNLKLEYKFCTREGNQDKFSYLPIQKGVPELVLKDQKDIALEITVTNSPSNPRNPTKDGDDAHEAKLIATFPDTLTYSAYRELRAFPEKQLSCVANQNGSQADCELGNPFKRNSNVTFYLVLSTTEVTFDTPDLDINLKLETTSNQDNLAPITAKAKVVIELLLSVSGVAKPSQVYFGGTVVGEQAMKSEDEVGSLIEYEFRVINLGKPLTNLGTATLNIQWPKEISNGKWLLYLVKVESKGLEKVTCEPQKEINSLNLTESHNSRKKREITEKQIDDNRKFSLFAERKYQTLNCSVNVNCVNIRCPLRGLDSKASLILRSRLWNSTFLEEYSKLNYLDILMRAFIDVTAAAENIRLPNAGTQVRVTVFPSKTVAQYSGVPWWIILVAILAGILMLALLVFILWKCGFFKRNKKDHYDATYHKAEIHAQPSDKERLTSDA

SEQ ID NO: 4467 - protein, 1068 aa, Artificial Sequence
  derived and/or modified sequence
MAAAGQLCLLYLSAGLLSRLGAAFNLDTREDNVIRKYGDPGSLFGFSLAMHWQLQPEDKRLLLVGAPRAEALPLQRANRTGGLYSCDITARGPCTRIEFDNDADPTSESKEDQWMGVTVQSQGPGGKVVTCAHRYEKRQHVNTKQESRDIFGRCYVLSQNLRIEDDMDGGDWSFCDGRLRGHEKFGSCQQGVAATFTKDFHYIVFGAPGTYNWKGLLFLTSVSYTDPDQFVYKTRPPREQPDTFPDVMMNSYLGFSLDSGKGIVSKDEITFVSGAPRANHSGAVVLLKRDMKSAHLLPEHIFDGEGLASSFGYDVAVVDLNKDGWQDIVIGAPQYFDRDGEVGGAVYVYMNQQGRWNNVKPIRLNGTKDSMFGIAVKNIGDINQDGYPDIAVGAPYDDLGKVFIYHGSANGINTKPTQVLKGISPYFGYSIAGNMDLDRNSYPDVAVGSLSDSVTIFRSRPVINIQKTITVTPNRIDLRQKTACGAPSGICLQVKSCFEYTANPAGYNPSISIVGTLEAEKERRKSGLSSRVQFRNQGSEPKYTQELTLKRQKQKVCMEETLWLQDNIRDKLRPIPITASVEIQEPSSRRRVNSLPEVLPILNSDEPKTAHIDVHFLKEGCGDDNVCNSNLKLEYKFCTREGNQDKFSYLPIQKGVPELVLKDQKDIALEITVTNSPSNPRNPTKDGDDAHEAKLIATFPDTLTYSAYRELRAFPEKQLSCVANQNGSQADCELGNPFKRNSNVTFYLVLSTTEVTFDTPDLDINLKLETTSNQDNLAPITAKAKVVIELLLSVSGVAKPSQVYFGGTVVGEQAMKSEDEVGSLIEYEFRVINLGKPLTNLGTATLNIQWPKEISNGKWLLYLVKVESKGLEKVTCEPQKEINSLNLTESHNSRKKREITEKQIDDNRKFSLFAERKYQTLNCSVNVNCVNIRCPLRGLDSKASLILRSRLWNSTFLEEYSKLNYLDILMRAFIDVTAAAENIRLPNAGTQVRVTVFPSKTVAQYSGVPWWIILVAILAGILMLALLVFILWKCGFFKRNKKDHYDATYHKAEIHAQPSDKERLTSDA

SEQ ID NO: 4468 - protein, 1112 aa, Artificial Sequence
  derived and/or modified sequence
MAAAGQLCLLYLSAGLLSRLGAAFNLDTREDNVIRKYGDPGSLFGFSLAMHWQLQPEDKRLLLVGAPRAEALPLQRANRTGGLYSCDITARGPCTRIEFDNDADPTSESKEDQWMGVTVQSQGPGGKVVTCAHRYEKRQHVNTKQESRDIFGRCYVLSQNLRIEDDMDGGDWSFCDGRLRGHEKFGSCQQGVAATFTKDFHYIVFGAPGTYNWKGIVRVEQKNNTFFDMNIFEDGPYEVGGETEHDESLVPVPANSYLGLLFLTSVSYTDPDQFVYKTRPPREQPDTFPDVMMNSYLGFSLDSGKGIVSKDEITFVSGAPRANHSGAVVLLKRDMKSAHLLPEHIFDGEGLASSFGYDVAVVDLNKDGWQDIVIGAPQYFDRDGEVGGAVYVYMNQQGRWNNVKPIRLNGTKDSMFGIAVKNIGDINQDGYPDIAVGAPYDDLGKVFIYHGSANGINTKPTQVLKGISPYFGYSIAGNMDLDRNSYPDVAVGSLSDSVTIFRSRPVINIQKTITVTPNRIDLRQKTACGAPSGICLQVKSCFEYTANPAGYNPSISIVGTLEAEKERRKSGLSSRVQFRNQGSEPKYTQELTLKRQKQKVCMEETLWLQDNIRDKLRPIPITASVEIQEPSSRRRVNSLPEVLPILNSDEPKTAHIDVHFLKEGCGDDNVCNSNLKLEYKFCTREGNQDKFSYLPIQKGVPELVLKDQKDIALEITVTNSPSNPRNPTKDGDDAHEAKLIATFPDTLTYSAYRELRAFPEKQLSCVANQNGSQADCELGNPFKRNSNVTFYLVLSTTEVTFDTPDLDINLKLETTSNQDNLAPITAKAKVVIELLLSVSGVAKPSQVYFGGTVVGEQAMKSEDEVGSLIEYEFRVINLGKPLTNLGTATLNIQWPKEISNGKWLLYLVKVESKGLEKVTCEPQKEINSLNLTESHNSRKKREITEKQIDDNRKFSLFAERKYQTLNCSVNVNCVNIRCPLRGLDSKASLILRSRLWNSTFLEEYSKLNYLDILMRAFIDVTAAAENIRLPNAGTQVRVTVFPSKTVAQYSGVPWWIILVAILAGILMLALLVFILWKCGFFKRNKKDHYDATYHKAEIHAQPSDKERLTSDA

SEQ ID NO: 4469 - DNA, 3222 bp, Artificial Sequence
  derived and/or modified sequence
atggccgccgccggccagctgtgcctgctgtacctgagcgccggcctgctgagcagactgggcgccgccttcaacctggacaccagagaggacaacgtgatcagaaagtacggcgaccccggcagcctgttcggcttcagcctggccatgcactggcagctgcagcccgaggacaagagactgctgctggtgggcgcccccagagccgaggccctgcccctgcagagagccaacagaaccggcggcctgtacagctgcgacatcaccgccagaggcccctgcaccagaatcgagttcgacaacgacgccgaccccaccagcgagagcaaggaggaccagtggatgggcgtgaccgtgcagagccagggccccggcggcaaggtggtgacctgcgcccacagatacgagaagagacagcacgtgaacaccaagcaggagagcagagacatcttcggcagatgctacgtgctgagccagaacctgagaatcgaggacgacatggacggcggcgactggagcttctgcgacggcagactgagaggccacgagaagttcggcagctgccagcagggcgtggccgccaccttcaccaaggacttccactacatcgtgttcggcgcccccggcacctacaactggaagggcatcgtgagagtggagcagaagaacaacaccttcttcgacatgaacatcttcgaggacggcccctacgaggtgggcggcgagaccgagcacgacgagagcctggtgcccgtgcccgccaacagctacctgggcttcagcctggacagcggcaagggcatcgtgagcaaggacgagatcaccttcgtgagcggcgcccccagagccaaccacagcggcgccgtggtgctgctgaagagagacatgaagagcgcccacctgctgcccgagcacatcttcgacggcgagggcctggccagcagcttcggctacgacgtggccgtggtggacctgaacaaggacggctggcaggacatcgtgatcggcgccccccagtacttcgacagagacggcgaggtgggcggcgccgtgtacgtgtacatgaaccagcagggcagatggaacaacgtgaagcccatcagactgaacggcaccaaggacagcatgttcggcatcgccgtgaagaacatcggcgacatcaaccaggacggctaccccgacatcgccgtgggcgccccctacgacgacctgggcaaggtgttcatctaccacggcagcgccaacggcatcaacaccaagcccacccaggtgctgaagggcatcagcccctacttcggctacagcatcgccggcaacatggacctggacagaaacagctaccccgacgtggccgtgggcagcctgagcgacagcgtgaccatcttcagaagcagacccgtgatcaacatccagaagaccatcaccgtgacccccaacagaatcgacctgagacagaagaccgcctgcggcgcccccagcggcatctgcctgcaggtgaagagctgcttcgagtacaccgccaaccccgccggctacaaccccagcatcagcatcgtgggcaccctggaggccgagaaggagagaagaaagagcggcctgagcagcagagtgcagttcagaaaccagggcagcgagcccaagtacacccaggagctgaccctgaagagacagaagcagaaggtgtgcatggaggagaccctgtggctgcaggacaacatcagagacaagctgagacccatccccatcaccgccagcgtggagatccaggagcccagcagcagaagaagagtgaacagcctgcccgaggtgctgcccatcctgaacagcgacgagcccaagaccgcccacatcgacgtgcacttcctgaaggagggctgcggcgacgacaacgtgtgcaacagcaacctgaagctggagtacaagttctgcaccagagagggcaaccaggacaagttcagctacctgcccatccagaagggcgtgcccgagctggtgctgaaggaccagaaggacatcgccctggagatcaccgtgaccaacagccccagcaaccccagaaaccccaccaaggacggcgacgacgcccacgaggccaagctgatcgccaccttccccgacaccctgacctacagcgcctacagagagctgagagccttccccgagaagcagctgagctgcgtggccaaccagaacggcagccaggccgactgcgagctgggcaaccccttcaagagaaacagcaacgtgaccttctacctggtgctgagcaccaccgaggtgaccttcgacacccccgacctggacatcaacctgaagctggagaccaccagcaaccaggacaacctggcccccatcaccgccaaggccaaggtggtgatcgagctgctgctgagcgtgagcggcgtggccaagcccagccaggtgtacttcggcggcaccgtggtgggcgagcaggccatgaagagcgaggacgaggtgggcagcctgatcgagtacgagttcagagtgatcaacctgggcaagcccctgaccaacctgggcaccgccaccctgaacatccagtggcccaaggagatcagcaacggcaagtggctgctgtacctggtgaaggtggagagcaagggcctggagaaggtgacctgcgagccccagaaggagatcaacagcctgaacctgaccgagagccacaacagcagaaagaagagagagatcaccgagaagcagatcgacgacaacagaaagttcagcctgttcgccgagagaaagtaccagaccctgaactgcagcgtgaacgtgaactgcgtgaacatcagatgccccctgagaggcctggacagcaaggccagcctgatcctgagaagcagactgtggaacagcaccttcctggaggagtacagcaagctgaactacctggacatcctgatgagagccttcatcgacgtgaccgccgccgccgagaacatcagactgcccaacgccggcacccaggtgagagtgaccgtgttccccagcaagaccgtggcccagtacagcggcgtgccctggtggatcatcctggtggccatcctggccggcatcctgatgctggccctgctggtgttcatcctgtggaagtgcggcttcttcaagagaaacaagaaggaccactacgacgccacctaccacaaggccgagatccacgcccagcccagcgacaaggagagactgaccagcgacgcctag

SEQ ID NO: 4470 - DNA, 3207 bp, Artificial Sequence
  derived and/or modified sequence
atggccgccgccggccagctgtgcctgctgtacctgagcgccggcctgctgagcagactgggcgccgccttcaacctggacaccagagaggacaacgtgatcagaaagtacggcgaccccggcagcctgttcggcttcagcctggccatgcactggcagctgcagcccgaggacaagagactgctgctggtgggcgcccccagagccgaggccctgcccctgcagagagccaacagaaccggcggcctgtacagctgcgacatcaccgccagaggcccctgcaccagaatcgagttcgacaacgacgccgaccccaccagcgagagcaaggaggaccagtggatgggcgtgaccgtgcagagccagggccccggcggcaaggtggtgacctgcgcccacagatacgagaagagacagcacgtgaacaccaagcaggagagcagagacatcttcggcagatgctacgtgctgagccagaacctgagaatcgaggacgacatggacggcggcgactggagcttctgcgacggcagactgagaggccacgagaagttcggcagctgccagcagggcgtggccgccaccttcaccaaggacttccactacatcgtgttcggcgcccccggcacctacaactggaagggcctgctgttcctgaccagcgtgagctacaccgaccccgaccagttcgtgtacaagaccagaccccccagagagcagcccgacaccttccccgacgtgatgatgaacagctacctgggcttcagcctggacagcggcaagggcatcgtgagcaaggacgagatcaccttcgtgagcggcgcccccagagccaaccacagcggcgccgtggtgctgctgaagagagacatgaagagcgcccacctgctgcccgagcacatcttcgacggcgagggcctggccagcagcttcggctacgacgtggccgtggtggacctgaacaaggacggctggcaggacatcgtgatcggcgccccccagtacttcgacagagacggcgaggtgggcggcgccgtgtacgtgtacatgaaccagcagggcagatggaacaacgtgaagcccatcagactgaacggcaccaaggacagcatgttcggcatcgccgtgaagaacatcggcgacatcaaccaggacggctaccccgacatcgccgtgggcgccccctacgacgacctgggcaaggtgttcatctaccacggcagcgccaacggcatcaacaccaagcccacccaggtgctgaagggcatcagcccctacttcggctacagcatcgccggcaacatggacctggacagaaacagctaccccgacgtggccgtgggcagcctgagcgacagcgtgaccatcttcagaagcagacccgtgatcaacatccagaagaccatcaccgtgacccccaacagaatcgacctgagacagaagaccgcctgcggcgcccccagcggcatctgcctgcaggtgaagagctgcttcgagtacaccgccaaccccgccggctacaaccccagcatcagcatcgtgggcaccctggaggccgagaaggagagaagaaagagcggcctgagcagcagagtgcagttcagaaaccagggcagcgagcccaagtacacccaggagctgaccctgaagagacagaagcagaaggtgtgcatggaggagaccctgtggctgcaggacaacatcagagacaagctgagacccatccccatcaccgccagcgtggagatccaggagcccagcagcagaagaagagtgaacagcctgcccgaggtgctgcccatcctgaacagcgacgagcccaagaccgcccacatcgacgtgcacttcctgaaggagggctgcggcgacgacaacgtgtgcaacagcaacctgaagctggagtacaagttctgcaccagagagggcaaccaggacaagttcagctacctgcccatccagaagggcgtgcccgagctggtgctgaaggaccagaaggacatcgccctggagatcaccgtgaccaacagccccagcaaccccagaaaccccaccaaggacggcgacgacgcccacgaggccaagctgatcgccaccttccccgacaccctgacctacagcgcctacagagagctgagagccttccccgagaagcagctgagctgcgtggccaaccagaacggcagccaggccgactgcgagctgggcaaccccttcaagagaaacagcaacgtgaccttctacctggtgctgagcaccaccgaggtgaccttcgacacccccgacctggacatcaacctgaagctggagaccaccagcaaccaggacaacctggcccccatcaccgccaaggccaaggtggtgatcgagctgctgctgagcgtgagcggcgtggccaagcccagccaggtgtacttcggcggcaccgtggtgggcgagcaggccatgaagagcgaggacgaggtgggcagcctgatcgagtacgagttcagagtgatcaacctgggcaagcccctgaccaacctgggcaccgccaccctgaacatccagtggcccaaggagatcagcaacggcaagtggctgctgtacctggtgaaggtggagagcaagggcctggagaaggtgacctgcgagccccagaaggagatcaacagcctgaacctgaccgagagccacaacagcagaaagaagagagagatcaccgagaagcagatcgacgacaacagaaagttcagcctgttcgccgagagaaagtaccagaccctgaactgcagcgtgaacgtgaactgcgtgaacatcagatgccccctgagaggcctggacagcaaggccagcctgatcctgagaagcagactgtggaacagcaccttcctggaggagtacagcaagctgaactacctggacatcctgatgagagccttcatcgacgtgaccgccgccgccgagaacatcagactgcccaacgccggcacccaggtgagagtgaccgtgttccccagcaagaccgtggcccagtacagcggcgtgccctggtggatcatcctggtggccatcctggccggcatcctgatgctggccctgctggtgttcatcctgtggaagtgcggcttcttcaagagaaacaagaaggaccactacgacgccacctaccacaaggccgagatccacgcccagcccagcgacaaggagagactgaccagcgacgcctag

SEQ ID NO: 4471 - DNA, 3339 bp, Artificial Sequence
  derived and/or modified sequence
atggccgccgccggccagctgtgcctgctgtacctgagcgccggcctgctgagcagactgggcgccgccttcaacctggacaccagagaggacaacgtgatcagaaagtacggcgaccccggcagcctgttcggcttcagcctggccatgcactggcagctgcagcccgaggacaagagactgctgctggtgggcgcccccagagccgaggccctgcccctgcagagagccaacagaaccggcggcctgtacagctgcgacatcaccgccagaggcccctgcaccagaatcgagttcgacaacgacgccgaccccaccagcgagagcaaggaggaccagtggatgggcgtgaccgtgcagagccagggccccggcggcaaggtggtgacctgcgcccacagatacgagaagagacagcacgtgaacaccaagcaggagagcagagacatcttcggcagatgctacgtgctgagccagaacctgagaatcgaggacgacatggacggcggcgactggagcttctgcgacggcagactgagaggccacgagaagttcggcagctgccagcagggcgtggccgccaccttcaccaaggacttccactacatcgtgttcggcgcccccggcacctacaactggaagggcatcgtgagagtggagcagaagaacaacaccttcttcgacatgaacatcttcgaggacggcccctacgaggtgggcggcgagaccgagcacgacgagagcctggtgcccgtgcccgccaacagctacctgggcctgctgttcctgaccagcgtgagctacaccgaccccgaccagttcgtgtacaagaccagaccccccagagagcagcccgacaccttccccgacgtgatgatgaacagctacctgggcttcagcctggacagcggcaagggcatcgtgagcaaggacgagatcaccttcgtgagcggcgcccccagagccaaccacagcggcgccgtggtgctgctgaagagagacatgaagagcgcccacctgctgcccgagcacatcttcgacggcgagggcctggccagcagcttcggctacgacgtggccgtggtggacctgaacaaggacggctggcaggacatcgtgatcggcgccccccagtacttcgacagagacggcgaggtgggcggcgccgtgtacgtgtacatgaaccagcagggcagatggaacaacgtgaagcccatcagactgaacggcaccaaggacagcatgttcggcatcgccgtgaagaacatcggcgacatcaaccaggacggctaccccgacatcgccgtgggcgccccctacgacgacctgggcaaggtgttcatctaccacggcagcgccaacggcatcaacaccaagcccacccaggtgctgaagggcatcagcccctacttcggctacagcatcgccggcaacatggacctggacagaaacagctaccccgacgtggccgtgggcagcctgagcgacagcgtgaccatcttcagaagcagacccgtgatcaacatccagaagaccatcaccgtgacccccaacagaatcgacctgagacagaagaccgcctgcggcgcccccagcggcatctgcctgcaggtgaagagctgcttcgagtacaccgccaaccccgccggctacaaccccagcatcagcatcgtgggcaccctggaggccgagaaggagagaagaaagagcggcctgagcagcagagtgcagttcagaaaccagggcagcgagcccaagtacacccaggagctgaccctgaagagacagaagcagaaggtgtgcatggaggagaccctgtggctgcaggacaacatcagagacaagctgagacccatccccatcaccgccagcgtggagatccaggagcccagcagcagaagaagagtgaacagcctgcccgaggtgctgcccatcctgaacagcgacgagcccaagaccgcccacatcgacgtgcacttcctgaaggagggctgcggcgacgacaacgtgtgcaacagcaacctgaagctggagtacaagttctgcaccagagagggcaaccaggacaagttcagctacctgcccatccagaagggcgtgcccgagctggtgctgaaggaccagaaggacatcgccctggagatcaccgtgaccaacagccccagcaaccccagaaaccccaccaaggacggcgacgacgcccacgaggccaagctgatcgccaccttccccgacaccctgacctacagcgcctacagagagctgagagccttccccgagaagcagctgagctgcgtggccaaccagaacggcagccaggccgactgcgagctgggcaaccccttcaagagaaacagcaacgtgaccttctacctggtgctgagcaccaccgaggtgaccttcgacacccccgacctggacatcaacctgaagctggagaccaccagcaaccaggacaacctggcccccatcaccgccaaggccaaggtggtgatcgagctgctgctgagcgtgagcggcgtggccaagcccagccaggtgtacttcggcggcaccgtggtgggcgagcaggccatgaagagcgaggacgaggtgggcagcctgatcgagtacgagttcagagtgatcaacctgggcaagcccctgaccaacctgggcaccgccaccctgaacatccagtggcccaaggagatcagcaacggcaagtggctgctgtacctggtgaaggtggagagcaagggcctggagaaggtgacctgcgagccccagaaggagatcaacagcctgaacctgaccgagagccacaacagcagaaagaagagagagatcaccgagaagcagatcgacgacaacagaaagttcagcctgttcgccgagagaaagtaccagaccctgaactgcagcgtgaacgtgaactgcgtgaacatcagatgccccctgagaggcctggacagcaaggccagcctgatcctgagaagcagactgtggaacagcaccttcctggaggagtacagcaagctgaactacctggacatcctgatgagagccttcatcgacgtgaccgccgccgccgagaacatcagactgcccaacgccggcacccaggtgagagtgaccgtgttccccagcaagaccgtggcccagtacagcggcgtgccctggtggatcatcctggtggccatcctggccggcatcctgatgctggccctgctggtgttcatcctgtggaagtgcggcttcttcaagagaaacaagaaggaccactacgacgccacctaccacaaggccgagatccacgcccagcccagcgacaaggagagactgaccagcgacgcctag

SEQ ID NO: 4472 - DNA, 3222 bp, Artificial Sequence
  derived and/or modified sequence
atggcagctgctggtcagctgtgcctgctgtatctgagcgcaggcctgctttcccgcctgggggccgcgtttaatctggacactcgggaagacaatgtaattcggaagtatggcgatcccgggtccctgttcggcttctccttggcaatgcactggcaactccagccagaggacaaacgacttctactggtgggcgcaccgagggcagaggctctaccgcttcaacgggctaaccgaacaggcggactatattcctgcgacatcacagctcggggaccctgtacccggattgaatttgacaatgacgcagatcccacgagcgagtccaaggaagaccagtggatgggggtgacagttcagtcacaggggcccggtggtaaagtggtgacttgcgcacaccgctatgaaaaacggcagcatgtgaataccaaacaagagagccgcgacatttttggtcgatgctacgtgttaagccagaatctgcggatcgaggatgacatggacggaggggactggagtttttgcgacggccgcttacggggccatgagaagtttggatcctgtcagcaaggcgtggcagcaacttttacaaaggacttccattacattgtctttggagcacctggcacctataactggaagggaattgtccgggtagaacagaaaaacaacaccttcttcgacatgaatatctttgaggacggcccctacgaggtgggtggggaaaccgagcacgacgagtccctggtcccagtgcctgccaattcatacctcggatttagtctcgacagtggtaagggtatcgtttctaaggacgaaattacttttgttagcggagccccccgggcgaaccacagcggggctgtggtgttgctgaagcgcgacatgaaatccgcccacctgttacctgagcacatttttgatggcgaaggactcgcttctagctttggttatgacgttgcagtggtggacttgaacaaggatggatggcaagatatagtgataggcgcgccgcagtactttgatcgggatggagaggtgggcggcgcggtgtacgtctacatgaaccaacagggcaggtggaataacgtcaagcccatccgactgaatgggaccaaagactccatgtttggaatagcagttaagaacattggagacattaaccaggatggataccccgacatagctgtgggcgcaccctacgatgacctggggaaagtgttcatttaccatggcagcgcgaacggcattaataccaaaccgacccaggttctgaagggtatctctccctactttggttattctattgccggcaacatggacctggaccgaaactcttacccagacgtggccgtcgggtcattgtcggattctgtaactattttccgcagtcggccagtgataaatattcagaaaacaattactgtaaccccgaacaggatagacctgcggcagaaaacagcctgcggagctccctcaggcatatgtctgcaggtgaagtcatgttttgagtacacagcgaatccggccggatataacccatccatatccattgttggaacacttgaggctgagaaagagagaaggaagtcaggactttcttccagggtccagtttaggaaccaggggtccgagccaaaatatacacaggagcttacgctgaaacggcagaagcagaaggtgtgtatggaagagaccctctggttgcaagataacatccgggataagctccgccccattccaattactgcaagcgtcgagatccaggaaccctcttcaagaaggagggtgaactccctccctgaagtgctcccaatcctgaactccgatgagccaaaaacagcacatatcgacgtgcacttcctcaaggagggttgtggcgacgataatgtttgtaactccaatctaaaactggagtataaattctgcacccgggaaggtaaccaggacaaattctcttatctcccgattcagaagggagtacctgagctcgttctaaaggatcagaaggacattgccctggagatcactgtcactaatagcccatccaaccctcgcaaccccactaaggacggcgacgacgctcacgaagcaaaactaatcgcaacattccccgacacactgacgtactctgcctatagggaactcagggcctttccagagaagcaacttagctgtgtggcaaaccagaacggtagccaggcagactgcgagctagggaatccatttaagcggaattccaatgtgaccttctatctcgtcttgtcgaccactgaggtgacctttgatactcctgacctcgacataaatttaaaactcgagactacaagtaaccaggataacctagctcccataactgcaaaggccaaagtcgtcatcgagcttttactgagtgtctctggcgtcgcaaaaccgagtcaggtttacttcggtggaaccgtcgtaggcgagcaggccatgaaatcagaggacgaggttggctccctgatagaatacgagttcagggtgattaacctgggaaagcctctgactaacctgggcactgctacccttaatatccaatggccaaaggagatcagtaatggaaaatggctgctgtaccttgtgaaagtggagtctaaaggactggagaaagtgacctgcgaaccccagaaggaaatcaatagcctcaacttgactgaatcccataactccagaaaaaaacgagagatcacagagaagcagattgatgacaacaggaagttctccctttttgccgagaggaaataccaaacgcttaactgcagcgttaatgtaaactgtgtaaacattcggtgccccttgaggggcctggacagtaaagcttccttaatccttcgatccaggctgtggaactcaaccttcctcgaagagtacagcaagctgaactatctggacatcctcatgcgggcctttatcgacgtcacagccgcagccgagaatatcaggttacctaatgcaggtacccaggtaagggtgaccgtgtttcctagcaagaccgtagctcaatattctggggtcccctggtggatcatactggttgccatcctcgcaggaatcctgatgctggcactgctcgtgttcattctctggaaatgtgggttctttaaaaggaataagaaagatcactacgatgccacataccacaaagctgagattcacgcccagccgagtgataaagagcgcttgacatcagacgcctag

SEQ ID NO: 4473 - DNA, 3207 bp, Artificial Sequence
  derived and/or modified sequence
atggccgcagcaggacagctgtgtctgctctacctgagtgcagggctgctctccaggttaggtgcagcattcaacctcgatacaagagaagataatgtgatccgaaagtacggcgatcccggtagcctatttggcttctcgcttgcaatgcactggcagctgcaacccgaagataagcggctgctgttggtaggtgctccccgggccgaggctttacctttgcagcgcgccaaccgcactggaggcctgtactcttgtgatataacagctcgtggtccctgcactcgcatcgaattcgacaatgacgcagaccctacaagtgaaagtaaggaagatcagtggatgggcgtgacagtgcagtcccagggtcccggcgggaaggtggtgacctgcgcccaccgttacgagaagcgccagcatgtgaatacaaaacaggagagtagagatatttttggacgttgttacgtgttatcacaaaatttgcggatcgaagatgatatggacggaggggattggtccttctgcgatgggcggctccgcggccacgaaaaattcgggagttgccaacagggggtggctgcaacctttacgaaggatttccactacattgttttcggggcccccggaacctataattggaaaggactgctgtttttgacctccgtgtcctacacggatcccgatcagtttgtctacaaaactaggccccctagagagcagcctgacaccttccctgacgtgatgatgaacagttatcttggcttctctctggattccggaaagggcatagtgtcaaaagacgaaattaccttcgttagtggcgctccacgtgctaatcactcaggagctgtggtcttactgaagagagacatgaaatccgcccatttgctgcccgagcatatcttcgatggagaaggactcgcttcttcttttgggtacgatgtggctgtggtcgacttgaataaagacgggtggcaggacatcgttataggggctccacaatacttcgacagggatggggaggtgggaggcgccgtgtatgtctacatgaatcaacagggtaggtggaataacgttaagccgataagattgaatgggacaaaggattctatgttcggcatcgcggttaagaacataggggacatcaatcaggacgggtatcctgacatagcagtgggcgcgccctacgatgacctgggaaaagtattcatctaccatgggtccgcaaatgggattaacacaaaacctacccaagttctgaagggtataagcccttatttcggctactcaattgccggcaacatggatcttgacagaaactcataccccgacgtcgccgtggggagcttgagcgactcagtcaccatcttcaggagtagaccagtcatcaacatacaaaaaactattacagtaactcctaaccgcattgatctgagacagaagaccgcctgtggagccccatccggaatctgcctccaggtgaagtcttgttttgagtataccgccaacccagccggctacaacccgtccatttcaattgtgggcactttggaagccgagaaagagaggagaaagagcggcctgagttctagggtgcagtttcggaatcaaggatccgaaccgaagtacacccaggagctgactctgaaaagacaaaagcaaaaagtttgcatggaagaaacactgtggttgcaggataacatccgcgataagctgagacctatccctatcactgccagtgtcgaaatccaggagccatcttccaggagacgtgtgaactcgctccccgaggtgctcccgatccttaactctgacgagcccaagactgctcacatagacgtgcatttcctcaaggagggatgcggtgatgacaatgtgtgcaactccaacctaaaactggaatataaattctgtaccagagagggcaaccaagacaaattcagctatttgcctatacaaaagggagttcctgagctcgtcctgaaggatcagaaagacatcgctctcgagattactgtgactaatagtccaagtaacccccgcaatcccaccaaagatggcgacgacgctcacgaagctaaacttattgccacctttccggataccttaacctactcagcctaccgggagctgcgggcctttccagagaagcaattgtcgtgtgtggctaaccagaacggcagccaagctgactgcgaattaggcaatccctttaagcgtaactctaacgttaccttctacctggttttgtccaccacagaggtaacattcgatacacctgacctcgatattaatttaaagctggagacaacttccaaccaagataatcttgccccaataaccgccaaggctaaggttgtgatcgagctgctgctaagcgttagcggggtggccaagccctctcaggtgtattttggaggaaccgtcgtgggagaacaggcaatgaaatcagaagatgaggtcggatcgttgatcgagtatgaattcagggtgattaaccttggtaaaccattgaccaatctgggtacagctacgcttaacatacagtggcccaaagagatatcaaatgggaaatggctgctgtatttagtgaaggtagagtctaagggtcttgaaaaggtcacttgcgaacctcaaaaagagattaatagtttaaatctgactgaaagccataactctaggaagaaaagggagattacagagaaacaaatcgacgataaccggaagttttcgctgttcgcagaacggaaataccagaccctgaattgttcagtgaacgtcaattgtgtaaatattcggtgcccactgaggggccttgactccaaggcctcacttattcttcgatcacgattgtggaactctactttcctggaagagtactccaaactgaattacctggatatcctcatgagggcattcatcgatgtgaccgcggcggctgagaatatccggctcccaaacgcaggcactcaagtacgtgttactgtttttccttccaagacagtcgcccagtattccggggtcccatggtggatcattctcgtggcaatcctcgctggaatcctcatgctggccctgctggtcttcatcctgtggaagtgtggcttctttaaaaggaacaagaaagaccactatgacgcaacgtaccacaaggccgagattcacgcccagccatccgataaggagcggttgacaagcgatgcatag

SEQ ID NO: 4474 - DNA, 3339 bp, Artificial Sequence
  derived and/or modified sequence
atggcggcagccgggcagctatgtctgctgtatctgtccgccggactgctcagccggctcggtgccgccttcaatctggacaccagagaggacaatgtgataagaaaatacggagaccccggatccctgttcggcttttcactcgcgatgcactggcagctgcaaccagaagacaagcgcctattactggtgggcgctccccgggcagaggcgcttcccctgcaacgagctaacagaacaggcggactttattcatgcgacatcacagctcgcggtccttgcacacggattgaattcgacaatgacgccgacccaacatcagagtctaaggaagaccagtggatgggggtcaccgtgcagagccagggtccaggcggcaaggtggttacctgcgcccaccgatatgagaagcgccaacatgtaaacaccaagcaggagtcccgtgacatcttcgggcgctgctatgtgctgagccaaaatctgcgcattgaggatgatatggacggcggagactggtcattctgcgacggaagactgcggggacatgagaagttcggctcctgtcagcaaggagtggctgccacctttacaaaggactttcactacattgtgttcggagctccagggacatacaattggaagggtatcgtccgagtggagcagaagaataacaccttcttcgatatgaacattttcgaggacggcccatatgaggtgggtggcgagacagagcatgacgaatcacttgtgccagtgccggccaattcgtaccttggactcctctttctgacatccgtgtcatatactgatccagatcaatttgtgtacaaaacacgtccccccagggaacaaccagacaccttccctgacgtcatgatgaatagttacctgggcttctcactggatagcggcaagggcatagtgtcaaaggacgaaatcaccttcgtttccggcgcgccacgtgccaatcattctggcgccgtcgtgttgctcaaacgggacatgaaatcggctcaccttctgcccgagcacatcttcgacggcgagggactggcctcctcgtttggatatgatgtggccgtggtagacctgaacaaggatggatggcaggatattgttattggcgcgccgcagtactttgatcgggacggagaagtcggaggagcagtgtacgtctatatgaaccagcaggggcggtggaacaacgtcaagcccattagactgaatgggacaaaggactcgatgttcggcatcgctgttaaaaatattggagatataaatcaggatggctaccccgacatcgctgtgggagctccatacgatgatttaggcaaggtgttcatctaccacggtagcgcaaacggcatcaataccaagccaactcaggttctcaaaggaatttccccttacttcggttactcaatcgcgggaaacatggaccttgacagaaactcttatcctgatgtggccgtcggcagtctcagcgactctgtgacaatttttaggagcaggcctgtaattaatatccaaaagaccatcacagttactcccaatcgcattgatctcagacagaaaactgcctgcggcgccccctctggaatctgcctacaggtgaagtcttgcttcgagtatacggcaaaccccgccggatacaatccaagcatttccattgttgggaccctggaggctgaaaaggagaggaggaagagtggcctgtcttctagggtccagttccggaaccagggatcagaaccaaagtacacccaggagctgactctgaaaagacagaagcaaaaggtgtgcatggaagaaactctttggttacaggacaacatcagagataagctccgtcctatccctattacagcgtccgtggaaatacaagaaccctcctctcggagaagggtgaattctctccccgaggttcttcctattctgaactcagatgaaccaaagacagcccacattgacgtgcactttctgaaagaaggctgtggcgacgataacgtctgcaactccaacctgaagctcgaatataaattctgtacaagagagggaaaccaggacaaatttagttatctgccaatacagaagggagtccctgagctcgtgctaaaagatcagaaggacattgcactggaaataacagttacaaattcgccttccaacccaagaaacccaactaaggacggcgacgatgctcacgaggccaaactgattgctacgtttcccgatactctgacctattctgcttacagggagctaagggcattcccagaaaaacaattgagttgcgtggctaatcagaacggcagccaagccgactgcgagctgggcaaccctttcaagcggaactctaatgtcaccttctacctggttctgagtaccactgaggtgacatttgatacccccgacttggacattaatttgaagttagaaacaacatcaaaccaagataatctggcacccataaccgccaaggcgaaggtcgtgatcgaactcctgctgtctgtatccggggtggcaaagccttctcaagtttatttcggagggaccgtcgttggtgaacaggccatgaagagcgaggacgaagtcggaagtctgatcgagtatgagtttagggtgataaatttggggaagccactgacaaacctgggtactgccactctgaatatccagtggccaaaggagattagtaatgggaaatggttgctctaccttgttaaggtagagtctaagggactcgagaaagttacatgtgagccgcagaaggagataaacagtcttaatctcaccgaatcccacaattcccggaaaaagagggagatcacagagaaacagatcgacgataacagaaagttctcactgttcgcagaacgcaagtaccagacactaaattgcagtgttaacgtgaattgcgtgaatatacgctgtccacttcgcggcctggatagcaaggcctctctgattctgagaagccgcctgtggaacagtaccttcctggaggagtactccaagcttaactacctggacatattaatgagagcatttattgacgtgactgctgctgcagaaaatatcaggttacctaacgccggcactcaggttcgcgtcacagtgttccccagcaagaccgtcgctcagtatagtggcgtgccatggtggatcattctggtggctatcctagcaggaatcttgatgctcgctcttctggtgttcatcctttggaaatgcggtttcttcaaaaggaacaaaaaagatcattacgacgccacttaccataaagcagaaattcacgcccagccaagtgacaaggaacgactcacttccgacgcctag

SEQ ID NO: 4475 - DNA, 3222 bp, Artificial Sequence
  derived and/or modified sequence
atggctgctgctggccagctgtgcctgctgtacctgtctgctggcctgctgagccggctgggcgccgccttcaacctggacacccgggaggacaacgtcatcagaaaatatggagaccccggcagcctgtttggcttcagcctggccatgcactggcagctgcagcctgaggacaagaggctgctgctggtgggcgcccccagggctgaggccctgcccctgcagagggccaacagaactggaggcctgtacagctgtgacatcacagcccggggcccctgcaccagaattgaatttgacaatgatgctgaccccaccagcgagagcaaagaagaccagtggatgggcgtgacagtgcagagccagggccctgggggcaaggtggtgacctgtgcccacagatatgagaagaggcagcacgtgaacaccaagcaggagagccgggacatcttcggccgctgctacgtgctgagccagaacctgagaattgaagatgacatggatggaggagactggagcttctgtgatggccgcctgcggggccacgagaagtttggcagctgccagcagggcgtggccgccaccttcaccaaggacttccactacatcgtgtttggagcccctggcacctacaactggaagggcatcgtgcgggtggagcagaagaacaacaccttctttgacatgaacatctttgaagatggcccctatgaggtgggcggggagacagaacatgatgagagcctggtgcctgtgcctgccaacagctacctgggcttcagcctggacagcggcaagggcatcgtgtccaaggatgagatcacctttgtgtctggggccccccgggccaaccacagcggggctgtggtgctgctgaagagggacatgaagagcgcccacctgctgcctgagcacatctttgatggagagggcctggccagcagctttggctatgatgtggccgtggtggacctgaacaaggatggctggcaggacatcgtgattggagccccccagtactttgacagagatggagaggtgggcggcgctgtgtatgtgtacatgaaccagcagggccgctggaacaacgtgaagcccatccggctgaatggcaccaaggacagcatgtttggaattgctgtgaagaacatcggggacatcaaccaggacggctacccagacattgctgtgggcgccccctatgatgacctgggcaaggtgttcatctaccacggcagcgccaacggcatcaacaccaagcccacccaggtgctgaagggcatcagcccctacttcggctacagcattgctggcaacatggacctggacaggaacagctacccagatgtggccgtgggcagcctgagtgacagcgtgaccatcttccgcagcaggcctgtgatcaacatccagaagaccatcaccgtgacccccaacagaattgacctgcggcagaagacagcctgtggggcccccagcggcatctgcctgcaggtgaagagctgctttgagtacacagccaacccagctggctacaaccccagcatcagcatcgtgggcaccctggaggccgagaaggagaggaggaagagcggcctgagcagccgggtgcagttcaggaaccagggcagcgagcccaagtacacccaggagctgaccctgaagaggcagaagcagaaggtgtgcatggaggagaccctgtggctgcaggacaacatccgggacaagctgcggcccatccccatcacagcctctgtggagatccaggagcccagcagcagaagaagagtgaacagcctgcctgaggtgctgcccatcctgaacagtgatgagcccaagacagcccacattgatgtgcacttcctgaaggagggctgtggagatgacaacgtgtgcaacagcaacctgaagctggagtacaagttctgcacccgggagggcaaccaggacaagttctcctacctgcccatccagaagggcgtgcctgagctggtgctgaaggaccagaaggacatcgccctggagatcaccgtgaccaacagccccagcaaccccaggaaccccaccaaggatggagatgatgcccacgaggccaagctgattgccaccttcccagacaccctgacctacagcgcctaccgggagctgcgggccttccctgagaagcagctgagctgtgtggccaaccagaatggcagccaggccgactgtgagctgggcaaccccttcaagaggaacagcaatgtgaccttctacctggtgctgagcaccacagaggtgacctttgacaccccagacctggacatcaacctgaagctggagaccaccagcaaccaggacaacctggcccccatcacagccaaggccaaggtggtgattgagctgctgctgtctgtgtctggagtggccaagcccagccaggtgtactttggaggcaccgtggtgggggagcaggccatgaagtcagaagatgaggtgggcagcctcatcgagtatgagttccgggtcatcaacctgggcaagcccctgaccaacctgggcacagccaccctgaacatccagtggcccaaggagatcagcaatggcaagtggctgctgtacctggtgaaggtggagagcaagggcctggagaaggtgacctgtgagccccagaaggagatcaacagcctgaacctgacagagagccacaacagcaggaagaagcgggagatcacagagaagcagattgatgacaacaggaagttcagcctgtttgctgagaggaagtaccagaccctgaactgcagcgtgaatgtgaactgtgtgaacatccgctgccccctgcggggcctggacagcaaggccagcctcatcctgcggagccggctgtggaacagcaccttcctggaggagtacagcaagctgaactacctggacatcctgatgagggccttcattgatgtgacagctgctgctgagaacatccggctgcccaatgccggcacccaggtgcgggtgaccgtcttccccagcaagacagtggcccagtacagcggcgtgccctggtggatcatcctggtggccatcctggccggcatcctgatgctggccctgctggtgttcatcctgtggaagtgtggcttcttcaagaggaacaagaaggaccactatgatgccacctaccacaaggccgagatccacgcccagcccagcgacaaggagcggctgaccagtgatgcctag

SEQ ID NO: 4476 - DNA, 3207 bp, Artificial Sequence
  derived and/or modified sequence
atggctgctgctggccagctgtgcctgctgtacctgtctgctggcctgctgagccggctgggcgccgccttcaacctggacacccgggaggacaacgtcatcagaaaatatggagaccccggcagcctgtttggcttcagcctggccatgcactggcagctgcagcctgaggacaagaggctgctgctggtgggcgcccccagggctgaggccctgcccctgcagagggccaacagaactggaggcctgtacagctgtgacatcacagcccggggcccctgcaccagaattgaatttgacaatgatgctgaccccaccagcgagagcaaagaagaccagtggatgggcgtgacagtgcagagccagggccctgggggcaaggtggtgacctgtgcccacagatatgagaagaggcagcacgtgaacaccaagcaggagagccgggacatcttcggccgctgctacgtgctgagccagaacctgagaattgaagatgacatggatggaggagactggagcttctgtgatggccgcctgcggggccacgagaagtttggcagctgccagcagggcgtggccgccaccttcaccaaggacttccactacatcgtgtttggagcccctggcacctacaactggaagggcctgctcttcctgacctctgtgtcctacacagatcctgaccagtttgtgtacaagacccggcccccccgggagcagcctgacaccttcccagatgtgatgatgaacagctacctgggcttcagcctggacagcgggaaaggaattgtgtccaaggatgagatcacctttgtgtctggggccccccgggccaaccacagcggggctgtggtgctgctgaagagggacatgaagagcgcccacctgctgcctgagcacatctttgatggagagggcctggccagcagctttggctatgatgtggccgtggtggacctgaacaaggatggctggcaggacatcgtcatcggggccccccagtactttgacagagatggagaggtgggcggcgctgtgtatgtgtacatgaaccagcagggccgctggaacaacgtgaagcccatccggctgaatggcaccaaggacagcatgtttggaattgctgtgaagaacattggagacatcaaccaggacggctacccagacattgctgtgggcgccccctatgatgacctgggcaaggtgttcatctaccacggcagcgccaacggcatcaacaccaagcccacccaggtgctgaagggcatcagcccctacttcggctacagcattgctggcaacatggacctggacagaaattcctacccagatgtggccgtgggcagcctgagtgacagcgtgaccatcttccgcagcaggcctgtgatcaacatccagaagaccatcaccgtgacccccaacagaattgacctgcggcagaagacagcctgtggggcccccagcggcatctgcctgcaggtgaagagctgctttgagtacacagccaacccagctggctacaaccccagcatcagcatcgtgggcaccctggaggccgagaaggagaggaggaagagcggcctgagcagccgggtgcagttcaggaaccagggcagcgagcccaagtacacccaggagctgaccctgaagaggcagaagcagaaggtgtgcatggaggagaccctgtggctgcaggacaacatccgggacaagctgcggcccatccccatcacagcctctgtggagatccaggagcccagcagcagaagaagagtgaacagcctgcctgaggtgctgcccatcctgaacagtgatgagcccaagacagcccacattgatgtgcacttcctgaaggagggctgtggagatgacaacgtgtgcaacagcaacctgaagctggagtacaagttctgcacccgggagggcaaccaggacaagttctcctacctgcccatccagaagggcgtgcctgagctggtgctgaaggaccagaaggacatcgccctggagatcaccgtgaccaacagccccagcaaccccaggaaccccaccaaggatggagatgatgcccacgaggccaagctgattgccaccttcccagacaccctgacctacagcgcctaccgggagctgcgggccttccctgagaagcagctgagctgtgtggccaaccagaatggcagccaggccgactgtgagctgggcaaccccttcaagaggaacagcaatgtgaccttctacctggtgctgagcaccacagaggtgacctttgacaccccagacctggacatcaacctgaagctggagaccaccagcaaccaggacaacctggcccccatcacagccaaggccaaggtggtgattgagctgctgctgtctgtgtctggagtggccaagcccagccaggtgtactttggaggcaccgtggtgggggagcaggccatgaagtcagaagatgaggtgggcagcctgattgaatatgagttccgggtcatcaacctgggcaagcccctgaccaacctgggcacagccaccctgaacatccagtggcccaaggagatcagcaatggcaagtggctgctgtacctggtgaaggtggagagcaagggcctggagaaggtgacctgtgagccccagaaggagatcaacagcctgaacctgacagagagccacaacagcaggaagaagcgggagatcacagagaagcagattgatgacaacaggaagttcagcctgtttgctgagaggaagtaccagaccctgaactgcagcgtgaatgtgaactgtgtgaacatccgctgccccctgcggggcctggacagcaaggccagcctcatcctgcggagccggctgtggaacagcaccttcctggaggagtacagcaagctgaactacctggacatcctgatgagggccttcattgatgtgacagctgctgctgagaacatccggctgcccaatgccggcacccaggtgcgggtgacagtgttccccagcaagacagtggcccagtacagcggcgtgccctggtggatcatcctggtggccatcctggccggcatcctgatgctggccctgctggtgttcatcctgtggaagtgtggcttcttcaagaggaacaagaaggaccactatgatgccacctaccacaaggccgagatccacgcccagcccagcgacaaggagcggctgaccagtgatgcctag

SEQ ID NO: 4477 - DNA, 3339 bp, Artificial Sequence
  derived and/or modified sequence
atggctgctgctggccagctgtgcctgctgtacctgtctgctggcctgctgagccggctgggcgccgccttcaacctggacacccgggaggacaacgtcatcagaaaatatggagaccccggcagcctgtttggcttcagcctggccatgcactggcagctgcagcctgaggacaagaggctgctgctggtgggcgcccccagggctgaggccctgcccctgcagagggccaacagaactggaggcctgtacagctgtgacatcacagcccggggcccctgcaccagaattgaatttgacaatgatgctgaccccaccagcgagagcaaagaagaccagtggatgggcgtgacagtgcagagccagggccctgggggcaaggtggtgacctgtgcccacagatatgagaagaggcagcacgtgaacaccaagcaggagagccgggacatcttcggccgctgctacgtgctgagccagaacctgagaattgaagatgacatggatggaggagactggagcttctgtgatggccgcctgcggggccacgagaagtttggcagctgccagcagggcgtggccgccaccttcaccaaggacttccactacatcgtgtttggagcccctggcacctacaactggaagggcatcgtgcgggtggagcagaagaacaacaccttctttgacatgaacatctttgaagatggcccctatgaggtgggcggggagacagaacatgatgagagcctggtgcctgtgcctgccaacagctacctgggcctgctcttcctgacctctgtgtcctacacagatcctgaccagtttgtgtacaagacccggcccccccgggagcagcctgacaccttcccagatgtgatgatgaacagctacctgggcttcagcctggacagcgggaaaggaattgtgtccaaggatgagatcacctttgtgtctggggccccccgggccaaccacagcggggctgtggtgctgctgaagagggacatgaagagcgcccacctgctgcctgagcacatctttgatggagagggcctggccagcagctttggctatgatgtggccgtggtggacctgaacaaggatggctggcaggacatcgtcatcggggccccccagtactttgacagagatggagaggtgggcggcgctgtgtatgtgtacatgaaccagcagggccgctggaacaacgtgaagcccatccggctgaatggcaccaaggacagcatgtttggaattgctgtgaagaacattggagacatcaaccaggacggctacccagacattgctgtgggcgccccctatgatgacctgggcaaggtgttcatctaccacggcagcgccaacggcatcaacaccaagcccacccaggtgctgaagggcatcagcccctacttcggctacagcattgctggcaacatggacctggacagaaattcctacccagatgtggccgtgggcagcctgagtgacagcgtgaccatcttccgcagcaggcctgtgatcaacatccagaagaccatcaccgtgacccccaacagaattgacctgcggcagaagacagcctgtggggcccccagcggcatctgcctgcaggtgaagagctgctttgagtacacagccaacccagctggctacaaccccagcatcagcatcgtgggcaccctggaggccgagaaggagaggaggaagagcggcctgagcagccgggtgcagttcaggaaccagggcagcgagcccaagtacacccaggagctgaccctgaagaggcagaagcagaaggtgtgcatggaggagaccctgtggctgcaggacaacatccgggacaagctgcggcccatccccatcacagcctctgtggagatccaggagcccagcagcagaagaagagtgaacagcctgcctgaggtgctgcccatcctgaacagtgatgagcccaagacagcccacattgatgtgcacttcctgaaggagggctgtggagatgacaacgtgtgcaacagcaacctgaagctggagtacaagttctgcacccgggagggcaaccaggacaagttctcctacctgcccatccagaagggcgtgcctgagctggtgctgaaggaccagaaggacatcgccctggagatcaccgtgaccaacagccccagcaaccccaggaaccccaccaaggatggagatgatgcccacgaggccaagctgattgccaccttcccagacaccctgacctacagcgcctaccgggagctgcgggccttccctgagaagcagctgagctgtgtggccaaccagaatggcagccaggccgactgtgagctgggcaaccccttcaagaggaacagcaatgtgaccttctacctggtgctgagcaccacagaggtgacctttgacaccccagacctggacatcaacctgaagctggagaccaccagcaaccaggacaacctggcccccatcacagccaaggccaaggtggtgattgagctgctgctgtctgtgtctggagtggccaagcccagccaggtgtactttggaggcaccgtggtgggggagcaggccatgaagtcagaagatgaggtgggcagcctgattgaatatgagttccgggtcatcaacctgggcaagcccctgaccaacctgggcacagccaccctgaacatccagtggcccaaggagatcagcaatggcaagtggctgctgtacctggtgaaggtggagagcaagggcctggagaaggtgacctgtgagccccagaaggagatcaacagcctgaacctgacagagagccacaacagcaggaagaagcgggagatcacagagaagcagattgatgacaacaggaagttcagcctgtttgctgagaggaagtaccagaccctgaactgcagcgtgaatgtgaactgtgtgaacatccgctgccccctgcggggcctggacagcaaggccagcctcatcctgcggagccggctgtggaacagcaccttcctggaggagtacagcaagctgaactacctggacatcctgatgagggccttcattgatgtgacagctgctgctgagaacatccggctgcccaatgccggcacccaggtgcgggtgacagtgttccccagcaagacagtggcccagtacagcggcgtgccctggtggatcatcctggtggccatcctggccggcatcctgatgctggccctgctggtgttcatcctgtggaagtgtggcttcttcaagaggaacaagaaggaccactatgatgccacctaccacaaggccgagatccacgcccagcccagcgacaaggagcggctgaccagtgatgcctag

SEQ ID NO: 4478 - DNA, 5618 bp, Artificial Sequence
  derived and/or modified sequence
ttgataaaacgcctgcgagtctccagagaacaacgggctcattcagcggtcgcgagctgcccgcgagggggagcggccggacggagagcgcgacccgtcccgggggtggggccgggcgcagcggcgagaggaggcgaaggtggctgcggtagcagcagcgcggcagcctcggacccagcccggagcgcagggcggccgctgcaggtccccgctcccctccccgtgcgtccgcccatggccgccgccgggcagctgtgcttgctctacctgtcggcggggctcctgtcccggctcggcgcagccttcaacttggacactcgggaggacaacgtgatccggaaatatggagaccccgggagcctcttcggcttctcgctggccatgcactggcaactgcagcccgaggacaagcggctgttgctcgtgggggccccgcgggcagaagcgcttccactgcagagagccaacagaacgggagggctgtacagctgcgacatcaccgcccgggggccatgcacgcggatcgagtttgataacgatgctgaccccacgtcagaaagcaaggaagatcagtggatgggggtcaccgtccagagccaaggtccagggggcaaggtcgtgacatgtgctcaccgatatgaaaaaaggcagcatgttaatacgaagcaggaatcccgagacatctttgggcggtgttatgtcctgagtcagaatctcaggattgaagacgatatggatgggggagattggagcttttgtgatgggcgattgagaggccatgagaaatttggctcttgccagcaaggtgtagcagctacttttactaaagactttcattacattgtatttggagccccgggtacttataactggaaagggattgttcgtgtagagcaaaagaataacactttttttgacatgaacatctttgaagatgggccttatgaagttggtggagagactgagcatgatgaaagtctcgttcctgttcctgctaacagttacttaggtttttctttggactcagggaaaggtattgtttctaaagatgagatcacttttgtatctggtgctcccagagccaatcacagtggagccgtggttttgctgaagagagacatgaagtctgcacatctcctccctgagcacatattcgatggagaaggtctggcctcttcatttggctatgatgtggcggtggtggacctcaacaaggatgggtggcaagatatagttattggagccccacagtattttgatagagatggagaagttggaggtgcagtgtatgtctacatgaaccagcaaggcagatggaataatgtgaagccaattcgtcttaatggaaccaaagattctatgtttggcattgcagtaaaaaatattggagatattaatcaagatggctacccagatattgcagttggagctccgtatgatgacttgggaaaggtttttatctatcatggatctgcaaatggaataaataccaaaccaacacaggttctcaagggtatatcaccttattttggatattcaattgctggaaacatggaccttgatcgaaattcctaccctgatgttgctgttggttccctctcagattcagtaactattttcagatcccggcctgtgattaatattcagaaaaccatcacagtaactcctaacagaattgacctccgccagaaaacagcgtgtggggcgcctagtgggatatgcctccaggttaaatcctgttttgaatatactgctaaccccgctggttataatccttcaatatcaattgtgggcacacttgaagctgaaaaagaaagaagaaaatctgggctatcctcaagagttcagtttcgaaaccaaggttctgagcccaaatatactcaagaactaactctgaagaggcagaaacagaaagtgtgcatggaggaaaccctgtggctacaggataatatcagagataaactgcgtcccattcccataactgcctcagtggagatccaagagccaagctctcgtaggcgagtgaattcacttccagaagttcttccaattctgaattcagatgaacccaagacagctcatattgatgttcacttcttaaaagagggatgtggagacgacaatgtatgtaacagcaaccttaaactagaatataaattttgcacccgagaaggaaatcaagacaaattttcttatttaccaattcaaaaaggtgtaccagaactagttctaaaagatcagaaggatattgctttagaaataacagtgacaaacagcccttccaacccaaggaatcccacaaaagatggcgatgacgcccatgaggctaaactgattgcaacgtttccagacactttaacctattctgcatatagagaactgagggctttccctgagaaacagttgagttgtgttgccaaccagaatggctcgcaagctgactgtgagctcggaaatccttttaaaagaaattcaaatgtcactttttatttggttttaagtacaactgaagtcacctttgacaccccagatctggatattaatctgaagttagaaacaacaagcaatcaagataatttggctccaattacagctaaagcaaaagtggttattgaactgcttttatcggtctcgggagttgctaaaccttcccaggtgtattttggaggtacagttgttggcgagcaagctatgaaatctgaagatgaagtgggaagtttaatagagtatgaattcagggtaataaacttaggtaaacctcttacaaacctcggcacagcaaccttgaacattcagtggccaaaagaaattagcaatgggaaatggttgctttatttggtgaaagtagaatccaaaggattggaaaaggtaacttgtgagccacaaaaggagataaactccctgaacctaacggagtctcacaactcaagaaagaaacgggaaattactgaaaaacagatagatgataacagaaaattttctttatttgctgaaagaaaataccagactcttaactgtagcgtgaacgtgaactgtgtgaacatcagatgcccgctgcgggggctggacagcaaggcgtctcttattttgcgctcgaggttatggaacagcacatttctagaggaatattccaaactgaactacttggacattctcatgcgagccttcattgatgtgactgctgctgccgaaaatatcaggctgccaaatgcaggcactcaggttcgagtgactgtgtttccctcaaagactgtagctcagtattcgggagtaccttggtggatcatcctagtggctattctcgctgggatcttgatgcttgctttattagtgtttatactatggaagtgtggtttcttcaagagaaataagaaagatcattatgatgccacatatcacaaggctgagatccatgctcagccatctgataaagagaggcttacttctgatgcatagtattgatctacttctgtaattgtgtggattctttaaacgctctaggtacgatgacagtgttccccgataccatgctgtaaggatccggaaagaagagcgagagatcaaagatgaaaagtatattgataaccttgaaaaaaaacagtggatcacaaagtggaacgaaaatgaaagctactcatagcgggggcctaaaaaaaaaaagcttcacagtacccaaactgctttttccaactcagaaattcaatttggatttaaaagcctgctcaatccctgaggactgatttcagagtgactacacacagtacgaacctacagttttaactgtggatattgttacgtagcctaaggctcctgttttgcacagccaaatttaaaactgttggaatggatttttctttaactgccgtaatttaactttctgggttgcctttatttttggcgtggctgacttacatcatgtgttggggaagggcctgcccagttgcactcaggtgacatcctccagatagtgtagctgaggaggcacctacactcacctgcactaacagagtggccgtcctaacctcgggcctgctgcgcagacgtccatcacgttagctgtcccacatcacaagactatgccattggggtagttgtgtttcaacggaaagtgctgtcttaaactaaatgtgcaatagaaggtgatgttgccatcctaccgtcttttcctgtttcctagctgtgtgaatacctgctcacgtcaaatgcatacaagtttcattctccctttcactaaaacacacaggtgcaacagacttgaatgctagttatacttatttgtatatggtatttattttttcttttctttacaaaccattttgttattgactaacaggccaaagagtctccagtttacccttcaggttggtttaatcaatcagaattagagcatgggaggtcatcactttgacctaaattatttactgcaaaaagaaaatctttataaatgtaccagagagagttgttttaataacttatctataaactataacctctccttcatgacagcctccaccccacaacccaaaaggtttaagaaatagaattataactgtaaagatgtttatttcaggcattggatattttttactttagaagcctgcataatgtttctggatttcatactgtaacattcaggaattcttggagaaaatgggtttattcactgaactctagtgcggtttactcactgctgcaaatactgtatattcaggacttgaaagaaatggtgaatgcctatggtggatccaaactgatccagtataagactactgaatctgctaccaaaacagttaatcagtgagtcgatgttctattttttgttttgtttcctcccctatctgtattcccaaaaattactttggggctaatttaacaagaactttaaattgtgttttaattgtaaaaatggcagggggtggaattattactctatacattcaacagagactgaatagatatgaaagctgattttttttaattaccatgcttcacaatgttaagttatatggggagcaacagcaaacaggtgctaatttgttttggatatagtataagcagtgtctgtgttttgaaagaatagaacacagtttgtagtgccactgttgttttgggggggcttttttcttttcggaaatcttaaaccttaagatactaaggacgttgttttggttgtactttggaattcttagtcacaaaatatattttgtttacaaaaatttctgtaaaacaggttataacagtgtttaaagtctcagtttcttgcttggggaacttgtgtccctaatgtgtttagattgctagattgctaaggagctgatactttgacagtgtttttagacctgtgttactaaaaaaaagatgaatgtcctgaaaagggtgttgggagggtggttcaacaaagaaacaaagatgttatggtgtttagatttatggttgttaaaaatgtcatctcaagtcaagtcactggtctgtttgcatttgatacatttttgtactaactagcattgtaaaattatttcatgattagaaattacctgtggatatttgtataaaagtgtgaaataaattttttataaaagtgttcattgtttcgtaacacagcattgtatatgtgaagc

SEQ ID NO: 4479 - DNA, 5795 bp, Artificial Sequence
  derived and/or modified sequence
aacgggctcattcagcggtcgcgagctgcccgcgagggggagcggccggacggagagcgcgacccgtcccgggggtggggccgggcgcagcggcgagaggaggcgaaggtggctgcggtagcagcagcgcggcagcctcggacccagcccggagcgcagggcggccgctgcaggtccccgctcccctccccgtgcgtccgcccatggccgccgccgggcagctgtgcttgctctacctgtcggcggggctcctgtcccggctcggcgcagccttcaacttggacactcgggaggacaacgtgatccggaaatatggagaccccgggagcctcttcggcttctcgctggccatgcactggcaactgcagcccgaggacaagcggctgttgctcgtgggggccccgcgggcagaagcgcttccactgcagagagccaacagaacgggagggctgtacagctgcgacatcaccgcccgggggccatgcacgcggatcgagtttgataacgatgctgaccccacgtcagaaagcaaggaagatcagtggatgggggtcaccgtccagagccaaggtccagggggcaaggtcgtgacatgtgctcaccgatatgaaaaaaggcagcatgttaatacgaagcaggaatcccgagacatctttgggcggtgttatgtcctgagtcagaatctcaggattgaagacgatatggatgggggagattggagcttttgtgatgggcgattgagaggccatgagaaatttggctcttgccagcaaggtgtagcagctacttttactaaagactttcattacattgtatttggagccccgggtacttataactggaaaggcctgctgtttttgaccagcgtttcctatacagatcctgatcagtttgtttataaaacacggcctccccgggagcagcctgacacattccctgatgtgatgatgaatagctacctaggtttttctttggactcagggaaaggtattgtttctaaagatgagatcacttttgtatctggtgctcccagagccaatcacagtggagccgtggttttgctgaagagagacatgaagtctgcacatctcctccctgagcacatattcgatggagaaggtctggcctcttcatttggctatgatgtggcggtggtggacctcaacaaggatgggtggcaagatatagttattggagccccacagtattttgatagagatggagaagttggaggtgcagtgtatgtctacatgaaccagcaaggcagatggaataatgtgaagccaattcgtcttaatggaaccaaagattctatgtttggcattgcagtaaaaaatattggagatattaatcaagatggctacccagatattgcagttggagctccgtatgatgacttgggaaaggtttttatctatcatggatctgcaaatggaataaataccaaaccaacacaggttctcaagggtatatcaccttattttggatattcaattgctggaaacatggaccttgatcgaaattcctaccctgatgttgctgttggttccctctcagattcagtaactattttcagatcccggcctgtgattaatattcagaaaaccatcacagtaactcctaacagaattgacctccgccagaaaacagcgtgtggggcgcctagtgggatatgcctccaggttaaatcctgttttgaatatactgctaaccccgctggttataatccttcaatatcaattgtgggcacacttgaagctgaaaaagaaagaagaaaatctgggctatcctcaagagttcagtttcgaaaccaaggttctgagcccaaatatactcaagaactaactctgaagaggcagaaacagaaagtgtgcatggaggaaaccctgtggctacaggataatatcagagataaactgcgtcccattcccataactgcctcagtggagatccaagagccaagctctcgtaggcgagtgaattcacttccagaagttcttccaattctgaattcagatgaacccaagacagctcatattgatgttcacttcttaaaagagggatgtggagacgacaatgtatgtaacagcaaccttaaactagaatataaattttgcacccgagaaggaaatcaagacaaattttcttatttaccaattcaaaaaggtgtaccagaactagttctaaaagatcagaaggatattgctttagaaataacagtgacaaacagcccttccaacccaaggaatcccacaaaagatggcgatgacgcccatgaggctaaactgattgcaacgtttccagacactttaacctattctgcatatagagaactgagggctttccctgagaaacagttgagttgtgttgccaaccagaatggctcgcaagctgactgtgagctcggaaatccttttaaaagaaattcaaatgtcactttttatttggttttaagtacaactgaagtcacctttgacaccccagatctggatattaatctgaagttagaaacaacaagcaatcaagataatttggctccaattacagctaaagcaaaagtggttattgaactgcttttatcggtctcgggagttgctaaaccttcccaggtgtattttggaggtacagttgttggcgagcaagctatgaaatctgaagatgaagtgggaagtttaatagagtatgaattcagggtaataaacttaggtaaacctcttacaaacctcggcacagcaaccttgaacattcagtggccaaaagaaattagcaatgggaaatggttgctttatttggtgaaagtagaatccaaaggattggaaaaggtaacttgtgagccacaaaaggagataaactccctgaacctaacggagtctcacaactcaagaaagaaacgggaaattactgaaaaacagatagatgataacagaaaattttctttatttgctgaaagaaaataccagactcttaactgtagcgtgaacgtgaactgtgtgaacatcagatgcccgctgcgggggctggacagcaaggcgtctcttattttgcgctcgaggttatggaacagcacatttctagaggaatattccaaactgaactacttggacattctcatgcgagccttcattgatgtgactgctgctgccgaaaatatcaggctgccaaatgcaggcactcaggttcgagtgactgtgtttccctcaaagactgtagctcagtattcgggagtaccttggtggatcatcctagtggctattctcgctgggatcttgatgcttgctttattagtgtttatactatggaagtgtggtttcttcaagagaaataagaaagatcattatgatgccacatatcacaaggctgagatccatgctcagccatctgataaagagaggcttacttctgatgcatagtattgatctacttctgtaattgtgtggattctttaaacgctctaggtacgatgacagtgttccccgataccatgctgtaaggatccggaaagaagagcgagagatcaaagatgaaaagtatattgataaccttgaaaaaaaacagtggatcacaaagtggaacgaaaatgaaagctactcatagcgggggcctaaaaaaaaaaagcttcacagtacccaaactgctttttccaactcagaaattcaatttggatttaaaagcctgctcaatccctgaggactgatttcagagtgactacacacagtacgaacctacagttttaactgtggatattgttacgtagcctaaggctcctgttttgcacagccaaatttaaaactgttggaatggatttttctttaactgccgtaatttaactttctgggttgcctttatttttggcgtggctgacttacatcatgtgttggggaagggcctgcccagttgcactcaggtgacatcctccagatagtgtagctgaggaggcacctacactcacctgcactaacagagtggccgtcctaacctcgggcctgctgcgcagacgtccatcacgttagctgtcccacatcacaagactatgccattggggtagttgtgtttcaacggaaagtgctgtcttaaactaaatgtgcaatagaaggtgatgttgccatcctaccgtcttttcctgtttcctagctgtgtgaatacctgctcacgtcaaatgcatacaagtttcattctccctttcactaaaacacacaggtgcaacagacttgaatgctagttatacttatttgtatatggtatttattttttcttttctttacaaaccattttgttattgactaacaggccaaagagtctccagtttacccttcaggttggtttaatcaatcagaattagagcatgggaggtcatcactttgacctaaattatttactgcaaaaagaaaatctttataaatgtaccagagagagttgttttaataacttatctataaactataacctctccttcatgacagcctccaccccacaacccaaaaggtttaagaaatagaattataactgtaaagatgtttatttcaggcattggatattttttactttagaagcctgcataatgtttctggatttcatactgtaacattcaggaattcttggagaaaatgggtttattcactgaactctagtgcggtttactcactgctgcaaatactgtatattcaggacttgaaagaaatggtgaatgcctatggtggatccaaactgatccagtataagactactgaatctgctaccaaaacagttaatcagtgagtcgatgttctattttttgttttgtttcctcccctatctgtattcccaaaaattactttggggctaatttaacaagaactttaaattgtgttttaattgtaaaaatggcagggggtggaattattactctatacattcaacagagactgaatagatatgaaagctgattttttttaattaccatgcttcacaatgttaagttatatggggagcaacagcaaacaggtgctaatttgttttggatatagtataagcagtgtctgtgttttgaaagaatagaacacagtttgtagtgccactgttgttttgggggggcttttttcttttcggaaatcttaaaccttaagatactaaggacgttgttttggttgtactttggaattcttagtcacaaaatatattttgtttacaaaaatttctgtaaaacaggttataacagtgtttaaagtctcagtttcttgcttggggaacttgtgtccctaatgtgtttagattgctagattgctaaggagctgatactttgacagtgtttttagacctgtgttactaaaaaaaagatgaatgtcctgaaaagggtgttgggagggtggttcaacaaagaaacaaagatgttatggtgtttagatttatggttgttaaaaatgtcatctcaagtcaagtcactggtctgtttgcatttgatacatttttgtactaactagcattgtaaaattatttcatgattagaaattacctgtggatatttgtataaaagtgtgaaataaattttttataaaagtgttcattgtttcgtaacacagcattgtatatgtgaagcaaactctaaaattataaatgacaacctgaattatctatttcatcaaaccaaagttcagtgtttttatttttggtgtctcatgtaatctcagatcagccaaagatactagtgccaaagcaatgggattcggggtttttttctgttttcgctctatgtaggtgatcctcaagtctttcattttccttctttatgattaaaagaaacctacaggtatttaacaacc

SEQ ID NO: 4480 - DNA, 5927 bp, Artificial Sequence
  derived and/or modified sequence
aacgggctcattcagcggtcgcgagctgcccgcgagggggagcggccggacggagagcgcgacccgtcccgggggtggggccgggcgcagcggcgagaggaggcgaaggtggctgcggtagcagcagcgcggcagcctcggacccagcccggagcgcagggcggccgctgcaggtccccgctcccctccccgtgcgtccgcccatggccgccgccgggcagctgtgcttgctctacctgtcggcggggctcctgtcccggctcggcgcagccttcaacttggacactcgggaggacaacgtgatccggaaatatggagaccccgggagcctcttcggcttctcgctggccatgcactggcaactgcagcccgaggacaagcggctgttgctcgtgggggccccgcgggcagaagcgcttccactgcagagagccaacagaacgggagggctgtacagctgcgacatcaccgcccgggggccatgcacgcggatcgagtttgataacgatgctgaccccacgtcagaaagcaaggaagatcagtggatgggggtcaccgtccagagccaaggtccagggggcaaggtcgtgacatgtgctcaccgatatgaaaaaaggcagcatgttaatacgaagcaggaatcccgagacatctttgggcggtgttatgtcctgagtcagaatctcaggattgaagacgatatggatgggggagattggagcttttgtgatgggcgattgagaggccatgagaaatttggctcttgccagcaaggtgtagcagctacttttactaaagactttcattacattgtatttggagccccgggtacttataactggaaagggattgttcgtgtagagcaaaagaataacactttttttgacatgaacatctttgaagatgggccttatgaagttggtggagagactgagcatgatgaaagtctcgttcctgttcctgctaacagttacttaggcctgctgtttttgaccagcgtttcctatacagatcctgatcagtttgtttataaaacacggcctccccgggagcagcctgacacattccctgatgtgatgatgaatagctacctaggtttttctttggactcagggaaaggtattgtttctaaagatgagatcacttttgtatctggtgctcccagagccaatcacagtggagccgtggttttgctgaagagagacatgaagtctgcacatctcctccctgagcacatattcgatggagaaggtctggcctcttcatttggctatgatgtggcggtggtggacctcaacaaggatgggtggcaagatatagttattggagccccacagtattttgatagagatggagaagttggaggtgcagtgtatgtctacatgaaccagcaaggcagatggaataatgtgaagccaattcgtcttaatggaaccaaagattctatgtttggcattgcagtaaaaaatattggagatattaatcaagatggctacccagatattgcagttggagctccgtatgatgacttgggaaaggtttttatctatcatggatctgcaaatggaataaataccaaaccaacacaggttctcaagggtatatcaccttattttggatattcaattgctggaaacatggaccttgatcgaaattcctaccctgatgttgctgttggttccctctcagattcagtaactattttcagatcccggcctgtgattaatattcagaaaaccatcacagtaactcctaacagaattgacctccgccagaaaacagcgtgtggggcgcctagtgggatatgcctccaggttaaatcctgttttgaatatactgctaaccccgctggttataatccttcaatatcaattgtgggcacacttgaagctgaaaaagaaagaagaaaatctgggctatcctcaagagttcagtttcgaaaccaaggttctgagcccaaatatactcaagaactaactctgaagaggcagaaacagaaagtgtgcatggaggaaaccctgtggctacaggataatatcagagataaactgcgtcccattcccataactgcctcagtggagatccaagagccaagctctcgtaggcgagtgaattcacttccagaagttcttccaattctgaattcagatgaacccaagacagctcatattgatgttcacttcttaaaagagggatgtggagacgacaatgtatgtaacagcaaccttaaactagaatataaattttgcacccgagaaggaaatcaagacaaattttcttatttaccaattcaaaaaggtgtaccagaactagttctaaaagatcagaaggatattgctttagaaataacagtgacaaacagcccttccaacccaaggaatcccacaaaagatggcgatgacgcccatgaggctaaactgattgcaacgtttccagacactttaacctattctgcatatagagaactgagggctttccctgagaaacagttgagttgtgttgccaaccagaatggctcgcaagctgactgtgagctcggaaatccttttaaaagaaattcaaatgtcactttttatttggttttaagtacaactgaagtcacctttgacaccccagatctggatattaatctgaagttagaaacaacaagcaatcaagataatttggctccaattacagctaaagcaaaagtggttattgaactgcttttatcggtctcgggagttgctaaaccttcccaggtgtattttggaggtacagttgttggcgagcaagctatgaaatctgaagatgaagtgggaagtttaatagagtatgaattcagggtaataaacttaggtaaacctcttacaaacctcggcacagcaaccttgaacattcagtggccaaaagaaattagcaatgggaaatggttgctttatttggtgaaagtagaatccaaaggattggaaaaggtaacttgtgagccacaaaaggagataaactccctgaacctaacggagtctcacaactcaagaaagaaacgggaaattactgaaaaacagatagatgataacagaaaattttctttatttgctgaaagaaaataccagactcttaactgtagcgtgaacgtgaactgtgtgaacatcagatgcccgctgcgggggctggacagcaaggcgtctcttattttgcgctcgaggttatggaacagcacatttctagaggaatattccaaactgaactacttggacattctcatgcgagccttcattgatgtgactgctgctgccgaaaatatcaggctgccaaatgcaggcactcaggttcgagtgactgtgtttccctcaaagactgtagctcagtattcgggagtaccttggtggatcatcctagtggctattctcgctgggatcttgatgcttgctttattagtgtttatactatggaagtgtggtttcttcaagagaaataagaaagatcattatgatgccacatatcacaaggctgagatccatgctcagccatctgataaagagaggcttacttctgatgcatagtattgatctacttctgtaattgtgtggattctttaaacgctctaggtacgatgacagtgttccccgataccatgctgtaaggatccggaaagaagagcgagagatcaaagatgaaaagtatattgataaccttgaaaaaaaacagtggatcacaaagtggaacgaaaatgaaagctactcatagcgggggcctaaaaaaaaaaagcttcacagtacccaaactgctttttccaactcagaaattcaatttggatttaaaagcctgctcaatccctgaggactgatttcagagtgactacacacagtacgaacctacagttttaactgtggatattgttacgtagcctaaggctcctgttttgcacagccaaatttaaaactgttggaatggatttttctttaactgccgtaatttaactttctgggttgcctttatttttggcgtggctgacttacatcatgtgttggggaagggcctgcccagttgcactcaggtgacatcctccagatagtgtagctgaggaggcacctacactcacctgcactaacagagtggccgtcctaacctcgggcctgctgcgcagacgtccatcacgttagctgtcccacatcacaagactatgccattggggtagttgtgtttcaacggaaagtgctgtcttaaactaaatgtgcaatagaaggtgatgttgccatcctaccgtcttttcctgtttcctagctgtgtgaatacctgctcacgtcaaatgcatacaagtttcattctccctttcactaaaacacacaggtgcaacagacttgaatgctagttatacttatttgtatatggtatttattttttcttttctttacaaaccattttgttattgactaacaggccaaagagtctccagtttacccttcaggttggtttaatcaatcagaattagagcatgggaggtcatcactttgacctaaattatttactgcaaaaagaaaatctttataaatgtaccagagagagttgttttaataacttatctataaactataacctctccttcatgacagcctccaccccacaacccaaaaggtttaagaaatagaattataactgtaaagatgtttatttcaggcattggatattttttactttagaagcctgcataatgtttctggatttcatactgtaacattcaggaattcttggagaaaatgggtttattcactgaactctagtgcggtttactcactgctgcaaatactgtatattcaggacttgaaagaaatggtgaatgcctatggtggatccaaactgatccagtataagactactgaatctgctaccaaaacagttaatcagtgagtcgatgttctattttttgttttgtttcctcccctatctgtattcccaaaaattactttggggctaatttaacaagaactttaaattgtgttttaattgtaaaaatggcagggggtggaattattactctatacattcaacagagactgaatagatatgaaagctgattttttttaattaccatgcttcacaatgttaagttatatggggagcaacagcaaacaggtgctaatttgttttggatatagtataagcagtgtctgtgttttgaaagaatagaacacagtttgtagtgccactgttgttttgggggggcttttttcttttcggaaatcttaaaccttaagatactaaggacgttgttttggttgtactttggaattcttagtcacaaaatatattttgtttacaaaaatttctgtaaaacaggttataacagtgtttaaagtctcagtttcttgcttggggaacttgtgtccctaatgtgtttagattgctagattgctaaggagctgatactttgacagtgtttttagacctgtgttactaaaaaaaagatgaatgtcctgaaaagggtgttgggagggtggttcaacaaagaaacaaagatgttatggtgtttagatttatggttgttaaaaatgtcatctcaagtcaagtcactggtctgtttgcatttgatacatttttgtactaactagcattgtaaaattatttcatgattagaaattacctgtggatatttgtataaaagtgtgaaataaattttttataaaagtgttcattgtttcgtaacacagcattgtatatgtgaagcaaactctaaaattataaatgacaacctgaattatctatttcatcaaaccaaagttcagtgtttttatttttggtgtctcatgtaatctcagatcagccaaagatactagtgccaaagcaatgggattcggggtttttttctgttttcgctctatgtaggtgatcctcaagtctttcattttccttctttatgattaaaagaaacctacaggtatttaacaacc

SEQ ID NO: 4481 - DNA, 3544 bp, Artificial Sequence
  derived and/or modified sequence
acgtcgtggcttccgggcaggtaccgggcagctggagacgccagagccggcgggttgctcgtgggggccccgcgggcagaagcgcttccactgcagagagccaacagaacgggagggctgtacagctgcgacatcaccgcccgggggccatgcacgcggatcgagtttgataacgatgctgaccccacgtcagaaagcaaggaagatcagtggatgggggtcaccgtccagagccaaggtccagggggcaaggtcgtgacatgtgctcaccgatatgaaaaaaggcagcatgttaatacgaagcaggaatcccgagacatctttgggcggtgttatgtcctgagtcagaatctcaggattgaagacgatatggatgggggagattggagcttttgtgatgggcgattgagaggccatgagaaatttggctcttgccagcaaggtgtagcagctacttttactaaagactttcattacattgtatttggagccccgggtacttataactggaaaggcctgctgtttttgaccagcgtttcctatacagatcctgatcagtttgtttataaaacacggcctccccgggagcagcctgacacattccctgatgtgatgatgaatagctacctaggtttttctttggactcagggaaaggtattgtttctaaagatgagatcacttttgtatctggtgctcccagagccaatcacagtggagccgtggttttgctgaagagagacatgaagtctgcacatctcctccctgagcacatattcgatggagaaggtctggcctcttcatttggctatgatgtggcggtggtggacctcaacaaggatgggtggcaagatatagttattggagccccacagtattttgatagagatggagaagttggaggtgcagtgtatgtctacatgaaccagcaaggcagatggaataatgtgaagccaattcgtcttaatggaaccaaagattctatgtttggcattgcagtaaaaaatattggagatattaatcaagatggctacccagatattgcagttggagctccgtatgatgacttgggaaaggtttttatctatcatggatctgcaaatggaataaataccaaaccaacacaggttctcaagggtatatcaccttattttggatattcaattgctggaaacatggaccttgatcgaaattcctaccctgatgttgctgttggttccctctcagattcagtaactattttcagatcccggcctgtgattaatattcagaaaaccatcacagtaactcctaacagaattgacctccgccagaaaacagcgtgtggggcgcctagtgggatatgcctccaggttaaatcctgttttgaatatactgctaaccccgctggttataatccttcaatatcaattgtgggcacacttgaagctgaaaaagaaagaagaaaatctgggctatcctcaagagttcagtttcgaaaccaaggttctgagcccaaatatactcaagaactaactctgaagaggcagaaacagaaagtgtgcatggaggaaaccctgtggctacaggataatatcagagataaactgcgtcccattcccataactgcctcagtggagatccaagagccaagctctcgtaggcgagtgaattcacttccagaagttcttccaattctgaattcagatgaacccaagacagctcatattgatgttcacttcttaaaagagggatgtggagacgacaatgtatgtaacagcaaccttaaactagaatataaattttgcacccgagaaggaaatcaagacaaattttcttatttaccaattcaaaaaggtgtaccagaactagttctaaaagatcagaaggatattgctttagaaataacagtgacaaacagcccttccaacccaaggaatcccacaaaagatggcgatgacgcccatgaggctaaactgattgcaacgtttccagacactttaacctattctgcatatagagaactgagggctttccctgagaaacagttgagttgtgttgccaaccagaatggctcgcaagctgactgtgagctcggaaatccttttaaaagaaattcaaatgtcactttttatttggttttaagtacaactgaagtcacctttgacaccccagatctggatattaatctgaagttagaaacaacaagcaatcaagataatttggctccaattacagctaaagcaaaagtggttattgaactgcttttatcggtctcgggagttgctaaaccttcccaggtgtattttggaggtacagttgttggcgagcaagctatgaaatctgaagatgaagtgggaagtttaatagagtatgaattcagggtaataaacttaggtaaacctcttacaaacctcggcacagcaaccttgaacattcagtggccaaaagaaattagcaatgggaaatggttgctttatttggtgaaagtagaatccaaaggattggaaaaggtaacttgtgagccacaaaaggagataaactccctgaacctaacggagtctcacaactcaagaaagaaacgggaaattactgaaaaacagatagatgataacagaaaattttctttatttgctgaaagaaaataccagactcttaactgtagcgtgaacgtgaactgtgtgaacatcagatgcccgctgcgggggctggacagcaaggcgtctcttattttgcgctcgaggttatggaacagcacatttctagaggaatattccaaactgaactacttggacattctcatgcgagccttcattgatgtgactgctgctgccgaaaatatcaggctgccaaatgcaggcactcaggttcgagtgactgtgtttccctcaaagactgtagctcagtattcgggagtaccttggtggatcatcctagtggctattctcgctgggatcttgatgcttgctttattagtgtttatactatggaagtgtggtttcttcaagagaaataagaaagatcattatgatgccacatatcacaaggctgagatccatgctcagccatctgataaagagaggcttacttctgatgcatagtattgatctacttctgtaattgtgtggattctttaaacgctctaggtacgatgacagtgttccccgataccatgctgtaaggatccggaaagaagagcgagagatcaaagatgaaaagtatattgataaccttgaaaaaaaacagtggatcacaaagtggaacgaaaatgaaagctactcatagcgggggcctaaaaaaaaaaagcttcacagtacccaaactgctttttccaactcagaaattcaatttggatttaaaagcctgctcaatccctgaggactgatttcagagtgactacacacagtacgaacctacagttttaactgtggatattgttacgtagcctaaggctcctgttttgcacagccaaatttaaaactgttggaatggatttttctttaactgccgtaatttaactttctgggttgcctttatttttggcgtggctgacttacatcatgtgtt

SEQ ID NO: 4482 - DNA, 3222 bp, Artificial Sequence
  derived and/or modified sequence
atggccgccgccggccagctgtgcctgctgtacctgagcgccggcttgctctctaggcttggagccgccttcaatctggatacacgagaggataacgttattagaaaatatggagatccaggtagcctgttcggattcagcctcgcgatgcattggcagcttcaaccggaggacaaaaggctactgctggtgggggctccccgtgcggaggccctcccgttacagcgggcgaacagaacagggggcctgtacagttgtgacattactgcaaggggtccctgcacccggatcgaattcgataatgatgccgacccgacgtctgagtctaaggaagatcagtggatgggggtgaccgtacaatcccagggccctggtgggaaagtcgttacctgcgcacaccgatatgagaaaaggcagcacgtgaatacgaagcaagagtcccgggatatattcgggcgctgttacgtactgtctcagaaccttcgcatcgaggacgacatggacgggggcgattggtccttttgtgatgggagattgagagggcacgaaaagttcggctcctgtcagcagggggtcgccgcgacattcactaaggactttcattatatcgtgtttggcgccccaggcacctacaactggaagggaattgtgagggtcgagcagaaaaataatacattcttcgatatgaatatatttgaagacggcccctatgaggttggaggcgagacggaacacgacgagagcctggtgccggtgcctgccaattcctacctaggtttctcactggacagtggcaagggcatcgtatccaaggatgagatcacattcgtttcgggcgccccaagggcaaatcattctggagcggttgtgttgctgaaacgtgacatgaaatcagctcatctgctgcctgaacacatcttcgacggcgaggggctcgcctctagcttcgggtacgatgtcgctgtggtagatctgaataaagatggctggcaggatattgtgatcggcgcccctcagtactttgatagggacggagaagtaggcggggccgtgtatgtgtatatgaaccagcagggccgctggaataatgtgaagcctattcggctgaacggcactaaagactctatgttcggtatcgcggtgaaaaacataggtgatatcaatcaagatggctaccctgacattgcagtgggtgcgccttacgacgacctcggtaaggtgtttatctaccatggctctgcaaacggtataaacacgaagcctacacaggtactaaaaggcatatctccttactttgggtactccatagctgggaatatggacttagatcggaactcgtaccccgatgtagcggtgggcagcctctctgatagtgtgaccatctttcgaagccgtccagtaatcaacatccagaagaccattaccgtgacacctaacagaatagatctgagacagaagaccgcatgtggggccccgagtggcatttgcctgcaggtgaagtcttgctttgagtacactgctaaccccgctggctataatccttcaattagcatcgttggcactttagaggcggagaaagaacgtagaaagagtggcctaagcagtagggttcaatttagaaaccaagggtccgaaccgaaatacacacaagaactgactttgaagcgacagaagcagaaagtttgcatggaggagactctctggctccaggacaacattagagacaagcttcgccctatcccgataactgctagcgtggagatccaggagccaagctcccgccggagagtgaactctctgcccgaggtattacctatcctgaactcggatgaacccaaaactgcccacatcgacgtgcacttcctgaaagaagggtgcggtgacgacaacgtgtgtaacagtaatctgaaactggagtacaagttctgtactcgagaaggaaaccaagataagtttagctacctgccaatccagaagggtgtgccagagcttgtgctgaaggaccagaaagacattgccctggagatcaccgttactaacagtccgtcaaacccgcgcaatcccactaaggatggcgacgacgcccatgaagcaaagctcatcgccactttccctgatacgctcacgtatagtgcatacagggaactccgagctttccccgaaaaacagctgtcctgcgtggctaatcagaacggaagtcaggccgattgtgagctgggtaatccttttaagaggaactctaacgtgaccttctatctagtgctgtcaacgacagaagtcacatttgacacaccagatttggatatcaacctgaaactagagactacttccaaccaggataatctggctcccattacagcgaaggctaaggtggttattgagttgttgctatcggtgagcggagttgcaaaacccagtcaggtttacttcggcggcactgtggtgggggagcaggccatgaaaagcgaggatgaggtcggaagcttaatcgagtacgagttccgggttatcaatctcggcaaacctttaacgaacctaggtaccgcaacgctgaacatccagtggcccaaggagataagcaatggcaagtggttgctgtatctagtgaaagtcgagagcaaggggttagaaaaagtcacttgtgaacctcagaaagaaatcaattcacttaacctaaccgagagtcataattctaggaagaagagggagatcaccgagaagcagatcgacgataataggaagttctctttgtttgcagagcgcaagtaccaaactctaaattgctccgtcaacgtaaactgcgttaacattcgctgtccgctgaggggactcgattccaaagcatctctgatcctgagaagcaggttgtggaatagcacctttctggaagaatacagcaagctgaactatcttgacattctgatgcgcgcttttattgacgtaaccgccgcagctgagaacatacggctcccaaacgctggaactcaagtgcgcgttactgtgttcccttccaaaactgtggcacagtattctggggtcccatggtggatcatactggttgccattttggcaggaatcttgatgctcgccctgctggtgtttattctttggaaatgtgggttctttaaaaggaataagaaggatcactatgacgctacgtaccataaggcagagattcatgcccagcccagtgataaggagaggttgacctctgacgcctag

SEQ ID NO: 4483 - DNA, 3207 bp, Artificial Sequence
  derived and/or modified sequence
atggccgccgccggccagctgtgcctgctgtacctgagcgccggcctcctttctaggctcggcgccgctttcaatcttgataccagggaggacaacgtgatcagaaagtatggtgaccctggaagtcttttcggattcagcctcgccatgcactggcagctgcagccggaggataagcggctcctgctggtgggggcccccagggcagaggctcttccactgcaaagagctaataggaccggaggtctgtacagttgtgatatcaccgctcgggggccctgtacacgtattgaattcgacaatgacgctgaccctaccagtgagtcaaaagaagatcaatggatgggagtcactgtacaatcccaaggaccaggggggaaggttgtgacatgtgcccaccggtatgaaaagcgacagcacgtgaacacaaaacaagaatcaagagacatctttgggcgctgctatgtgctatcacagaacttgcgcatcgaagacgatatggatggcggcgactggagcttttgtgacggccggttacgcgggcacgagaagtttggctcatgtcaacaaggcgttgcagccaccttcacaaaagactttcactacattgttttcggcgcacctggaacatataattggaagggactgctgtttctgacctctgtttcatacacggatcctgaccagtttgtgtacaaaactcggcccccaagggaacagcccgatacgtttcctgatgtcatgatgaattcctatctggggttctctcttgattctggaaagggcatcgtgagcaaggatgaaattaccttcgtttcgggtgcaccaagggcaaatcactccggcgccgtggttcttctgaaacgagatatgaagagcgcgcacttattgcctgagcacattttcgatggagaggggttggcttccagtttcggatatgacgtggccgtcgtggatctgaacaaggacgggtggcaggatatagtgatcggtgctccacagtatttcgacagagacggtgaagtcgggggcgcggtttacgtttatatgaatcagcaagggaggtggaacaatgtcaagccaattaggttaaacggcacaaaggactcaatgttcggtatcgccgtgaagaatattggtgacatcaaccaagacggatacccagacatcgccgtgggtgccccttatgatgatctgggcaaggtatttatctatcacggatccgctaacggaattaataccaaacccactcaggtcctgaagggaatcagcccctacttcggatatagtattgcaggtaacatggatctggatagaaactcttaccctgatgtcgccgtcggttcgctgtctgactctgtcacgatattccggagccgccccgtgatcaacatccagaagaccatcacagtgacacctaacagaatagaccttagacagaagaccgcttgtggcgctccgagtggcatctgcctgcaggttaaatcttgcttcgagtacacggccaatcccgccgggtacaatccatcgatcagtatcgtggggacattggaggcagagaaggagaggaggaagagcggactgtctagccgggtacagttcaggaatcaaggaagcgagcccaaatacacacaagaactaacacttaaacggcagaagcagaaggtttgcatggaggagaccctttggcttcaggacaatatacgtgacaaactccggcccattccaatcacagcttccgtagagatccaggagccttcatctcgacggagggtgaattccctgcctgaggtgcttccgattctcaattcagatgagcctaaaacggctcacattgatgtgcactttttaaaagaagggtgtggggacgacaacgtatgtaatagcaacctcaagctggaatataagttctgtactcgggaaggaaaccaggacaaatttagctatcttcctattcagaaaggggtgccagagcttgtgctgaaggaccagaaagacatagccctggagatcaccgtgacaaatagtccgtctaatcctcgtaacccgacaaaggacggagacgatgcgcacgaggcgaaactgatcgctacctttccagataccctgacttactctgcctaccgcgaactgagagcgttccccgaaaagcagttgtcctgcgtcgcaaaccagaatggatcccaggcagactgtgagttgggaaacccctttaaaagaaatagcaacgtgacgttctacctggtgctgtccactacagaagttacatttgatactccggatcttgacattaacctgaaactggaaacaacaagcaaccaggacaatttagctccaattaccgcaaaagcgaaagtcgttatcgagctactcctatcagtgtctggagtagccaagccaagccaggtctactttggcggcactgtagtgggcgagcaagctatgaagagcgaagacgaagtcgggtcacttattgaatacgaatttcgtgttatcaatctgggaaaacccctcaccaacctgggaacggcaaccctcaacatccagtggcctaaggagatttcaaatggcaagtggctgctctacctggtgaaggttgaaagcaagggtctggagaaggtaacctgcgagccgcagaaagaaattaatagcctcaatttgactgagagccataacagccggaagaaaagagagattacggagaagcagatagacgataatagaaagttctcgctttttgccgagaggaagtatcagacactgaattgctcagtgaacgtaaactgcgtgaatattcggtgcccccttcgcggacttgatagtaaggcaagcttgatcctgagatcccgcttatggaacagtacatttttggaggagtactctaaactgaactatctggacatcctcatgcgcgctttcatcgacgtgaccgctgcagcagagaatataaggctcccaaatgccgggacccaagttcgcgtcacagtttttccgtccaaaactgtcgctcagtatagcggcgtgccttggtggattatcctcgttgctatcctggcgggcattctgatgctggcactcctcgtcttcatcctgtggaagtgtggcttcttcaagcgcaacaaaaaggaccactatgacgctacttatcataaggctgagatccacgcacaaccatcagacaaggaaaggctgacatccgatgcctag

SEQ ID NO: 4484 - DNA, 3339 bp, Artificial Sequence
  derived and/or modified sequence
atggccgccgccggccagctgtgcctgctgtacctgagcgccggcctccttagccgtctcggtgccgcttttaatctcgatacacgggaggacaatgtgatcagaaaatatggagatcccggaagcctgtttgggttctctctggcaatgcattggcagttgcaaccagaggacaagcgtttgttactagtaggggcaccgagagcagaagccttgcctctgcagcgagctaacagaaccggaggtctgtacagttgcgacattaccgcccgcgggccctgtaccaggatcgagttcgataatgacgcagatcctacaagtgagtccaaggaggaccaatggatgggggtcacagttcagtctcagggccccggtggaaaagttgtaacctgcgcacaccgctacgaaaaaagacaacatgtgaacacaaaacaggagtctagagacatctttgggcgctgttatgtgctgagtcaaaacttgcggattgaggatgacatggacggaggcgattggtccttttgcgatgggagattacgcggtcacgagaaattcggctcctgtcagcaaggtgtggccgcaacttttacaaaagatttccattacatagtctttggcgcaccaggtacctacaactggaagggaatcgtacgggtggagcagaagaacaatacatttttcgacatgaacattttcgaagacggaccttatgaagtcgggggagagacggagcacgatgaaagcctggtacccgtacccgctaattcatatctaggattactcttcttaacaagtgtctcttatactgacccagatcaatttgtgtacaagactagacctcccagagagcagcccgacacctttccagacgttatgatgaacagctaccttggtttctcactggactctggcaaaggcattgtcagcaaggatgagataacctttgtgtccggcgccccaagggcgaatcactctggcgccgtcgtcctgctgaagcgtgatatgaaatccgcgcatttgcttccagaacatatattcgacggtgagggattggccagctcttttggttatgacgtcgcagtagtcgacctcaataaggatggctggcaggacattgtgattggcgccccacaatactttgatcgcgatggcgaggtgggcggcgccgtttacgtttacatgaaccagcagggacggtggaacaatgtcaagccaatcaggctgaatgggaccaaggacagcatgttcggcatcgccgtgaagaacattggcgacattaaccaggatggatatccggacattgctgttggcgcaccttacgacgacctgggaaaggttttcatatatcatggctcggcaaacggaataaacacaaagcccacacaggttttgaaggggatcagcccatactttggctacagtattgccggtaacatggacctggaccggaactcctacccagacgtagccgtgggcagcctgtcagatagtgtaaccatcttccgcagccggcctgtcataaatatccagaaaacaattacggtgacaccaaaccggattgatctccgacaaaagacagcctgtggcgcgcccagcgggatatgcttgcaagttaaatcttgcttcgaatataccgccaaccctgctggttacaatcctagtatatctatcgttggtactttggaggccgaaaaggagaggcgaaaatccggccttagctcaagagtccagtttcgcaaccagggctctgaacctaagtatacgcaggaattgactctgaaacggcagaagcagaaggtctgcatggaggaaaccctgtggctccaggataacattagggataagcttcgccctataccaatcacagcatccgtggaaatccaggaacctagctcgagacgtcgggtgaactccctgcccgaggtgctcccgattctcaatagcgacgaacccaaaaccgctcatatcgacgtgcattttttaaaagaaggttgtggggatgacaacgtctgtaactccaacctcaagctggagtacaagttctgcacacgagaagggaatcaggataagtttagctaccttcctattcaaaaaggagtgcccgagttagtcttgaaagatcagaaagacatcgcactcgaaataaccgtgacaaactctccatcaaacccacgcaaccctactaaggatggcgacgacgcccacgaggctaagctcattgctaccttcccagatacccttacctactcagcctatagggagctgagagcttttcccgaaaagcagctctcttgcgtggcaaatcagaacgggtcacaggcagattgcgagctcggcaacccgttcaaacggaatagcaatgtcacgttctacctcgtgctgtcaacgaccgaagttactttcgatactcccgatcttgatattaacctcaagctggaaaccacctctaaccaggacaatctggctcctatcaccgccaaagccaaggtagtcattgagctactgttgtcagtgtccggggtggcgaagccctcccaggtgtacttcggaggcaccgtggtgggcgagcaagccatgaaaagtgaagacgaggtcgggtccttgattgagtacgaattccgcgtcattaaccttggtaaaccgctaaccaatctgggcaccgcaacactaaatatccagtggcccaaggaaatttccaatggaaagtggctgctatacctcgtgaaagtggaatctaagggccttgagaaggtgacttgcgaacctcagaaggagattaattctctgaacctgaccgaaagccacaactctcggaaaaagcgcgagattaccgagaaacagatcgacgataatcgcaagtttagcctcttcgcagaacggaagtaccagactctgaactgtagcgtcaacgtcaactgtgtgaatatcagatgtcctctgcgagggttagacagcaaagcgtcactcatccttcgcagccgtctctggaactcgaccttcctcgaggaatattctaagttgaattatctggacattttaatgcgggcatttatcgatgtaaccgccgcagcggagaatattaggctgcccaatgccgggacgcaggtaagagtgacagtattcccttccaaaaccgtggcgcagtactccggagtcccatggtggatcattctggtagctatcctggcgggaattcttatgctggctctgttagttttcattctgtggaagtgcggcttcttcaagcgcaataagaaggaccattacgatgccacttatcacaaggccgagatacacgcccagcccagcgacaaggagagacttacaagcgatgcctag

SEQ ID NO: 4485 - DNA, 3222 bp, Artificial Sequence
  derived and/or modified sequence
atggccgcagcaggccagctatgtttattatatttgtcagcagggctactctccaggctgggcgcagccttcaacctggacactcgggaggacaatgttatccggaagtacggtgacccaggctctctgttcgggtttagtcttgccatgcattggcagctgcagcctgaagacaaaaggttgcttcttgtgggagctcctcgagctgaagcactgcccctacagcgcgctaacaggactggcggattatactcttgcgatataacagccagggggccttgtacaaggattgagtttgataatgacgccgatcctacaagtgagtcaaaggaggatcagtggatgggcgttaccgtacaaagccagggacctgggggtaaggttgtgacctgcgctcataggtacgagaagcgccagcacgtgaacaccaagcaggaatccagagacatctttggcagatgctacgtgctgtctcagaatctccgaattgaggatgacatggacggtggagactggtctttttgcgacggcaggctacgcggtcatgaaaaatttgggagctgtcagcagggggtcgccgctacattcaccaaagactttcattatattgtgttcggtgcacccggtacatataactggaaaggtattgtccgcgtggaacagaaaaataacactttctttgacatgaacatctttgaggatgggccatatgaggttggtggagagaccgaacatgatgaatccctcgtaccggtgccagcaaactcctatctggggttcagtctcgatagcggcaaaggaattgtctccaaggacgaaattaccttcgtgtcgggggctcctcgagccaatcatagtggggctgtggtgctgctcaagagggatatgaagtcggcacatttgctgcccgagcacatctttgacggggaggggctggcctcttccttcggatacgacgtcgctgtcgtggatcttaataaagacggttggcaggacatcgttattggcgctccacaatactttgatcgcgatggcgaggtagggggagcggtttacgtctatatgaaccaacagggacgttggaacaatgtcaagcctatccgactgaatgggacgaaagattctatgtttggcatagccgtcaaaaatattggagatataaatcaggacggctatccggacatcgctgttggtgctccttacgacgatctaggcaaggtcttcatctaccacggctccgcaaacggtattaacacgaaacctacccaggtcctgaagggcatctctccttatttcggttactcaattgccggaaacatggatttggaccgcaacagctaccctgacgtggcagtcggctccttatcagatagcgtgactatttttcgcagcaggcccgtgatcaatatccagaaaaccatcacggtgaccccaaatcgtatcgaccttcgacaaaagacagcatgcggggctccttcagggatttgtttacaggtgaagtcttgcttcgagtacaccgcgaatcctgctggctacaacccttctatatctatagtgggaacactggaggcagagaaggaacgtagaaaaagcgggctgagctcgcgggtgcagttccgaaaccaggggtcagaacccaagtatactcaagaactcacactcaagcgccagaaacagaaggtatgcatggaggaaaccctatggctgcaggacaatattagagacaaactgcggcctatccctattaccgccagcgtggaaattcaagagccaagttcaaggagacgcgttaacagccttcctgaagtcctgccaattctgaactctgacgagcccaaaactgcgcacatcgacgtccacttcctgaaggagggttgcggggatgacaatgtttgtaattcgaacttaaagctggagtacaaattttgtacgcgcgaagggaaccaggataaattttcctatctgcccattcaaaagggggtgcctgaacttgtccttaaggatcagaaagacatagcacttgagattactgtgacaaatagtcctagtaacccacgcaaccccacgaaagacggcgacgatgcacacgaagctaagctaatcgccaccttccctgacactctgacttactccgcctacagagaactccgggcttttcctgagaaacagctgagctgcgtggctaatcagaacggatctcaggccgactgtgagctgggaaatccgttcaagcggaactctaacgtgaccttttacttggttctcagcacgaccgaagttacctttgatactccagacctggatattaatctgaagttggaaactaccagtaatcaggataatctcgctccaatcacagcaaaggctaaggtagtgattgaattgctactgtcagtctccggagtcgctaagccatctcaagtgtactttggtggcaccgtggtaggcgagcaagccatgaaaagcgaggacgaagtagggtctctcattgagtacgaatttcgtgttattaacttggggaaacctctgaccaaccttgggacagccaccctgaacatacaatggccaaaagagatttctaatggaaagtggctgttgtatttggttaaggtcgaaagcaaaggattagaaaaggttacctgtgaaccacaaaaggagatcaattctctaaatttgactgagagccataactctaggaagaaacgcgagattacagaaaagcaaattgacgacaaccgcaaattcagcctgtttgccgagaggaaataccagaccctgaattgttcagtcaatgtcaattgcgtgaatatcaggtgtccattgagaggcttggactcgaaggctagcctcattctgagatctagactttggaacagcacttttctcgaagaatacagcaagctcaactaccttgacatattgatgcgtgccttcattgacgtgactgccgcagccgaaaacatccgcttgcctaacgcagggactcaggtgcgtgtgacagtctttccctccaagactgtggcacagtactcaggtgttccgtggtggataatactcgtggcgatcttggcaggcatcctcatgttagcccttttagttttcatcttgtggaagtgcggtttctttaaacgcaataaaaaggatcactacgacgccacttatcacaaggcggagattcacgcgcaacctagcgacaaggagagactgacctcggacgcttag

SEQ ID NO: 4486 - DNA, 3207 bp, Artificial Sequence
  derived and/or modified sequence
atggccgcagccggacagttgtgcctgctttacctgagcgcgggacttctttctcggctcggagccgctttcaacctggacactagagaggataacgtgatcagaaagtacggagatcccggaagcttattcggattctcacttgccatgcactggcaattacagccggaagataagcgactgctgttggtaggcgcacccagagcagaggctttaccgctccagagggctaataggacaggcggactgtatagctgcgatatcacagcgaggggtccatgtacgagaatcgaatttgataatgatgcagatcctacttctgaatccaaggaggatcagtggatgggggtgaccgtgcagagccagggtcccggaggaaaagtagtcacttgcgcacaccgctatgagaagaggcagcatgttaatacgaaacaggagtcccgagacatcttcggcagatgctatgtgctgtctcagaatcttcggatcgaggatgatatggacggaggtgactggtcgttttgcgacggcagactgcggggacatgagaaattcggctcctgccagcaaggagtggcagccacatttaccaaagacttccactatatagtgttcggcgcaccgggtacttataattggaaggggcttttgttccttacgtccgtctcttacaccgatcccgaccagttcgtttacaaaacgcgaccgcctcgagaacagcccgacacattcccagacgttatgatgaactcatacctcggattttcgctggacagcggaaaaggaatcgtttctaaggacgagataaccttcgtttccggagcacctcgagctaatcactccggtgccgtggtgctcctgaagagagacatgaagtcagcgcatcttctccctgaacacatcttcgatggtgagggactcgcgtcaagtttcggctatgacgtcgctgtagtcgatctgaataaggatggatggcaggacatcgtgattggtgctcctcagtatttcgaccgggacggtgaggtgggcggtgccgtctacgtgtacatgaaccagcagggtcgttggaacaacgtgaaaccaattcgtctgaacggcaccaaggactctatgtttggaatcgccgttaagaatatcggggatatcaaccaggacggctaccctgacatcgctgtgggcgctccctacgacgacctggggaaagttttcatttatcacggcagcgccaatgggattaataccaagcctactcaggtcctgaaggggatctccccttatttcggctacagcatcgccggtaacatggacctggaccgcaatagttaccctgatgtggctgtcggttccctgagtgactccgtgacaatttttaggtcccgacctgttatcaacattcaaaaaactatcaccgtcacaccaaatcgcattgacctgcggcagaagactgcctgcggggcaccgagtggcatatgtcttcaggtaaagtcatgtttcgaatacacggctaatcccgcaggatataaccctagcatctccatagtgggaaccctcgaagccgaaaaagaaagaaggaagtccggcctgagcagccgcgtccagttccgcaatcagggctctgaacccaaatacacccaagaattaactctgaaaaggcagaagcagaaggtgtgcatggaagaaacactttggctgcaggacaacattcgggacaagctgaggccaatcccaattaccgccagcgtggagatccaggagcctagcagcagacgcagagttaacagtcttccagaagtgctgcccattctgaattcagacgagccgaaaactgcgcatatcgatgtgcacttcctgaaggaaggatgcggtgacgacaacgtgtgcaactccaacttgaaacttgagtacaaattctgtacccgagagggaaatcaggataagttttcataccttccaatccagaaaggggtcccagaacttgttctgaaagatcagaaagacatcgcactggagatcaccgtcacaaacagcccttccaacccaagaaacccgaccaaggacggggatgatgcccatgaggcaaaactgatcgccactttcccagacactttgacgtattcagcatatagggaactgagagcttttcctgaaaagcagctgagttgtgtggccaaccagaatggtagccaagccgactgcgaactgggaaaccccttcaagagaaattcgaatgtgacgttttatctcgtgctaagcaccacggaagtcacgtttgatacacccgatctggacattaaccttaaacttgaaacaacatccaaccaggacaacctcgcccctatcactgctaaggcaaaggtcgtgatcgaactcctgctgtccgtgtctggagttgccaaaccaagccaggtgtactttggaggcacggtcgtgggtgagcaggctatgaaaagcgaggatgaggtgggatctctaatcgaatatgagttcagggtgatcaatttaggaaaacccctgaccaacctggggacagctaccctcaatatccagtggcctaaggaaataagcaacggaaaatggttactgtatctggtcaaagtagaatcaaaaggattggagaaagtgacatgcgaaccgcagaaagaaatcaatagcctgaacctcacagagtcccataatagccgcaagaagcgggaaatcacggaaaagcagattgacgacaaccgcaagttcagtctgtttgcagaaaggaaataccagaccctgaactgtagcgtcaacgtgaactgtgtcaacatcaggtgccccttacgcggattagactcaaaggctagccttattctgagaagcagactctggaactccacatttttagaggaatactcaaaactgaactacctggatatcttaatgcgggcattcatagatgtgaccgctgccgcagagaacattaggctcccaaatgctggcactcaggttagagtgactgtgttcccttccaaaacagtggcccaatacagcggggtgccctggtggatcattttggttgccatactggctggcatactcatgttagccctgttggtgtttatcttgtggaagtgtgggttctttaagcggaacaaaaaagatcattatgacgcaacataccataaagctgaaattcacgcccagccttcagacaaggaacggcttacgtcggacgcctag

SEQ ID NO: 4487 - DNA, 3339 bp, Artificial Sequence
  derived and/or modified sequence
atggcggcagcaggacagctctgtctcctctacttgagtgccggacttctgagtcgtctgggcgcagcgttcaacctcgacacacgagaggataatgtcattcggaagtacggcgatccgggatccctattcggcttctctctcgcaatgcattggcaactgcagcccgaagacaaaaggctgctactggttggagcgccaagagcggaggccttaccactgcagagagctaatcggacaggaggactgtatagctgcgatatcaccgcaaggggcccttgtacaagaatcgaatttgacaatgatgccgatccaacctcggaaagcaaggaagaccagtggatgggcgtgacggtgcagtctcaggggcctgggggaaaggtggtaacgtgcgctcatagatacgaaaagaggcagcatgtcaacactaaacaagaatccagagacatttttggaagatgctatgtcctgtctcagaacctgcggattgaggacgacatggacggaggggattggtctttttgcgatggacgccttagaggtcacgagaaatttggatcgtgccaacagggggtcgctgcaacgttcaccaaggacttccattatattgttttcggggctcctggcacctataactggaaggggatagtcagggtggaacagaagaacaacacctttttcgacatgaatatcttcgaggacggtccttacgaggtggggggagagacagagcatgatgaatcactggtgccagtgccggctaattcctatctcggactactgtttcttacctcagtgtcctacactgatccagaccagttcgtgtataagactcgccctcctcgggagcagcctgacacctttcccgacgtcatgatgaattcttacctcggcttctcactcgactccggaaagggcatcgtgtcaaaagacgagatcacttttgtatccggagcgccaagagctaatcattctggagcagtagttttgttaaagcgagacatgaaatccgcccacctgctcccagaacacatcttcgatggagaaggcctagcttcaagttttggatatgacgtggccgtggtggacttgaacaaggacgggtggcaagacatagtaattggcgctccacagtatttcgaccgggatggcgaagtcgggggagctgtgtatgtttacatgaaccagcagggacggtggaacaacgtgaaacccatccggttaaatggtacaaaggatagcatgttcggcattgccgtgaagaatattggggacattaatcaggacgggtaccctgacatcgccgtgggggctccctacgacgatttagggaaggtgtttatctatcatgggtccgctaatggaattaatacaaaaccgactcaggtgcttaaagggatttcgccatatttcggctactccattgcaggtaatatggacctggatagaaactcttatccggacgtcgccgtcggcagtctgtctgatagcgtcaccattttccgcagtaggcccgtgatcaatatccagaagactatcacagtgacacctaatagaatcgacctcaggcagaagactgcctgcggcgcaccaagcggcatttgtttgcaggtgaagagttgctttgagtacacagcaaatcccgcaggatacaacccttctatttcaatcgttggcacactcgaggctgagaaagaacggagaaaaagtggactatctagccgagtgcagtttcggaaccagggctctgaaccaaaatatacccaagagctgaccttgaagagacagaagcagaaggtgtgtatggaagagactctatggttgcaggacaacatccgggataagttgaggccaattccaatcacagcatcggtggaaatccaggagcccagcagtaggaggagggtcaatagtttacctgaagtgcttccaatacttaattctgatgagcctaaaacagctcatatcgacgtccattttctgaaggaggggtgcggcgatgacaacgtttgtaattcgaacttgaagctggagtataagttctgcacacgtgagggtaaccaagataagtttagctatttacctattcaaaaaggagtaccggagctggtgttgaaggatcagaaagacattgccctcgagataaccgtgacaaattcacccagcaatccacggaacccaactaaggacggagacgatgcgcacgaggccaaactgattgctacttttcctgacactttaacctatagtgcctaccgggaattgagggcctttcccgagaagcagctgagttgtgtcgctaaccagaacggctctcaggccgactgcgaactcgggaatccctttaagcgaaatagcaacgtaacattttacctggtgctgtcaaccactgaggtgacctttgacacacccgatctggatatcaacctgaaactggagactaccagtaatcaggataatctggcccctatcactgctaaggctaaggtggttatagaactacttctgagtgtgtccggtgtggctaagccaagccaggtgtacttcggaggaactgtggtgggagaacaggctatgaagtccgaagacgaagtggggtctctaattgagtacgagttcagagtcattaaccttgggaagccactaacaaatctcggaacagcgacccttaacattcagtggcctaaggaaatatccaacggaaagtggctcctgtacttagtgaaagtagaaagtaaagggctagagaaggtgacttgcgagccgcaaaaagagattaactctctgaacctaacagagtcccataatagcaggaagaagcgagagattaccgagaaacaaatcgacgataaccgcaagttctcacttttcgccgaaaggaagtatcagacactgaactgtagcgttaacgtgaactgtgttaacatccggtgtccgctaaggggccttgacagcaaggcatcattgattctgagaagccggctgtggaactcaaccttcttagaagagtacagtaaactgaattacctggacattctgatgcgggctttcattgacgtgacggcagcagcggaaaatatcaggttaccaaacgctggaacccaggtcagagtgacagtgttcccttcaaaaaccgtggctcagtatagcggtgttccttggtggatcatcctcgtggcaattctcgctggaattttaatgttggccttactagtgttcattttgtggaaatgtggtttctttaagcgcaacaagaaggaccactacgacgctacttatcacaaggcggagatacatgcccagccatctgataaggaacgtctaacaagcgatgcctag

SEQ ID NO: 4488 - protein, 769 aa, Artificial Sequence
  derived and/or modified sequence
MLGLRPPLLALVGLLSLGCVLSQECTKFKVSSCRECIESGPGCTWCQKLNFTGPGDPDSIRCDTRPQLLMRGCAADDIMDPTSLAETQEDHNGGQKQLSPQKVTLYLRPGQAAAFNVTFRRAKGYPIDLYYLMDLSYSMLDDLRNVKKLGGDLLRALNEITESGRIGFGSFVDKTVLPFVNTHPDKLRNPCPNKEKECQPPFAFRHVLKLTNNSNQFQTEVGKQLISGNLDAPEGGLDAMMQVAACPEEIGWRNVTRLLVFATDDGFHFAGDGKLGAILTPNDGRCHLEDNLYKRSNEFDYPSVGQLAHKLAENNIQPIFAVTSRMVKTYEKLTEIIPKSAVGELSEDSSNVVQLIKNAYNKLSSRVFLDHNALPDTLKVTYDSFCSNGVTHRNQPRGDCDGVQINVPITFQVKVTATECIQEQSFVIRALGFTDIVTVQVLPQCECRCRDQSRDRSLCHGKGFLECGICRCDTGYIGKNCECQTQGRSSQELEGSCRKDNNSIICSGLGDCVCGQCLCHTSDVPGKLIYGQYCECDTINCERYNGQVCGGPGRGLCFCGKCRCHPGFEGSACQCERTTEGCLNPRRVECSGRGRCRCNVCECHSGYQLPLCQECPGCPSPCGKYISCAECLKFEKGPFGKNCSAACPGLQLSNNPVKGRTCKERDSEGCWVAYTLEQQDGMDRYLIYVDESRECVAGPNIAAIVGGTVAGIVLIGILLLVIWKALIHLSDLREYRRFEKEKLKSQWNNDNPLFKSATTTVMNPKFAES

SEQ ID NO: 4489 - protein, 322 aa, Artificial Sequence
  derived and/or modified sequence
GRLGKDLATGVLSQECTKFKVSSCRECIESGPGCTWCQKLNFTGPGDPDSIRCDTRPQLLMRGCAADDIMDPTSLAETQEDHNGGQKQLSPQKVTLYLRPGQAAAFNVTFRRAKGYPIDLYYLMDLSYSMLDDLRNVKKLGGDLLRALNEITESGRIGFGSFVDKTVLPFVNTHPDKLRNPCPNKEKECQPPFAFRHVLKLTNNSNQFQTEVGKQLISGNLDAPEGGLDAMMQVAACPEEIGWRNVTRLLVFATDDGFHFAGDGKLGAILTPNDGRCHLEDNLYKRSNEFDYPSVGQLAHKLAENNIQPIFAVTSRMVKTYE

SEQ ID NO: 4490 - protein, 120 aa, Artificial Sequence
  derived and/or modified sequence
MLGLRPPLLALVGLLSLGCVLSQECTKFKVSSCRECIESGPGCTWCQKLNFTGPGDPDSIRCDTRPQLLMRGCAADDIMDPTSLAETQEDHNGGQKQLSPQKVTLYLRPGQAAAFNVTFR

SEQ ID NO: 4491 - protein, 70 aa, Artificial Sequence
  derived and/or modified sequence
MLGLRPPLLALVGLLSLGCVLSQECTKFKVSSCRECIESGPGCTWCQKLNFTGPGDPDSIRCDTRPQLLM

SEQ ID NO: 4492 - protein, 49 aa, Artificial Sequence
  derived and/or modified sequence
MLGLRPPLLALVGLLSLGCVLSQECTKFKVSSCRECIESGPGCTWCQKL

SEQ ID NO: 4493 - protein, 160 aa, Artificial Sequence
  derived and/or modified sequence
MLGLRPPLLALVGLLSLGCVLSQECTKFKVSSCRECIESGPGCTWCQKLNFTGPGDPDSIRCDTRPQLLMRGCAADDIMDPTSLAETQEDHNGGQKQLSPQKVTLYLRPGQAAAFNVTFRRAKGYPIDLYYLMDLSYSMLDDLRNVKKLGGDLLRALNEI

SEQ ID NO: 4494 - protein, 166 aa, Artificial Sequence
  derived and/or modified sequence
MLGLRPPLLALVGLLSLGCVLSQECTKFKVSSCRECIESGPGCTWCQKLNFTGPGDPDSIRCDTRPQLLMRGCAADDIMDPTSLAETQEDHNGGQKQLSPQKVTLYLRPGQAAAFNVTFRRAKGYPIDLYYLMDLSYSMLDDLRNVKKLGGDLLRALNEITESGRI

SEQ ID NO: 4495 - protein, 378 aa, Artificial Sequence
  derived and/or modified sequence
MLGLRPPLLALVGLLSLGCVLSQECTKFKVSSCRECIESGPGCTWCQKLNFTGPGDPDSIRCDTRPQLLMRGCAADDIMDPTSLAETQEDHNGGQKQLSPQKVTLYLRPGFGSFVDKTVLPFVNTHPDKLRNPCPNKEKECQPPFAFRHVLKLTNNSNQFQTEVGKQLISGNLDAPEGGLDAMMQVAACPEEIGWRNVTRLLVFATDDGFHFAGDGKLGAILTPNDGRCHLEDNLYKRSNEFDYPSVGQLAHKLAENNIQPIFAVTSRMVKTYEKLTEIIPKSAVGELSEDSSNVVQLIKNAYNKLSSRVFLDHNALPDTLKVTYDSFCSNGVTHRNQPRGDCDGVQINVPITFQVKVTATECIQEQSFVIGRWASRT

SEQ ID NO: 4496 - DNA, 2310 bp, Artificial Sequence
  derived and/or modified sequence
atgctgggcctgagaccccccctgctggccctggtgggcctgctgagcctgggctgcgtgctgagccaggagtgcaccaagttcaaggtgagcagctgcagagagtgcatcgagagcggccccggctgcacctggtgccagaagctgaacttcaccggccccggcgaccccgacagcatcagatgcgacaccagaccccagctgctgatgagaggctgcgccgccgacgacatcatggaccccaccagcctggccgagacccaggaggaccacaacggcggccagaagcagctgagcccccagaaggtgaccctgtacctgagacccggccaggccgccgccttcaacgtgaccttcagaagagccaagggctaccccatcgacctgtactacctgatggacctgagctacagcatgctggacgacctgagaaacgtgaagaagctgggcggcgacctgctgagagccctgaacgagatcaccgagagcggcagaatcggcttcggcagcttcgtggacaagaccgtgctgcccttcgtgaacacccaccccgacaagctgagaaacccctgccccaacaaggagaaggagtgccagccccccttcgccttcagacacgtgctgaagctgaccaacaacagcaaccagttccagaccgaggtgggcaagcagctgatcagcggcaacctggacgcccccgagggcggcctggacgccatgatgcaggtggccgcctgccccgaggagatcggctggagaaacgtgaccagactgctggtgttcgccaccgacgacggcttccacttcgccggcgacggcaagctgggcgccatcctgacccccaacgacggcagatgccacctggaggacaacctgtacaagagaagcaacgagttcgactaccccagcgtgggccagctggcccacaagctggccgagaacaacatccagcccatcttcgccgtgaccagcagaatggtgaagacctacgagaagctgaccgagatcatccccaagagcgccgtgggcgagctgagcgaggacagcagcaacgtggtgcagctgatcaagaacgcctacaacaagctgagcagcagagtgttcctggaccacaacgccctgcccgacaccctgaaggtgacctacgacagcttctgcagcaacggcgtgacccacagaaaccagcccagaggcgactgcgacggcgtgcagatcaacgtgcccatcaccttccaggtgaaggtgaccgccaccgagtgcatccaggagcagagcttcgtgatcagagccctgggcttcaccgacatcgtgaccgtgcaggtgctgccccagtgcgagtgcagatgcagagaccagagcagagacagaagcctgtgccacggcaagggcttcctggagtgcggcatctgcagatgcgacaccggctacatcggcaagaactgcgagtgccagacccagggcagaagcagccaggagctggagggcagctgcagaaaggacaacaacagcatcatctgcagcggcctgggcgactgcgtgtgcggccagtgcctgtgccacaccagcgacgtgcccggcaagctgatctacggccagtactgcgagtgcgacaccatcaactgcgagagatacaacggccaggtgtgcggcggccccggcagaggcctgtgcttctgcggcaagtgcagatgccaccccggcttcgagggcagcgcctgccagtgcgagagaaccaccgagggctgcctgaaccccagaagagtggagtgcagcggcagaggcagatgcagatgcaacgtgtgcgagtgccacagcggctaccagctgcccctgtgccaggagtgccccggctgccccagcccctgcggcaagtacatcagctgcgccgagtgcctgaagttcgagaagggccccttcggcaagaactgcagcgccgcctgccccggcctgcagctgagcaacaaccccgtgaagggcagaacctgcaaggagagagacagcgagggctgctgggtggcctacaccctggagcagcaggacggcatggacagatacctgatctacgtggacgagagcagagagtgcgtggccggccccaacatcgccgccatcgtgggcggcaccgtggccggcatcgtgctgatcggcatcctgctgctggtgatctggaaggccctgatccacctgagcgacctgagagagtacagaagattcgagaaggagaagctgaagagccagtggaacaacgacaaccccctgttcaagagcgccaccaccaccgtgatgaaccccaagttcgccgagagctag

SEQ ID NO: 4497 - DNA, 969 bp, Artificial Sequence
  derived and/or modified sequence
ggcagactgggcaaggacctggccaccggcgtgctgagccaggagtgcaccaagttcaaggtgagcagctgcagagagtgcatcgagagcggccccggctgcacctggtgccagaagctgaacttcaccggccccggcgaccccgacagcatcagatgcgacaccagaccccagctgctgatgagaggctgcgccgccgacgacatcatggaccccaccagcctggccgagacccaggaggaccacaacggcggccagaagcagctgagcccccagaaggtgaccctgtacctgagacccggccaggccgccgccttcaacgtgaccttcagaagagccaagggctaccccatcgacctgtactacctgatggacctgagctacagcatgctggacgacctgagaaacgtgaagaagctgggcggcgacctgctgagagccctgaacgagatcaccgagagcggcagaatcggcttcggcagcttcgtggacaagaccgtgctgcccttcgtgaacacccaccccgacaagctgagaaacccctgccccaacaaggagaaggagtgccagccccccttcgccttcagacacgtgctgaagctgaccaacaacagcaaccagttccagaccgaggtgggcaagcagctgatcagcggcaacctggacgcccccgagggcggcctggacgccatgatgcaggtggccgcctgccccgaggagatcggctggagaaacgtgaccagactgctggtgttcgccaccgacgacggcttccacttcgccggcgacggcaagctgggcgccatcctgacccccaacgacggcagatgccacctggaggacaacctgtacaagagaagcaacgagttcgactaccccagcgtgggccagctggcccacaagctggccgagaacaacatccagcccatcttcgccgtgaccagcagaatggtgaagacctacgagtag

SEQ ID NO: 4498 - DNA, 363 bp, Artificial Sequence
  derived and/or modified sequence
atgctgggcctgagaccccccctgctggccctggtgggcctgctgagcctgggctgcgtgctgagccaggagtgcaccaagttcaaggtgagcagctgcagagagtgcatcgagagcggccccggctgcacctggtgccagaagctgaacttcaccggccccggcgaccccgacagcatcagatgcgacaccagaccccagctgctgatgagaggctgcgccgccgacgacatcatggaccccaccagcctggccgagacccaggaggaccacaacggcggccagaagcagctgagcccccagaaggtgaccctgtacctgagacccggccaggccgccgccttcaacgtgaccttcagatag

SEQ ID NO: 4499 - DNA, 213 bp, Artificial Sequence
  derived and/or modified sequence
atgctgggcctgagaccccccctgctggccctggtgggcctgctgagcctgggctgcgtgctgagccaggagtgcaccaagttcaaggtgagcagctgcagagagtgcatcgagagcggccccggctgcacctggtgccagaagctgaacttcaccggccccggcgaccccgacagcatcagatgcgacaccagaccccagctgctgatgtag

SEQ ID NO: 4500 - DNA, 150 bp, Artificial Sequence
  derived and/or modified sequence
atgctgggcctgagaccccccctgctggccctggtgggcctgctgagcctgggctgcgtgctgagccaggagtgcaccaagttcaaggtgagcagctgcagagagtgcatcgagagcggccccggctgcacctggtgccagaagctgtag

SEQ ID NO: 4501 - DNA, 483 bp, Artificial Sequence
  derived and/or modified sequence
atgctgggcctgagaccccccctgctggccctggtgggcctgctgagcctgggctgcgtgctgagccaggagtgcaccaagttcaaggtgagcagctgcagagagtgcatcgagagcggccccggctgcacctggtgccagaagctgaacttcaccggccccggcgaccccgacagcatcagatgcgacaccagaccccagctgctgatgagaggctgcgccgccgacgacatcatggaccccaccagcctggccgagacccaggaggaccacaacggcggccagaagcagctgagcccccagaaggtgaccctgtacctgagacccggccaggccgccgccttcaacgtgaccttcagaagagccaagggctaccccatcgacctgtactacctgatggacctgagctacagcatgctggacgacctgagaaacgtgaagaagctgggcggcgacctgctgagagccctgaacgagatctag

SEQ ID NO: 4502 - DNA, 501 bp, Artificial Sequence
  derived and/or modified sequence
atgctgggcctgagaccccccctgctggccctggtgggcctgctgagcctgggctgcgtgctgagccaggagtgcaccaagttcaaggtgagcagctgcagagagtgcatcgagagcggccccggctgcacctggtgccagaagctgaacttcaccggccccggcgaccccgacagcatcagatgcgacaccagaccccagctgctgatgagaggctgcgccgccgacgacatcatggaccccaccagcctggccgagacccaggaggaccacaacggcggccagaagcagctgagcccccagaaggtgaccctgtacctgagacccggccaggccgccgccttcaacgtgaccttcagaagagccaagggctaccccatcgacctgtactacctgatggacctgagctacagcatgctggacgacctgagaaacgtgaagaagctgggcggcgacctgctgagagccctgaacgagatcaccgagagcggcagaatctag

SEQ ID NO: 4503 - DNA, 2310 bp, Artificial Sequence
  derived and/or modified sequence
atgctgggtctccggcctcccctcctggccctggtgggcttgctgtcgcttgggtgtgtgctctcccaggagtgtactaagtttaaagtgagttcttgccgggagtgtatcgagagcggccctgggtgcacctggtgccagaaattgaactttacaggaccaggggatccagattcaattcgatgtgacactcggccccagttattgatgcggggctgcgccgccgacgacatcatggaccctacttctctggccgaaacacaggaggaccacaatggaggccagaaacagctctccccacagaaggtcaccctgtaccttagaccaggacaggctgcagcctttaatgtgacgttccgtagagccaaaggctatcctattgatctgtattacctgatggatttaagctactccatgttggatgatcttaggaacgtcaagaagctggggggcgatctactcagagcactcaacgagattaccgagagcgggagaattgggttcggctcctttgtcgacaaaacagtgctgcctttcgtcaatacgcatcctgacaagctcagaaacccatgccctaacaaggaaaaagaatgtcagcctccctttgctttccggcacgtactaaagctgacaaacaactctaaccaatttcagacagaagtggggaaacagctgatcagcggtaacttggacgcccccgaaggtggcctcgatgctatgatgcaggtagcagcctgccctgaggagatcggctggaggaatgtaacccgcctgttggtgttcgccactgatgacggctttcacttcgccggggacggcaaacttggagcaatcttgacaccaaatgatggacgctgccacctcgaagacaatttgtacaagcgcagcaacgagttcgattatccaagcgtgggccagctcgcccacaaattggctgaaaacaatattcagcccatttttgccgtgacatctcgcatggttaagacctatgaaaaactaacagagatcattcctaagagcgccgtgggggaactctctgaggactcctccaacgtggtacagcttataaaaaacgcatacaacaagctcagctcacgagtgtttttggatcacaacgcattaccggatacattaaaagtaacctacgattcattttgctcaaatggtgtcacacaccgcaatcagcctaggggcgattgcgatggggttcagattaacgtgcctattactttccaggtgaaagttaccgcaactgaatgcatccaggaacaaagctttgttattagagccttgggtttcacggatatagtaacggtccaggttctcccacagtgcgagtgtcgttgccgcgaccagagcagggatcgttccttgtgtcatgggaaaggcttccttgagtgtggcatatgccgctgcgacaccggttatatcggcaagaactgtgagtgtcagacacagggccgctctagccaggagctggaggggagctgcagaaaggacaacaactccatcatttgtagtggattaggagactgcgtgtgcggccagtgcctctgtcatacatcagatgtgcctgggaagttgatctatggacagtactgtgagtgcgacaccatcaactgcgagcggtacaacggccaggtatgcggtggccctggacggggtctctgcttttgtggcaagtgtcgatgccatccgggttttgaagggtccgcctgtcagtgtgaacgaaccaccgaaggctgccttaaccctcgtcgcgtcgagtgttccgggcgcggccgatgtcggtgcaacgtctgcgagtgccactcgggataccagctgcccctgtgtcaggaatgcccaggatgcccgtctccatgcggcaaatacatttcctgtgccgagtgcctgaaattcgagaaggggccttttggcaaaaactgcagcgccgcgtgtcccggattacaattgtccaacaacccagtaaaggggaggacctgtaaagagagagattccgagggctgctgggtagcatacaccctggaacagcaggacggaatggatagataccttatatacgtggacgaatctagagagtgtgttgctggacctaacattgccgctattgtgggaggcactgtggcgggcatcgtcctcatcgggatcctgttgcttgttatttggaaggccttgatacatttatctgacctgagggagtatcgcagattcgaaaaagaaaagctgaagtctcagtggaataatgacaacccattgtttaagagcgccactactacagtgatgaatccgaaatttgcagaaagttag

SEQ ID NO: 4504 - DNA, 969 bp, Artificial Sequence
  derived and/or modified sequence
ggccgcctcggcaaagatctggccacgggagtcctcagccaggaatgcacaaaattcaaagtttcctcttgtagagagtgcattgagtcaggacccggctgcacctggtgccaaaagctcaatttcaccggacccggtgacccagacagcatacgctgcgacacgcgcccccaactgctgatgagagggtgtgcagccgacgacatcatggatcccacctccttggccgagactcaggaagatcacaatggaggacagaagcaattatctcctcagaaggtgacgctctacctgcgccccggccaggcagccgcattcaacgtaactttcaggagagccaaagggtatccgatcgatctctactatcttatggacctgtcatattccatgctggatgatttgaggaacgtgaagaaactgggcggagacctgctgcgggccttgaatgagatcactgaatctgggcgcataggctttggcagttttgtggacaaaactgtccttcccttcgtgaatacccacccagataaattgagaaacccttgccccaacaaagaaaaagaatgtcagccccccttcgcctttagacacgtgttgaaactgacgaataatagtaatcagtttcagacagaagtcggtaaacagctgatttccggcaacctagacgcgccagaaggagggctcgatgccatgatgcaggtggccgcttgccccgaggaaatcggctggagaaatgtaacaagattgctcgtattcgcaaccgatgacggctttcacttcgcgggagatggaaaattaggggcaatcctcacccccaatgacggcagatgtcacttggaagataacctgtacaagcgctctaacgagtttgactatccttccgtggggcaacttgcccataaacttgcagagaataacattcagcccattttcgccgttacctcgagaatggtgaagacatacgagtag

SEQ ID NO: 4505 - DNA, 2310 bp, Artificial Sequence
  derived and/or modified sequence
atgctggggctgagacctcctttgctcgctttagtcggcttgttaagcctgggttgcgtgctttcacaagaatgcacaaagtttaaggttagctcatgccgcgagtgcattgagtcgggccctggctgcacctggtgtcaaaagctaaacttcaccggaccaggcgacccagactccattaggtgcgacacccgacctcaactgctcatgcggggatgcgcggccgacgacatcatggatccgacttctctggccgagacacaggaggatcacaacggagggcagaaacaactgtctccgcagaaagtgacactgtatctccggcctgggcaggctgccgctttcaacgtcacattccgacgcgccaaaggatatccgatcgacctgtactatctgatggacttatcgtactcaatgcttgacgatctgagaaacgtgaaaaagctcgggggggacctgttgcgcgccctgaatgaaattacagagagcggacgcatcgggtttgggagctttgtggacaaaacagtgctgccattcgtgaacacacaccctgataaactgcggaacccttgcccaaataaggagaaggagtgccaacccccttttgctttcagacatgtcctgaaacttaccaacaacagtaatcagtttcaaacagaggtcggcaagcaactgattagcggtaatcttgacgctccagagggcggactggacgctatgatgcaggtggccgcctgcccggaggagattggatggcggaatgtcaccagactcttagtgtttgcaaccgacgacgggttccactttgccggagacggtaaacttggggccattttaacccccaacgatggtcggtgccaccttgaagacaacctgtacaaacgttcgaacgaattcgattacccatctgtggggcagctcgctcataagctggccgaaaacaacattcagcccatcttcgccgtgacaagcagaatggtgaaaacttacgaaaaattgacagagatcatacccaagagtgctgtcggggagttgagtgaggatagctcaaatgtcgttcaactgatcaaaaatgcctacaacaagctcagctctagggtgtttctcgatcacaatgccctgccggacacattaaaggtgacttatgattcgttttgctcaaatggggtcacccaccgcaaccagccccggggtgattgtgatggcgtgcagattaatgttccgataacttttcaggtgaaggtcacggcaacggagtgtattcaggagcagtccttcgtgatccgggccctaggcttcaccgacattgtgactgtacaggtactcccacagtgcgaatgccgatgccgcgaccagtcacgggataggagcctctgtcatggtaagggtttcctggagtgtggaatttgtcgctgcgatactgggtacatcggcaagaactgtgagtgccagactcaaggcaggagcagtcaggagttagaggggtcctgcagaaaggacaataatagcattatctgttctggcttaggggattgtgtgtgtgggcagtgtttatgccatacttcagacgtgcctggcaagctgatctacggccagtattgtgagtgcgacaccatcaattgcgaaaggtacaatgggcaggtatgtggcggacccggccgtggattgtgcttttgcggaaagtgccggtgccatcctgggttcgaaggttccgcgtgtcaatgcgagcggaccactgagggctgtctcaatcccagaagggtggaatgcagcggtaggggccgctgcaggtgcaacgtgtgtgaatgtcatagcggctaccagctgccattgtgtcaggaatgccctggatgcccgagtccatgtggtaagtacatctcctgcgctgaatgcctaaagtttgagaaaggcccattcgggaagaactgctcggctgcctgccccgggcttcagttgtctaacaatcctgtgaaggggcggacttgcaaggaaagggactccgaggggtgttgggtggcctacactctggaacagcaagacggaatggatcgttacttaatttatgtggacgaatcacgggaatgtgtcgccggaccaaatatcgccgccatcgtgggaggcacggtcgcgggcatcgtgctcatcggcatactactcctagtgatatggaaagcccttattcacctttccgatctgcgagaatatagaagatttgaaaaagagaaactgaagtctcagtggaacaacgacaatccgctgttcaagtccgctacaacaaccgtgatgaatccaaagttcgctgagtcttag

SEQ ID NO: 4506 - DNA, 2310 bp, Artificial Sequence
  derived and/or modified sequence
atgcttggattaagacctcctctcctggccctggtgggcctgctgtctttgggctgtgtgctgtcccaagagtgcactaagttcaaggtcagtagctgcagggagtgtatcgaatctggccctggctgtacttggtgccaaaaattgaactttacaggtccaggggatcccgactcaatcaggtgcgacaccagaccccaactgctcatgaggggatgtgccgcggacgatataatggaccccacttctctggccgaaactcaagaggaccacaatggaggacagaaacagctcagtccccagaaggtgacactttacctgcgcccaggacaggctgctgcattcaatgtgaccttcaggagggcaaagggttaccccatcgacctgtattacctcatggacctctcctattctatgctggatgatcttcgaaacgtaaagaagttgggaggggacttactgcgagctctgaatgagatcactgaaagtgggcgtatcggattcgggagctttgtcgataagaccgtgttgccgttcgtgaatacacaccccgataagcttagaaacccttgtcccaataaagagaaggaatgtcagccacctttcgccttcagacacgtgctgaagttaacaaacaatagtaatcagttccagacagaagttggtaaacagctgattagcggtaatctggacgcaccggagggcggcctggacgccatgatgcaggtggccgcctgcccagaggagatcggatggaggaacgtcacgcgcctgctcgtattcgcgaccgatgacggatttcattttgccggagacgggaaactcggcgcaattctgacaccgaatgatggccgatgtcatctcgaagacaatctgtacaaaaggagcaacgagttcgactacccatctgttgggcagctggcccataaactggctgagaataacattcagcctatctttgcagtcaccagtagaatggtgaagacttatgaaaaactgaccgagatcattcccaagtcagcagtgggggaactttcagaggacagcagtaatgtggtgcagttaatcaagaacgcgtacaacaaattgagctcccgggtgttcctggaccacaatgctcttccagataccctcaaagtcacctacgactccttctgttcgaacggggttactcatagaaaccaaccacgcggcgactgtgatggcgtccagattaacgtcccaatcactttccaagtgaaagtgactgctaccgaatgcatacaggaacagtctttcgtgatcagagcgctggggtttaccgacatcgttaccgtgcaggtgttgcctcaatgcgaatgccggtgcagggatcagtcacgagacaggtcactgtgccacgggaagggtttcctggagtgcggcatttgccggtgtgataccgggtacattgggaagaactgtgaatgccagacccagggccgatcttcccaggagctggagggttcatgtcgcaaagacaacaactcgataatctgctctggtttaggggactgcgtgtgtggccagtgcctctgccacacgtctgatgtccccgggaaactgatatatggtcagtactgcgaatgcgataccatcaactgtgaacgatataatggccaggtgtgcggtgggccaggtcgaggactgtgtttttgtggcaaatgtcgatgtcatcctggctttgagggctcggcatgccagtgtgagcgaacgaccgaagggtgcctgaacccacgccgtgtggaatgctcgggccggggcaggtgtcgatgcaacgtgtgtgagtgccacagtggatatcagctccctctgtgtcaagagtgtcccggctgtcccagtccttgtggaaaatacatctcatgcgctgagtgcctcaagtttgagaagggtcctttcggcaagaattgttccgcagcttgccccggcctgcagctgagcaataatccagtcaaaggccgtacgtgtaaggaaagagactcagagggctgttgggtcgcttataccttggaacagcaggacggaatggatcggtacctcatttacgtggatgaatcccgcgagtgcgtggctggtccgaacattgctgccatcgtgggcggcaccgttgctggaattgtactgatcgggatcctgctgctagtcatatggaaggcactcatacatctttccgatctgcgcgaataccgcagatttgagaaggaaaaactgaaatctcagtggaataatgataacccattattcaaatccgcaactactactgtcatgaaccctaagttcgctgagagttag

SEQ ID NO: 4507 - DNA, 2310 bp, Artificial Sequence
  derived and/or modified sequence
atgctcggcctgcggcctccattgctcgccctcgtcggtctcctttccttagggtgcgtcttgtcacaagagtgcaccaaatttaaggtatcttcttgtagggagtgcatagaaagcggcccaggttgcacttggtgccaaaagcttaactttacaggacctggcgaccccgatagtatcaggtgtgacactcggccacaactgttgatgcgcggttgtgctgcggatgatatcatggatccaacctccctggccgagacacaagaggaccataacggaggccaaaaacagttgtcaccccagaaagtcaccctgtatctcaggccaggacaggctgccgcctttaacgtgaccttccgtagagccaagggatacccaattgacctttattacctcatggatctgtcttatagtatgctggacgacctgcgaaatgtgaagaagctgggcggcgatttgctccgagccctcaatgagataacagaatccgggagaatagggtttgggagttttgtggataagactgtgttgccattcgtgaatacacaccccgacaagctgcggaatccctgtccaaacaaggaaaaagagtgtcagcctcctttcgcctttcgacacgtgcttaaactgaccaacaactccaatcagtttcagacggaggttggtaagcaactgatcagtgggaatctagacgccccagaaggcggactggacgcaatgatgcaagtcgccgcctgcccagaagaaatcggatggaggaacgtgactcgactgctggtttttgcaactgatgacgggttccacttcgccggtgacgggaagctgggcgccatattgactcctaacgatggcaggtgtcacctggaggacaacctctataagagatcaaatgaatttgactacccctcagttgggcaactggctcataagctcgccgagaacaatatccagcccatcttcgccgttacctcccgcatggtaaagacttacgagaagctgacagagataattcctaaatccgcggtaggcgagttgtccgaggactcttccaacgtcgtgcagcttatcaagaatgcctataacaagttgtccagtagggtgttcctggatcacaacgccctcccagacaccctgaaagtcacctacgattcattttgcagtaacggggtgacccatcggaatcagccacgcggggactgcgacggagtgcagatcaacgtccctattacatttcaggtgaaagtaacagcaactgagtgtattcaggaacaaagcttcgtgatcagggcgctgggatttaccgacatcgtaaccgtgcaggtgctcccgcagtgcgagtgccgctgtcgggatcagtctagagacaggtcactgtgccatggaaagggctttctcgagtgtggcatttgccgctgtgatactggttatataggtaagaactgcgagtgtcagacacagggaaggtcttcccaggagctggagggctcctgccgtaaggacaataatagcataatttgttccggtttgggtgattgtgtatgtgggcagtgtctttgtcacacttccgacgtgccaggtaagcttatttatggacagtattgtgagtgtgatacaatcaattgcgaacgctataacggccaggtgtgtgggggtcccggcaggggcctctgtttctgtgggaaatgccgctgtcatcctggcttcgagggtagcgcctgccagtgcgaacggacaactgagggatgtttaaaccctcgacgcgtcgagtgtagcggtagaggccggtgtcggtgcaatgtttgtgaatgccattcgggatatcagctcccattgtgtcaggagtgccccggttgccccagcccctgtggcaagtatatcagttgcgccgagtgcctgaagttcgagaaggggccctttggcaaaaactgctcagccgcatgccctggccttcagctctctaacaaccccgttaagggccgcacatgtaaagagagagattccgaaggctgctgggtcgcttacaccctcgagcaacaggatgggatggacaggtatctgatctatgtggacgagagccgtgagtgcgttgccggacccaacatcgctgcaatcgtggggggaaccgttgccgggattgtactgatcggtattctccttctggtgatctggaaggctcttatacatctttccgatctgagagaatatcgcaggttcgagaaggagaaattgaagtcccagtggaacaatgacaacccactcttcaagagcgccactactactgtgatgaacccaaagtttgccgaatcctag

SEQ ID NO: 4508 - DNA, 2310 bp, Artificial Sequence
  derived and/or modified sequence
atgctcggcctgagacctccactcctcgcacttgtcggcctgctgtccctagggtgtgtgctgagccaggagtgtaccaagtttaaggtgtccagttgtcgggaatgcattgagtccggacccggatgcacctggtgccagaagctgaactttactggaccaggagaccccgactccatcagatgtgatacacggcctcagctgctgatgagaggatgtgcggctgacgacattatggatccaacgtccctggctgagactcaggaggaccacaatgggggacagaaacaactctccccccagaaggttacactctatcttaggcctggccaagcggctgccttcaacgtgacatttcggagagcaaaaggttatcccatcgacttatactatctgatggatttgtcctatagcatgctcgacgacctccgaaatgtcaagaagctcggcggagatctccttcgcgcactcaacgaaattactgagtccgggagaatcggctttggttctttcgtagacaaaacagttctgccttttgtgaacacccatcccgataaattaagaaacccttgtcctaataaggagaaggaatgccagcctccattcgcttttagacacgtcctcaaactaactaacaactccaatcaattccagactgaagttggaaaacaactcataagcggaaatctggatgctcctgagggaggcttggatgctatgatgcaagtagccgcctgtccagaggagattggatggcgaaacgttacaagacttcttgtatttgctaccgacgatggattccatttcgcaggtgatggcaaactgggggcaatcctgactccaaacgacgggaggtgtcatcttgaagataacctgtacaagagaagtaatgaattcgattacccaagtgtgggacaattggcgcacaaactggcagagaataatatccagccgatttttgcagtgacaagtagaatggttaaaacttacgagaagctgacagagattatccctaaaagcgctgtcggggagctgtcggaggatagtagcaacgtggtccagttaatcaaaaacgcttacaacaaactgagttcccgagtgttccttgatcataacgcattgccagacacactgaaagtcacttacgatagcttctgcagtaacggggtcacccatcggaaccagccaagaggtgattgtgatggcgtgcaaattaatgtgccaattacttttcaggttaaggttacagctacagagtgtatacaagaacagtcctttgtgattagggccctaggcttcacagacatagtgacggtacaagtcctgccccagtgcgagtgcaggtgtagggatcaaagtagggatagatccctgtgccacggaaagggctttctggagtgcggcatctgccgctgtgacacaggatatataggcaagaactgcgagtgccagacacagggcaggtcctctcaagagctcgaagggtcttgtagaaaggacaacaatagcattatatgctcggggctcggggattgcgtgtgcggccagtgcctgtgccatacatctgatgtccccggcaagttgatatacggccagtactgtgagtgtgacactatcaactgcgaaaggtataatggccaggtgtgtgggggcccaggtaggggcctttgcttctgcggaaagtgcagatgccaccctggttttgagggatcagcctgtcagtgtgaacgaaccaccgaggggtgcctgaacccaagacgggtggagtgttccggcaggggcagatgtcgttgtaacgtatgtgaatgtcacagcggctaccagctgcccctgtgccaagaatgtcctggctgtcccagtccatgtgggaagtatattagctgcgcagaatgccttaaattcgagaaaggccccttcgggaaaaattgcagcgcagcatgtcccgggctacagctgagcaacaaccctgtcaaaggacgcacatgtaaggaacgggattcagagggatgttgggttgcttacacgctcgaacagcaggacgggatggaccgttacctgatctatgtggatgagtcccgcgagtgcgttgccggaccaaatatcgctgcaatcgttggcggaactgtcgccggaatagtgttaattggaattttgctgctcgtgatatggaaagcattaatccatctgagcgacctacgagagtatcggcggttcgagaaggaaaagctcaaatcacaatggaacaacgataacccgctctttaaatctgcaaccaccaccgtgatgaatcctaaatttgccgaaagctag

SEQ ID NO: 4509 - DNA, 363 bp, Artificial Sequence
  derived and/or modified sequence
atgcttgggctgagaccccccctgctggcgctagttggactgcttagtctgggatgtgtgctctctcaggaatgtactaagtttaaagtgtcctcctgtcgagagtgcattgagagcgggcccggatgcacatggtgtcaaaagcttaactttaccggccccggagaccccgatagtatcaggtgcgacacccggcctcaactactgatgagaggatgcgctgcggatgacatcatggacccgacctctctggctgagactcaagaggaccataacggagggcagaagcaactgtcacctcagaaagtgaccctgtacctgcggcccggacaagctgccgctttcaatgtgacattcaggtag

SEQ ID NO: 4510 - DNA, 213 bp, Artificial Sequence
  derived and/or modified sequence
atgctaggattgcgcccacctctgcttgcactcgtcggtctgctcagcctgggatgcgtcctctcgcaagaatgcactaagtttaaagtgtcttcctgtcgcgaatgtatcgagagtggccccggctgcacctggtgtcaaaaactaaacttcacgggccccggagatccagacagcatccgatgcgatacacgaccacagctactgatgtag

SEQ ID NO: 4511 - DNA, 150 bp, Artificial Sequence
  derived and/or modified sequence
atgctgggcctgcggccgcccctcttggcgctggtaggtttgctctccctgggatgcgtgctgtcacaagagtgtactaagttcaaagtgtcctcttgccgagagtgcatagagagcggccctgggtgcacctggtgtcaaaaactctag

SEQ ID NO: 4512 - DNA, 483 bp, Artificial Sequence
  derived and/or modified sequence
atgctgggtctgcgaccaccactgctcgccctagtgggcttgctgtcacttggctgcgttctctctcaggaatgcacgaaattcaaggtttcctcgtgcagagagtgtatcgagtcgggaccgggatgtacttggtgccagaagctcaattttacgggccccggcgatcctgattccatacgctgcgatacacgaccccagttgctgatgcgagggtgcgccgcggatgacataatggatcccacatcgctcgctgagactcaggaagaccacaatggtggtcagaagcagcttagcccccaaaaggtaactttgtaccttcggccagggcaagctgccgcctttaacgtaacctttcggcgcgccaaggggtaccctatcgatttgtactacttgatggacctctcttactccatgcttgacgatctgcgaaatgtcaaaaaacttggaggcgatttgcttcgcgccttaaacgagatctag

SEQ ID NO: 4513 - DNA, 501 bp, Artificial Sequence
  derived and/or modified sequence
atgctggggctgcgaccaccactgctggccctggttggcctcctgtcacttgggtgtgttctctctcaggagtgtacgaagttcaaagtttccagttgtagagagtgcatcgaatccgggccagggtgtacctggtgtcagaaattaaactttacaggacccggcgaccccgacagcatccggtgcgacacccggcctcagctgctaatgaggggatgtgccgccgatgatatcatggatcccaccagcctggccgaaacccaggaagaccataatggcggccaaaagcaattgtcccctcagaaagtcacgctttatctccgtcccggccaggccgccgccttcaacgtgaccttcaggagggcgaagggctacccaattgacctttactatctgatggatttgtcgtactcaatgctcgatgatcttagaaatgtgaaaaagctgggcggagatttactgagggcactgaacgagattacagagtcaggaagaatctag

SEQ ID NO: 4514 - DNA, 2310 bp, Artificial Sequence
  derived and/or modified sequence
atgctgggcctgcggccccccctgctggccctggtgggcctgctgagcctgggctgtgtgctgagccaggagtgcaccaagttcaaggtgagcagctgcagagaatgtattgaaagtggccctggctgcacctggtgccagaagctgaacttcaccggccctggggaccctgacagcatccgctgtgacacccggccccagctgctgatgaggggctgtgccgcagatgacatcatggaccccaccagcctggccgagacccaggaggaccacaacggcggccagaagcagctgagcccccagaaggtgaccctgtacctgcggcccggccaggccgccgccttcaacgtgaccttccggcgggccaagggctaccccatcgacctgtactacctgatggacctgagctacagcatgctggatgacctgagaaatgtgaagaagctgggcggggacctgctgcgggccctgaatgagatcacagaaagtggccgcatcggcttcggcagctttgtggacaagacagtgctgccctttgtgaacacccacccagacaagctgaggaacccctgccccaacaaggagaaggagtgccagcccccatttgccttccgccacgtgctgaagctgaccaacaacagcaaccagttccagacagaggtgggcaagcagctgatcagcggcaacctggatgcccctgagggcggcctggatgccatgatgcaggtggccgcctgcccagaggagatcggctggagaaatgtgacccggctgctggtgtttgccacagatgatggcttccactttgctggagatggcaagctgggcgccatcctgaccccaaatgatggccgctgccacctggaggacaacctgtacaagaggagcaatgaatttgactaccccagcgtgggccagctggcccacaagctggccgagaacaacatccagcccatctttgctgtgaccagcaggatggtgaagacctatgagaagctgacagagatcatccccaagtctgctgtgggggagctgtctgaggacagcagcaatgtggtgcagctgatcaagaatgcctacaacaagctgagcagcagggtcttcctggaccacaatgccctgcctgacaccctgaaggtgacctatgacagcttctgcagcaatggagtgacccacaggaaccagcccaggggggactgtgatggagtgcagatcaacgtgcccatcaccttccaggtgaaggtgacagccacagagtgcatccaggagcagagctttgtgatccgggccctgggcttcacagacatcgtgacagtgcaggtgctgccccagtgtgagtgccgctgccgggaccagagccgggacaggagcctgtgccacggcaagggcttcctggagtgtggcatctgccgctgtgacaccggctacatcggcaagaactgtgagtgccagacccagggccgcagcagccaggagctggagggcagctgcaggaaggacaacaacagcatcatctgcagcggcctgggggactgtgtgtgtggccagtgcctgtgccacaccagtgatgtgcctgggaagctgatctacggccagtactgtgaatgtgacaccatcaactgtgagcgctacaacggccaggtgtgtggcggccctggccggggcctgtgcttctgtgggaaatgtcgctgccaccctggctttgagggcagcgcctgccagtgtgagaggaccacagagggctgcctgaacccccggcgggtggagtgcagcggccggggccgctgccgctgcaatgtgtgtgagtgccacagcggctaccagctgcccctgtgccaggagtgccccggctgccccagcccctgtgggaagtacatcagctgtgccgagtgcctgaagtttgagaagggcccctttgggaagaactgcagcgctgcctgccccggcctgcagctgagcaacaaccctgtgaagggccgcacctgcaaggagcgggacagcgagggctgctgggtggcctacaccctggagcagcaggacggcatggaccgctacctgatctacgtggatgagagccgggagtgtgtggccggccccaacattgctgccatcgtgggcggcaccgtggccggcatcgtgctgattggcatcctgctgctggtgatctggaaggccctgatccacctgagtgacctgcgggagtaccgccgctttgagaaggagaagctgaagagccagtggaacaatgacaaccccctcttcaagagcgccaccaccaccgtgatgaaccccaagtttgctgagagctag

SEQ ID NO: 4515 - DNA, 969 bp, Artificial Sequence
  derived and/or modified sequence
ggccgcctgggcaaggacctggccactggagtgctgagccaggagtgcaccaagttcaaggtgagcagctgccgggagtgcatcgagagcggccctggctgcacctggtgccagaagctgaacttcaccggccctggggaccctgacagcatccgctgtgacacccggccccagctgctgatgaggggctgtgccgcagatgacatcatggaccccaccagcctggccgagacccaggaggaccacaatggaggccagaagcagctgagcccccagaaggtgaccctgtacctgcggcccggccaggccgccgccttcaacgtgaccttcagaagagccaagggctaccccatcgacctgtactacctgatggacctgagctacagcatgctggatgacctgagaaatgtgaagaagctgggcggggacctgctgcgggccctgaatgagatcacagagagcggcagaattggatttggcagctttgtggacaagacagtgctgccctttgtgaacacccacccagacaagctgaggaacccctgccccaacaaggagaaggagtgccagcccccatttgccttcagacatgtgctgaagctgaccaacaacagcaaccagttccagacagaggtgggcaagcagctgatcagcggcaacctggatgcccctgagggcggcctggatgccatgatgcaggtggccgcctgcccagaggagatcggctggagaaatgtgacccggctgctggtgtttgccacagatgatggcttccactttgctggagatggcaagctgggcgccatcctgaccccaaatgatggccgctgccacctggaggacaacctgtacaagaggagcaatgaatttgactaccccagcgtgggccagctggcccacaagctggccgagaacaacatccagcccatctttgctgtgaccagcaggatggtgaagacctatgaatag

SEQ ID NO: 4516 - DNA, 363 bp, Artificial Sequence
  derived and/or modified sequence
atgctgggcctgcggccccccctgctggccctggtgggcctgctgagcctgggctgtgtgctgagccaggagtgcaccaagttcaaggtgagcagctgcagagaatgtattgaaagtggccctggctgcacctggtgccagaagctgaacttcaccggccctggggaccctgacagcatccgctgtgacacccggccccagctgctgatgaggggctgtgccgcagatgacatcatggaccccaccagcctggccgagacccaggaggaccacaacggcggccagaagcagctgagcccccagaaggtgaccctgtacctgcggcccggccaggccgccgccttcaacgtgaccttcagatag

SEQ ID NO: 4517 - DNA, 213 bp, Artificial Sequence
  derived and/or modified sequence
atgctgggcctgcggccccccctgctggccctggtgggcctgctgagcctgggctgtgtgctgagccaggagtgcaccaagttcaaggtgagcagctgcagagaatgtattgaaagtggccctggctgcacctggtgccagaagctgaacttcaccggccctggggaccctgacagcatccgctgtgacacccggccccagctgctgatgtag

SEQ ID NO: 4518 - DNA, 150 bp, Artificial Sequence
  derived and/or modified sequence
atgctgggcctgcggccccccctgctggccctggtgggcctgctgagcctgggctgtgtgctgagccaggagtgcaccaagttcaaggtgagcagctgcagagaatgtattgaaagtggccctggctgcacctggtgccagaagctgtag

SEQ ID NO: 4519 - DNA, 483 bp, Artificial Sequence
  derived and/or modified sequence
atgctgggcctgcggccccccctgctggccctggtgggcctgctgagcctgggctgtgtgctgagccaggagtgcaccaagttcaaggtgagcagctgcagagaatgtattgaaagtggccctggctgcacctggtgccagaagctgaacttcaccggccctggggaccctgacagcatccgctgtgacacccggccccagctgctgatgaggggctgtgccgcagatgacatcatggaccccaccagcctggccgagacccaggaggaccacaacggcggccagaagcagctgagcccccagaaggtgaccctgtacctgcggcccggccaggccgccgccttcaacgtgaccttccggcgggccaagggctaccccatcgacctgtactacctgatggacctgagctacagcatgctggatgacctgagaaatgtgaagaagctgggcggggacctgctgcgggccctgaatgagatctag

SEQ ID NO: 4520 - DNA, 501 bp, Artificial Sequence
  derived and/or modified sequence
atgctgggcctgcggccccccctgctggccctggtgggcctgctgagcctgggctgtgtgctgagccaggagtgcaccaagttcaaggtgagcagctgcagagaatgtattgaaagtggccctggctgcacctggtgccagaagctgaacttcaccggccctggggaccctgacagcatccgctgtgacacccggccccagctgctgatgaggggctgtgccgcagatgacatcatggaccccaccagcctggccgagacccaggaggaccacaacggcggccagaagcagctgagcccccagaaggtgaccctgtacctgcggcccggccaggccgccgccttcaacgtgaccttccggcgggccaagggctaccccatcgacctgtactacctgatggacctgagctacagcatgctggatgacctgagaaatgtgaagaagctgggcggggacctgctgcgggccctgaatgagatcacagaaagtggccgcatctag

SEQ ID NO: 4521 - DNA, 2955 bp, Artificial Sequence
  derived and/or modified sequence
gggccgctctctgacatcagagctgctgtagagcggagaggggcaggggtgaagggccacggtggtgcaacccaccacttcctccaaggaggagctgagaggaacaggaagtgtcaggactttacgacccgcgcctccagctgaggtttctagacgtgacccagggcagactggtagcaaagcccccacgcccagccaggagcaccgccgaggactccagcacaccgagggacatgctgggcctgcgccccccactgctcgccctggtggggctgctctccctcgggtgcgtcctctctcaggagtgcacgaagttcaaggtcagcagctgccgggaatgcatcgagtcggggcccggctgcacctggtgccagaagctgaacttcacagggccgggggatcctgactccattcgctgcgacacccggccacagctgctcatgaggggctgtgcggctgacgacatcatggaccccacaagcctcgctgaaacccaggaagaccacaatgggggccagaagcagctgtccccacaaaaagtgacgctttacctgcgaccaggccaggcagcagcgttcaacgtgaccttccggcgggccaagggctaccccatcgacctgtactatctgatggacctctcctactccatgcttgatgacctcaggaatgtcaagaagctaggtggcgacctgctccgggccctcaacgagatcaccgagtccggccgcattggcttcgggtccttcgtggacaagaccgtgctgccgttcgtgaacacgcaccctgataagctgcgaaacccatgccccaacaaggagaaagagtgccagcccccgtttgccttcaggcacgtgctgaagctgaccaacaactccaaccagtttcagaccgaggtcgggaagcagctgatttccggaaacctggatgcacccgagggtgggctggacgccatgatgcaggtcgccgcctgcccggaggaaatcggctggcgcaacgtcacgcggctgctggtgtttgccactgatgacggcttccatttcgcgggcgacgggaagctgggcgccatcctgacccccaacgacggccgctgtcacctggaggacaacttgtacaagaggagcaacgaattcgactacccatcggtgggccagctggcgcacaagctggctgaaaacaacatccagcccatcttcgcggtgaccagtaggatggtgaagacctacgagaaactcaccgagatcatccccaagtcagccgtgggggagctgtctgaggactccagcaatgtggtccaactcattaagaatgcttacaataaactctcctccagggtcttcctggatcacaacgccctccccgacaccctgaaagtcacctacgactccttctgcagcaatggagtgacgcacaggaaccagcccagaggtgactgtgatggcgtgcagatcaatgtcccgatcaccttccaggtgaaggtcacggccacagagtgcatccaggagcagtcgtttgtcatccgggcgctgggcttcacggacatagtgaccgtgcaggttcttccccagtgtgagtgccggtgccgggaccagagcagagaccgcagcctctgccatggcaagggcttcttggagtgcggcatctgcaggtgtgacactggctacattgggaaaaactgtgagtgccagacacagggccggagcagccaggagctggaaggaagctgccggaaggacaacaactccatcatctgctcagggctgggggactgtgtctgcgggcagtgcctgtgccacaccagcgacgtccccggcaagctgatatacgggcagtactgcgagtgtgacaccatcaactgtgagcgctacaacggccaggtctgcggcggcccggggagggggctctgcttctgcgggaagtgccgctgccacccgggctttgagggctcagcgtgccagtgcgagaggaccactgagggctgcctgaacccgcggcgtgttgagtgtagtggtcgtggccggtgccgctgcaacgtatgcgagtgccattcaggctaccagctgcctctgtgccaggagtgccccggctgcccctcaccctgtggcaagtacatctcctgcgccgagtgcctgaagttcgaaaagggcccctttgggaagaactgcagcgcggcgtgtccgggcctgcagctgtcgaacaaccccgtgaagggcaggacctgcaaggagagggactcagagggctgctgggtggcctacacgctggagcagcaggacgggatggaccgctacctcatctatgtggatgagagccgagagtgtgtggcaggccccaacatcgccgccatcgtcgggggcaccgtggcaggcatcgtgctgatcggcattctcctgctggtcatctggaaggctctgatccacctgagcgacctccgggagtacaggcgctttgagaaggagaagctcaagtcccagtggaacaatgataatccccttttcaagagcgccaccacgacggtcatgaaccccaagtttgctgagagttaggagcacttggtgaagacaaggccgtcaggacccaccatgtctgccccatcacgcggccgagacatggcttgccacagctcttgaggatgtcaccaattaaccagaaatccagttattttccgccctcaaaatgacagccatggccggccgggtgcttctgggggctcgtcggggggacagctccactctgactggcacagtctttgcatggagacttgaggagggagggcttgaggttggtgaggttaggtgcgtgtttcctgtgcaagtcaggacatcagtctgattaaaggtggtgccaatttatttacatttaaacttgtcagggtataaaatgacatcccattaattatattgttaatcaatcacgtgtatagaaaaaaaataaaacttcaatacaggctgtccatgg

SEQ ID NO: 4522 - DNA, 966 bp, Artificial Sequence
  derived and/or modified sequence
gggaggctggggaaggaccttgccactggggtcctctctcaggagtgcacgaagttcaaggtcagcagctgccgggaatgcatcgagtcggggcccggctgcacctggtgccagaagctgaacttcacagggccgggggatcctgactccattcgctgcgacacccggccacagctgctcatgaggggctgtgcggctgacgacatcatggaccccacaagcctcgctgaaacccaggaagaccacaatgggggccagaagcagctgtccccacaaaaagtgacgctttacctgcgaccaggccaggcagcagcgttcaacgtgaccttccggcgggccaagggctaccccatcgacctgtactatctgatggacctctcctactccatgcttgatgacctcaggaatgtcaagaagctaggtggcgacctgctccgggccctcaacgagatcaccgagtccggccgcattggcttcgggtccttcgtggacaagaccgtgctgccgttcgtgaacacgcaccctgataagctgcgaaacccatgccccaacaaggagaaagagtgccagcccccgtttgccttcaggcacgtgctgaagctgaccaacaactccaaccagtttcagaccgaggtcgggaagcagctgatttccggaaacctggatgcacccgagggtgggctggacgccatgatgcaggtcgccgcctgcccggaggaaatcggctggcgcaacgtcacgcggctgctggtgtttgccactgatgacggcttccatttcgcgggcgacgggaagctgggcgccatcctgacccccaacgacggccgctgtcacctggaggacaacttgtacaagaggagcaacgaattcgactacccatcggtgggccagctggcgcacaagctggctgaaaacaacatccagcccatcttcgcggtgaccagtaggatggtgaagacctacgag

SEQ ID NO: 4523 - DNA, 2913 bp, Artificial Sequence
  derived and/or modified sequence
atccagggtgaggaaggcagcccacacttttcttggagacacatccccaaagaagtcctcacgtggctccgtttgggcagaaaccatgaattgaacgggaaaagaaatatgtcaagtatcagaaagaagagtggcatgctttgacagcaagtggactccgagtccagggcagagcctcagttagggacatgctgggcctgcgccccccactgctcgccctggtggggctgctctccctcgggtgcgtcctctctcaggagtgcacgaagttcaaggtcagcagctgccgggaatgcatcgagtcggggcccggctgcacctggtgccagaagctgaacttcacagggccgggggatcctgactccattcgctgcgacacccggccacagctgctcatgaggggctgtgcggctgacgacatcatggaccccacaagcctcgctgaaacccaggaagaccacaatgggggccagaagcagctgtccccacaaaaagtgacgctttacctgcgaccaggccaggcagcagcgttcaacgtgaccttccggcgggccaagggctaccccatcgacctgtactatctgatggacctctcctactccatgcttgatgacctcaggaatgtcaagaagctaggtggcgacctgctccgggccctcaacgagatcaccgagtccggccgcattggcttcgggtccttcgtggacaagaccgtgctgccgttcgtgaacacgcaccctgataagctgcgaaacccatgccccaacaaggagaaagagtgccagcccccgtttgccttcaggcacgtgctgaagctgaccaacaactccaaccagtttcagaccgaggtcgggaagcagctgatttccggaaacctggatgcacccgagggtgggctggacgccatgatgcaggtcgccgcctgcccggaggaaatcggctggcgcaacgtcacgcggctgctggtgtttgccactgatgacggcttccatttcgcgggcgacgggaagctgggcgccatcctgacccccaacgacggccgctgtcacctggaggacaacttgtacaagaggagcaacgaattcgactacccatcggtgggccagctggcgcacaagctggctgaaaacaacatccagcccatcttcgcggtgaccagtaggatggtgaagacctacgagaaactcaccgagatcatccccaagtcagccgtgggggagctgtctgaggactccagcaatgtggtccaactcattaagaatgcttacaataaactctcctccagggtcttcctggatcacaacgccctccccgacaccctgaaagtcacctacgactccttctgcagcaatggagtgacgcacaggaaccagcccagaggtgactgtgatggcgtgcagatcaatgtcccgatcaccttccaggtgaaggtcacggccacagagtgcatccaggagcagtcgtttgtcatccgggcgctgggcttcacggacatagtgaccgtgcaggttcttccccagtgtgagtgccggtgccgggaccagagcagagaccgcagcctctgccatggcaagggcttcttggagtgcggcatctgcaggtgtgacactggctacattgggaaaaactgtgagtgccagacacagggccggagcagccaggagctggaaggaagctgccggaaggacaacaactccatcatctgctcagggctgggggactgtgtctgcgggcagtgcctgtgccacaccagcgacgtccccggcaagctgatatacgggcagtactgcgagtgtgacaccatcaactgtgagcgctacaacggccaggtctgcggcggcccggggagggggctctgcttctgcgggaagtgccgctgccacccgggctttgagggctcagcgtgccagtgcgagaggaccactgagggctgcctgaacccgcggcgtgttgagtgtagtggtcgtggccggtgccgctgcaacgtatgcgagtgccattcaggctaccagctgcctctgtgccaggagtgccccggctgcccctcaccctgtggcaagtacatctcctgcgccgagtgcctgaagttcgaaaagggcccctttgggaagaactgcagcgcggcgtgtccgggcctgcagctgtcgaacaaccccgtgaagggcaggacctgcaaggagagggactcagagggctgctgggtggcctacacgctggagcagcaggacgggatggaccgctacctcatctatgtggatgagagccgagagtgtgtggcaggccccaacatcgccgccatcgtcgggggcaccgtggcaggcatcgtgctgatcggcattctcctgctggtcatctggaaggctctgatccacctgagcgacctccgggagtacaggcgctttgagaaggagaagctcaagtcccagtggaacaatgataatccccttttcaagagcgccaccacgacggtcatgaaccccaagtttgctgagagttaggagcacttggtgaagacaaggccgtcaggacccaccatgtctgccccatcacgcggccgagacatggcttgccacagctcttgaggatgtcaccaattaaccagaaatccagttattttccgccctcaaaatgacagccatggccggccgggtgcttctgggggctcgtcggggggacagctccactctgactggcacagtctttgcatggagacttgaggagggagggcttgaggttggtgaggttaggtgcgtgtttcctgtgcaagtcaggacatcagtctgattaaaggtggtgccaatttatttacatttaaacttgtcagggtataaaatgacatcccattaattatattgttaatcaatcacgtgtatagaaaaaaaataaaacttcaatacaggctgtccatggaaa

SEQ ID NO: 4524 - DNA, 3178 bp, Artificial Sequence
  derived and/or modified sequence
acaggcatccagggtgaggaaggctgcccacaggcatccagggtgaggaaggcagcccacacttttcttggagacacatccccaaagaagtcctcacgtggctccgtttgggcagaaaccatgaattgaacgggaaaagaaatatgtcaagtatcagaaagaagagtggcatgctttgacagcaagtggactccgagtccagggcagagcctcagttagggggccgctctctgacatcagagctgctgtagagcggagaggggcaggggtgaagggccacggtggtgcaacccaccacttcctccaaggaggagctgagaggaacaggaagtgtcaggactttacgacccgcgcctccagctgaggtttctagacgtgacccagggcagactggtagcaaagcccccacgcccagccaggagcaccgccgaggactccagcacaccgagggacatgctgggcctgcgccccccactgctcgccctggtggggctgctctccctcgggtgcgtcctctctcaggagtgcacgaagttcaaggtcagcagctgccgggaatgcatcgagtcggggcccggctgcacctggtgccagaagctgaacttcacagggccgggggatcctgactccattcgctgcgacacccggccacagctgctcatgaggggctgtgcggctgacgacatcatggaccccacaagcctcgctgaaacccaggaagaccacaatgggggccagaagcagctgtccccacaaaaagtgacgctttacctgcgaccaggccaggcagcagcgttcaacgtgaccttccggcgggccaagggctaccccatcgacctgtactatctgatggacctctcctactccatgcttgatgacctcaggaatgtcaagaagctaggtggcgacctgctccgggccctcaacgagatcaccgagtccggccgcattggcttcgggtccttcgtggacaagaccgtgctgccgttcgtgaacacgcaccctgataagctgcgaaacccatgccccaacaaggagaaagagtgccagcccccgtttgccttcaggcacgtgctgaagctgaccaacaactccaaccagtttcagaccgaggtcgggaagcagctgatttccggaaacctggatgcacccgagggtgggctggacgccatgatgcaggtcgccgcctgcccggaggaaatcggctggcgcaacgtcacgcggctgctggtgtttgccactgatgacggcttccatttcgcgggcgacgggaagctgggcgccatcctgacccccaacgacggccgctgtcacctggaggacaacttgtacaagaggagcaacgaattcgactacccatcggtgggccagctggcgcacaagctggctgaaaacaacatccagcccatcttcgcggtgaccagtaggatggtgaagacctacgagaaactcaccgagatcatccccaagtcagccgtgggggagctgtctgaggactccagcaatgtggtccaactcattaagaatgcttacaataaactctcctccagggtcttcctggatcacaacgccctccccgacaccctgaaagtcacctacgactccttctgcagcaatggagtgacgcacaggaaccagcccagaggtgactgtgatggcgtgcagatcaatgtcccgatcaccttccaggtgaaggtcacggccacagagtgcatccaggagcagtcgtttgtcatccgggcgctgggcttcacggacatagtgaccgtgcaggttcttccccagtgtgagtgccggtgccgggaccagagcagagaccgcagcctctgccatggcaagggcttcttggagtgcggcatctgcaggtgtgacactggctacattgggaaaaactgtgagtgccagacacagggccggagcagccaggagctggaaggaagctgccggaaggacaacaactccatcatctgctcagggctgggggactgtgtctgcgggcagtgcctgtgccacaccagcgacgtccccggcaagctgatatacgggcagtactgcgagtgtgacaccatcaactgtgagcgctacaacggccaggtctgcggcggcccggggagggggctctgcttctgcgggaagtgccgctgccacccgggctttgagggctcagcgtgccagtgcgagaggaccactgagggctgcctgaacccgcggcgtgttgagtgtagtggtcgtggccggtgccgctgcaacgtatgcgagtgccattcaggctaccagctgcctctgtgccaggagtgccccggctgcccctcaccctgtggcaagtacatctcctgcgccgagtgcctgaagttcgaaaagggcccctttgggaagaactgcagcgcggcgtgtccgggcctgcagctgtcgaacaaccccgtgaagggcaggacctgcaaggagagggactcagagggctgctgggtggcctacacgctggagcagcaggacgggatggaccgctacctcatctatgtggatgagagccgagagtgtgtggcaggccccaacatcgccgccatcgtcgggggcaccgtggcaggcatcgtgctgatcggcattctcctgctggtcatctggaaggctctgatccacctgagcgacctccgggagtacaggcgctttgagaaggagaagctcaagtcccagtggaacaatgataatccccttttcaagagcgccaccacgacggtcatgaaccccaagtttgctgagagttaggagcacttggtgaagacaaggccgtcaggacccaccatgtctgccccatcacgcggccgagacatggcttgccacagctcttgaggatgtcaccaattaaccagaaatccagttattttccgccctcaaaatgacagccatggccggccgggtgcttctgggggctcgtcggggggacagctccactctgactggcacagtctttgcatggagacttgaggagggagggcttgaggttggtgaggttaggtgcgtgtttcctgtgcaagtcaggacatcagtctgattaaaggtggtgccaatttatttacatttaaacttgtcagggtataaaatgacatcccattaattatattgttaatcaatcacgtgtatagaaaaaaaataaaacttcaatacaggctgtccatggaaa

SEQ ID NO: 4525 - DNA, 2769 bp, Artificial Sequence
  derived and/or modified sequence
gttgggcctgagaccgtcaccaagaccccttccctccacaggacatgctgggcctgcgccccccactgctcgccctggtggggctgctctccctcgggtgcgtcctctctcaggagtgcacgaagttcaaggtcagcagctgccgggaatgcatcgagtcggggcccggctgcacctggtgccagaagctgaacttcacagggccgggggatcctgactccattcgctgcgacacccggccacagctgctcatgaggggctgtgcggctgacgacatcatggaccccacaagcctcgctgaaacccaggaagaccacaatgggggccagaagcagctgtccccacaaaaagtgacgctttacctgcgaccaggccaggcagcagcgttcaacgtgaccttccggcgggccaagggctaccccatcgacctgtactatctgatggacctctcctactccatgcttgatgacctcaggaatgtcaagaagctaggtggcgacctgctccgggccctcaacgagatcaccgagtccggccgcattggcttcgggtccttcgtggacaagaccgtgctgccgttcgtgaacacgcaccctgataagctgcgaaacccatgccccaacaaggagaaagagtgccagcccccgtttgccttcaggcacgtgctgaagctgaccaacaactccaaccagtttcagaccgaggtcgggaagcagctgatttccggaaacctggatgcacccgagggtgggctggacgccatgatgcaggtcgccgcctgcccggaggaaatcggctggcgcaacgtcacgcggctgctggtgtttgccactgatgacggcttccatttcgcgggcgacgggaagctgggcgccatcctgacccccaacgacggccgctgtcacctggaggacaacttgtacaagaggagcaacgaattcgactacccatcggtgggccagctggcgcacaagctggctgaaaacaacatccagcccatcttcgcggtgaccagtaggatggtgaagacctacgagaaactcaccgagatcatccccaagtcagccgtgggggagctgtctgaggactccagcaatgtggtccaactcattaagaatgcttacaataaactctcctccagggtcttcctggatcacaacgccctccccgacaccctgaaagtcacctacgactccttctgcagcaatggagtgacgcacaggaaccagcccagaggtgactgtgatggcgtgcagatcaatgtcccgatcaccttccaggtgaaggtcacggccacagagtgcatccaggagcagtcgtttgtcatccgggcgctgggcttcacggacatagtgaccgtgcaggttcttccccagtgtgagtgccggtgccgggaccagagcagagaccgcagcctctgccatggcaagggcttcttggagtgcggcatctgcaggtgtgacactggctacattgggaaaaactgtgagtgccagacacagggccggagcagccaggagctggaaggaagctgccggaaggacaacaactccatcatctgctcagggctgggggactgtgtctgcgggcagtgcctgtgccacaccagcgacgtccccggcaagctgatatacgggcagtactgcgagtgtgacaccatcaactgtgagcgctacaacggccaggtctgcggcggcccggggagggggctctgcttctgcgggaagtgccgctgccacccgggctttgagggctcagcgtgccagtgcgagaggaccactgagggctgcctgaacccgcggcgtgttgagtgtagtggtcgtggccggtgccgctgcaacgtatgcgagtgccattcaggctaccagctgcctctgtgccaggagtgccccggctgcccctcaccctgtggcaagtacatctcctgcgccgagtgcctgaagttcgaaaagggcccctttgggaagaactgcagcgcggcgtgtccgggcctgcagctgtcgaacaaccccgtgaagggcaggacctgcaaggagagggactcagagggctgctgggtggcctacacgctggagcagcaggacgggatggaccgctacctcatctatgtggatgagagccgagagtgtgtggcaggccccaacatcgccgccatcgtcgggggcaccgtggcaggcatcgtgctgatcggcattctcctgctggtcatctggaaggctctgatccacctgagcgacctccgggagtacaggcgctttgagaaggagaagctcaagtcccagtggaacaatgataatccccttttcaagagcgccaccacgacggtcatgaaccccaagtttgctgagagttaggagcacttggtgaagacaaggccgtcaggacccaccatgtctgccccatcacgcggccgagacatggcttgccacagctcttgaggatgtcaccaattaaccagaaatccagttattttccgccctcaaaatgacagccatggccggccgggtgcttctgggggctcgtcggggggacagctccactctgactggcacagtctttgcatggagacttgaggagggagggcttgaggttggtgaggttaggtgcgtgtttcctgtgcaagtcaggacatcagtctgattaaaggtggtgccaatttatttacatttaaacttgtcagggtataaaatgacatcccattaattatattgttaatcaatcacgtgtatagaaaaaaaataaaacttcaatacaggctgtccatggaaa

SEQ ID NO: 4526 - DNA, 2813 bp, Artificial Sequence
  derived and/or modified sequence
gacagggccaagcccagctctcctccaagcacaggctctgctcacggaggacctggggcacactggggcagagtgcacacaccgggacatgctgggcctgcgccccccactgctcgccctggtggggctgctctccctcgggtgcgtcctctctcaggagtgcacgaagttcaaggtcagcagctgccgggaatgcatcgagtcggggcccggctgcacctggtgccagaagctgaacttcacagggccgggggatcctgactccattcgctgcgacacccggccacagctgctcatgaggggctgtgcggctgacgacatcatggaccccacaagcctcgctgaaacccaggaagaccacaatgggggccagaagcagctgtccccacaaaaagtgacgctttacctgcgaccaggccaggcagcagcgttcaacgtgaccttccggcgggccaagggctaccccatcgacctgtactatctgatggacctctcctactccatgcttgatgacctcaggaatgtcaagaagctaggtggcgacctgctccgggccctcaacgagatcaccgagtccggccgcattggcttcgggtccttcgtggacaagaccgtgctgccgttcgtgaacacgcaccctgataagctgcgaaacccatgccccaacaaggagaaagagtgccagcccccgtttgccttcaggcacgtgctgaagctgaccaacaactccaaccagtttcagaccgaggtcgggaagcagctgatttccggaaacctggatgcacccgagggtgggctggacgccatgatgcaggtcgccgcctgcccggaggaaatcggctggcgcaacgtcacgcggctgctggtgtttgccactgatgacggcttccatttcgcgggcgacgggaagctgggcgccatcctgacccccaacgacggccgctgtcacctggaggacaacttgtacaagaggagcaacgaattcgactacccatcggtgggccagctggcgcacaagctggctgaaaacaacatccagcccatcttcgcggtgaccagtaggatggtgaagacctacgagaaactcaccgagatcatccccaagtcagccgtgggggagctgtctgaggactccagcaatgtggtccaactcattaagaatgcttacaataaactctcctccagggtcttcctggatcacaacgccctccccgacaccctgaaagtcacctacgactccttctgcagcaatggagtgacgcacaggaaccagcccagaggtgactgtgatggcgtgcagatcaatgtcccgatcaccttccaggtgaaggtcacggccacagagtgcatccaggagcagtcgtttgtcatccgggcgctgggcttcacggacatagtgaccgtgcaggttcttccccagtgtgagtgccggtgccgggaccagagcagagaccgcagcctctgccatggcaagggcttcttggagtgcggcatctgcaggtgtgacactggctacattgggaaaaactgtgagtgccagacacagggccggagcagccaggagctggaaggaagctgccggaaggacaacaactccatcatctgctcagggctgggggactgtgtctgcgggcagtgcctgtgccacaccagcgacgtccccggcaagctgatatacgggcagtactgcgagtgtgacaccatcaactgtgagcgctacaacggccaggtctgcggcggcccggggagggggctctgcttctgcgggaagtgccgctgccacccgggctttgagggctcagcgtgccagtgcgagaggaccactgagggctgcctgaacccgcggcgtgttgagtgtagtggtcgtggccggtgccgctgcaacgtatgcgagtgccattcaggctaccagctgcctctgtgccaggagtgccccggctgcccctcaccctgtggcaagtacatctcctgcgccgagtgcctgaagttcgaaaagggcccctttgggaagaactgcagcgcggcgtgtccgggcctgcagctgtcgaacaaccccgtgaagggcaggacctgcaaggagagggactcagagggctgctgggtggcctacacgctggagcagcaggacgggatggaccgctacctcatctatgtggatgagagccgagagtgtgtggcaggccccaacatcgccgccatcgtcgggggcaccgtggcaggcatcgtgctgatcggcattctcctgctggtcatctggaaggctctgatccacctgagcgacctccgggagtacaggcgctttgagaaggagaagctcaagtcccagtggaacaatgataatccccttttcaagagcgccaccacgacggtcatgaaccccaagtttgctgagagttaggagcacttggtgaagacaaggccgtcaggacccaccatgtctgccccatcacgcggccgagacatggcttgccacagctcttgaggatgtcaccaattaaccagaaatccagttattttccgccctcaaaatgacagccatggccggccgggtgcttctgggggctcgtcggggggacagctccactctgactggcacagtctttgcatggagacttgaggagggagggcttgaggttggtgaggttaggtgcgtgtttcctgtgcaagtcaggacatcagtctgattaaaggtggtgccaatttatttacatttaaacttgtcagggtataaaatgacatcccattaattatattgttaatcaatcacgtgtatagaaaaaaaataaaacttcaatacaggctgtccatggaaa

SEQ ID NO: 4527 - DNA, 571 bp, Artificial Sequence
  derived and/or modified sequence
agaaagaagagtggcatgctttgacagcaagtggactccgagtccagggcagagcctcagttagggaggagctgagaggaacaggaagtgtcaggactttacgacccgcgcctccagctgaggtttctagacgtgacccagggcagactggtagcaaagcccccacgcccagccaggagcaccgccgaggactccagcacaccgagggacatgctgggcctgcgccccccactgctcgccctggtggggctgctctccctcgggtgcgtcctctctcaggagtgcacgaagttcaaggtcagcagctgccgggaatgcatcgagtcggggcccggctgcacctggtgccagaagctgaacttcacagggccgggggatcctgactccattcgctgcgacacccggccacagctgctcatgaggggctgtgcggctgacgacatcatggaccccacaagcctcgctgaaacccaggaagaccacaatgggggccagaagcagctgtccccacaaaaagtgacgctttacctgcgaccaggccaggcagcagcgttcaacgtgaccttccggc

SEQ ID NO: 4528 - DNA, 527 bp, Artificial Sequence
  derived and/or modified sequence
ctctcccaagtgtgaatctgatggaagcaggtccttctcgccgggacctcatgtgagaaatgacatgtcccacctgtctcaaggggccgctctctgacatcagagctgctgtagagcggagaggggcaggggtgaagggccacggtggtgcaacccaccacttcctccaaggaggagctgagaggaacaggaagtgtcaggactttacgacccgcgcctccagctgaggtttctagacgtgacccagggcagactggtagcaaagcccccacgcccagccaggagcaccgccgaggactccagcacaccgagggacatgctgggcctgcgccccccactgctcgccctggtggggctgctctccctcgggtgcgtcctctctcaggagtgcacgaagttcaaggtcagcagctgccgggaatgcatcgagtcggggcccggctgcacctggtgccagaagctgaacttcacagggccgggggatcctgactccattcgctgcgacacccggccacagctgctcatga

SEQ ID NO: 4529 - DNA, 556 bp, Artificial Sequence
  derived and/or modified sequence
agccacgttccagggcacctggctgggacctgccgcagcctctgcgcgcagcgggctccatcccccgggccacggattgggagactgaggcaggcgcgaagcccgccgcccagcctccgctagggagaccccggccacctccaggcagttttcctgaagcccggggccaggagaaggggccgctctctgacatcagagctgctgtagagcggagaggggcaggggtgaagggccacggtggtgcaacccaccacttcctccaaggaggagctgagaggaacaggaagtgtcaggactttacgacccgcgcctccagctgaggtttctagacgtgacccagggcagactggtagcaaagcccccacgcccagccaggagcaccgccgaggactccagcacaccgagggacatgctgggcctgcgccccccactgctcgccctggtggggctgctctccctcgggtgcgtcctctctcaggagtgcacgaagttcaaggtcagcagctgccgggaatgcatcgagtcggggcccggctgcacctggtgccagaagctg

SEQ ID NO: 4530 - DNA, 573 bp, Artificial Sequence
  derived and/or modified sequence
aagggcgactctgatgcaaggttctgagaggcctgtggggctgtggattcctaagcagcctcagctttgggttttgcaccttaggtcttggacatgctgggcctgcgccccccactgctcgccctggtggggctgctctccctcgggtgcgtcctctctcaggagtgcacgaagttcaaggtcagcagctgccgggaatgcatcgagtcggggcccggctgcacctggtgccagaagctgaacttcacagggccgggggatcctgactccattcgctgcgacacccggccacagctgctcatgaggggctgtgcggctgacgacatcatggaccccacaagcctcgctgaaacccaggaagaccacaatgggggccagaagcagctgtccccacaaaaagtgacgctttacctgcgaccaggccaggcagcagcgttcaacgtgaccttccggcgggccaagggctaccccatcgacctgtactatctgatggacctctcctactccatgcttgatgacctcaggaatgtcaagaagctaggtggcgacctgctccgggccctcaacgagatc

SEQ ID NO: 4531 - DNA, 680 bp, Artificial Sequence
  derived and/or modified sequence
atgcatgtatatgtgtggtgtgtgcatgcacgtggtgtgtacatgcagtcaggcacacatctgtatgcacgtacacgtgcatgtgtggtgtgtgtacacgtctgcatgtgtgtgtgtgcctgtgttgtgtgcctctgcaggggcccgctgcagctgtcctgggtgcctggctgagcaggacatgctgggcctgcgccccccactgctcgccctggtggggctgctctccctcgggtgcgtcctctctcaggagtgcacgaagttcaaggtcagcagctgccgggaatgcatcgagtcggggcccggctgcacctggtgccagaagctgaacttcacagggccgggggatcctgactccattcgctgcgacacccggccacagctgctcatgaggggctgtgcggctgacgacatcatggaccccacaagcctcgctgaaacccaggaagaccacaatgggggccagaagcagctgtccccacaaaaagtgacgctttacctgcgaccaggccaggcagcagcgttcaacgtgaccttccggcgggccaagggctaccccatcgacctgtactatctgatggacctctcctactccatgcttgatgacctcaggaatgtcaagaagctaggtggcgacctgctccgggccctcaacgagatcaccgagtccggccgcattg

SEQ ID NO: 4532 - DNA, 2200 bp, Artificial Sequence
  derived and/or modified sequence
gcccccacgcccagccaggagcaccgccgaggactccagcacaccgagggacatgctgggcctgcgccccccactgctcgccctggtggggctgctctccctcgggtgcgtcctctctcaggagtgcacgaagttcaaggtcagcagctgccgggaatgcatcgagtcggggcccggctgcacctggtgccagaagctgaacttcacagggccgggggatcctgactccattcgctgcgacacccggccacagctgctcatgaggggctgtgcggctgacgacatcatggaccccacaagcctcgctgaaacccaggaagaccacaatgggggccagaagcagctgtccccacaaaaagtgacgctttacctgcgaccaggcttcgggtccttcgtggacaagaccgtgctgccgttcgtgaacacgcaccctgataagctgcgaaacccatgccccaacaaggagaaagagtgccagcccccgtttgccttcaggcacgtgctgaagctgaccaacaactccaaccagtttcagaccgaggtcgggaagcagctgatttccggaaacctggatgcacccgagggtgggctggacgccatgatgcaggtcgccgcctgcccggaggaaatcggctggcgcaacgtcacgcggctgctggtgtttgccactgatgacggcttccatttcgcgggcgacgggaagctgggcgccatcctgacccccaacgacggccgctgtcacctggaggacaacttgtacaagaggagcaacgaattcgactacccatcggtgggccagctggcgcacaagctggctgaaaacaacatccagcccatcttcgcggtgaccagtaggatggtgaagacctacgagaaactcaccgagatcatccccaagtcagccgtgggggagctgtctgaggactccagcaatgtggtccaactcattaagaatgcttacaataaactctcctccagggtcttcctggatcacaacgccctccccgacaccctgaaagtcacctacgactccttctgcagcaatggagtgacgcacaggaaccagcccagaggtgactgtgatggcgtgcagatcaatgtcccgatcaccttccaggtgaaggtcacggccacagagtgcatccaggagcagtcgtttgtcatcgggcgctgggcttcacggacatagtgaccgtgcaggttcttccccagtgtgagtgccggtgccgggaccagagcagagaccgcagcctctgccatggcaagggcttcttggagtgcggcatctgcaggtgtgacactggctacattgggaaaaactgtgagtgccagacacagggccggagcagccaggagctggaaggaagctgccggaaggacaacaactccatcatctgctcagggctgggggactgtgtctgcgggcagtgcctgtgccacaccagcgacgtccccggcaagctgatatacgggcagtactgcgagtgtgacaccatcaactgtgagcgctacaacggccaggtctgcggcggcccggggagggggctctgcttctgcgggaagtgccgctgccacccgggctttgagggctcagcgtgccagtgcgagaggaccactgagggctgcctgaacccgcggcgtgttgagtgtagtggtcgtggccggtgccgctgcaacgtatgcgagtgccattcaggctaccagctgcctctgtgccaggagtgccccggctgcccctcaccctgtggcaagtacatctcctgcgccgagtgcctgaagttcgaaaagggcccctttgggaagaactgcagcgcggcgtgtccgggcctgcagctgtcgaacaaccccgtgaagggcaggacctgcaaggagagggactcagagggctgctgggtggcctacacgctggagcagcaggacgggatggaccgctacctcatctatgtggatgagagccgagagtgtgtggcaggccccaacatcgccgccatcgtcgggggcaccgtggcaggcatcgtgctgatcggcattctcctgctggtcatctggaaggctctgatccacctgagcgacctccgggagtacaggcgctttgagaaggagaagctcaagtcccagtggaacaatgataatccccttttcaagagcgccaccacgacggtcatgaaccccaagtttgctgagagttaggagcacttgg

SEQ ID NO: 4533 - DNA, 2310 bp, Artificial Sequence
  derived and/or modified sequence
atgctgggcctgcggccccccctgctggccctggtgggcctgctgtccctgggctgcgtgctgagtcaggaatgcacaaagtttaaggtttctagttgtagggagtgtatcgaaagcggcccgggctgtacctggtgccagaagttaaatttcaccgggccaggcgatccagactcaatccgctgcgacactcgtccccaattactaatgcgcggatgtgcagccgacgacatcatggacccaacgagcctggcagagacacaggaagatcataatggtggtcaaaaacagctgtccccccagaaggtcacactttatcttcgtcccgggcaggctgccgccttcaacgttactttccgaagggccaaaggctaccccatcgatctgtattatttgatggacctgtcgtacagcatgcttgatgacctacggaacgttaaaaagctcggcggggacctgctcagagccctgaacgagatcacagagtctggcaggatcggcttcggctcatttgttgacaagacggtcctccccttcgtgaatacccatccagataaacttcgcaatccgtgccctaacaaggaaaaggaatgtcagcccccattcgctttccgccacgtcctgaagctgacaaacaatagcaatcagttccaaacagaagtgggcaaacagctaatttctggtaacctggacgcccctgaaggtggcctggacgcaatgatgcaggtcgcggcctgtcctgaagagattggttggcgtaatgtcacacggctacttgtctttgcaactgacgatggctttcactttgctggagatggcaagctgggcgcaatattgaccccaaatgatgggcgctgtcatttagaagacaatctgtacaaacggtccaacgaattcgactatccaagtgtggggcaactcgcccacaagctcgccgaaaacaatatacagcccattttcgctgtcacgtccagaatggtgaagacatacgaaaaactgactgaaattattcccaagtccgccgtcggcgagctttcagaagattcttctaatgtggtgcaactcatcaaaaatgcctacaataaattgagctcccgggtattcctcgaccacaatgccttgcctgatactctcaaagtgacgtacgactccttttgttccaacggagtcacacatcgtaatcagcctaggggcgactgtgacggcgtgcagattaatgtacctattacgtttcaggtgaaagtcaccgctaccgagtgcatccaagaacagagtttcgtcatccgcgccttaggatttactgacatagtgaccgtccaggtccttccccagtgtgagtgccggtgtcgcgaccagtcaagagatagatcactgtgtcacggcaagggctttctggagtgtggaatctgccgctgcgatactggatacatcggtaagaactgtgaatgccagacccaggggcggtcaagccaagagttagaggggtcatgcagaaaggacaacaactccattatctgcagcggcctgggcgactgcgtttgcggccagtgtctttgtcatacatctgacgtgccaggcaaattaatatatgggcagtattgtgagtgtgacactatcaactgtgagcggtataacggacaggtttgtgggggtccaggccgcgggttatgcttctgtggcaagtgcagatgtcacccaggtttcgaaggctctgcctgtcagtgtgagagaaccaccgagggatgtctcaatccccgacgtgtggagtgctcaggcaggggacggtgccgctgtaatgtttgtgaatgccattcaggataccagttacctctgtgccaggagtgtccgggttgcccttccccctgtgggaagtacatcagctgcgccgagtgcctaaagttcgaaaaaggaccattcggaaagaactgttctgcagcgtgtcccggactgcagctgagcaataatccagtcaaaggtagaacatgcaaagagcgcgacagcgagggttgctgggtagcatatactcttgagcaacaggacggaatggacagatatttgatctatgtggatgaaagtagagagtgtgtagcaggacctaacatcgcagcgatcgtcggaggcacagtggctggtattgtcttgatcggcatcctattacttgtcatctggaaagctttgattcacctgtccgatctacgggagtataggcgcttcgagaaagaaaaactcaagagccaatggaacaacgataaccccctgtttaaatccgcgactaccaccgtgatgaatccgaagttcgccgaaagttag

SEQ ID NO: 4534 - DNA, 969 bp, Artificial Sequence
  derived and/or modified sequence
ggccggctgggcaaggacctggccaccggcgtgctgagccaggagtgcactaaattcaaagtgtctagctgtagagagtgcatcgagtctggtccggggtgtacatggtgtcagaaactgaatttcactgggcccggggacccagattctatacgctgcgataccaggcctcagcttctcatgcggggatgtgccgctgacgatataatggatcccacaagccttgcggagacgcaggaagaccataatggcggtcagaagcaactgtctccacagaaagtaactctgtaccttcgaccaggtcaggctgctgcgttcaacgtaacgttcagaagagccaagggctacccaatagatttgtactacctaatggacctgtcgtacagcatgttagatgatctgcggaacgtgaagaaattaggtggtgacttactccgggctctaaacgagataactgagtccggcaggattggctttggtagttttgttgataagactgtgctaccatttgtcaatacccaccccgataaattaagaaatccctgccccaataaagagaaggaatgccagcccccatttgcctttcgccacgtgcttaaactgacaaacaactctaaccaatttcaaaccgaggtcggcaagcagctgatcagtggaaatctggacgcaccggaaggcgggcttgacgcaatgatgcaggtggctgcatgtcccgaggagataggttggaggaatgtaactaggctgttggtcttcgctaccgatgatggattccacttcgccggagatggcaagctaggagccattcttaccccaaatgatgggcgatgtcatctggaggataacctttataagcggtccaacgagtttgattatcccagtgtgggccagttagcccacaagctggctgagaataacatccaaccaatctttgccgtaaccagtcgaatggtgaagacatatgagtag

SEQ ID NO: 4535 - DNA, 2310 bp, Artificial Sequence
  derived and/or modified sequence
atgctgggcctgcggccccccctgctggccctggtgggcctgctgtcactagggtgcgtgctttcccaagagtgtaccaagttcaaagtgagtagctgtcgggagtgcatcgaatctggtccaggatgtacctggtgccagaagctcaatttcaccggcccgggagaccccgactccatccgctgcgacacccggccccagctgttgatgcggggttgcgcagcagacgacattatggacccgacttccctggctgagactcaggaggatcacaatggcggccaaaagcagctgagcccacagaaggtcaccctgtacctgaggcccgggcaggctgccgcgtttaatgtgacgttcagaagagctaagggctaccctatcgacctctattaccttatggacctgagctactctatgttggacgatctgaggaacgttaaaaagctgggaggggatttgctgagggctctgaacgagataaccgagtctgggcgcatcggctttggaagctttgttgacaagaccgtactaccctttgtgaatacacatccggataagctgcggaacccttgccccaacaaggagaaggaatgtcaacctccattcgcattccggcacgtcctgaaattgacgaataactccaaccagtttcagacggaggtgggcaaacaacttatctccggaaatctggatgcgccagaaggtggccttgacgccatgatgcaggtggctgcctgccctgaggaaatcggatggagaaacgttactagactcctggtatttgccacagacgacgggtttcattttgccggcgacggcaaattgggggcaattctgacgccaaatgatggccggtgtcatctggaagacaatctgtacaaacggtcaaacgagtttgattatccaagcgttggccagttggcccacaagctggccgaaaacaacatccagccaattttcgccgtgacttcacgcatggtgaagacgtatgaaaagctgaccgaaatcatccctaagagtgccgttggcgaactgtccgaagacagttcgaatgttgtacagctcatcaaaaatgcctacaataaactgtccagtagagtgttcctcgaccataacgccttaccggacacgcttaaggtcacttacgacagtttttgcagcaatggggtcacccacaggaatcagccgcggggagactgcgacggcgtccagatcaacgtccccatcacatttcaggtgaaagtgacagccaccgaatgtattcaggagcagtcatttgtaattagggccttggggttcaccgatatagtgactgtgcaagtgttacctcagtgtgaatgcagatgtagggatcagtcccgggacaggtcgctgtgtcacggcaaaggatttttggaatgtgggatctgtcgctgcgacaccggctatatcggcaaaaattgtgagtgtcaaactcagggtcgctcttcccaagagcttgaaggatcatgccgcaaagacaataatagcatcatctgtagcggtttgggtgactgcgtctgcggccagtgtctgtgtcatacttcagacgtgccgggtaagttgatttatgggcaatactgcgagtgcgatacaattaactgtgaacgatacaacggccaagtatgcggaggacccggacgggggttgtgtttttgcgggaagtgtcggtgccaccctggattcgaagggtccgcctgccaatgtgagcgcacgacagagggctgcctcaacccccgcagagtggaatgtagcggccggggcagatgccggtgtaatgtgtgtgaatgccacagtggctaccagctccctctgtgtcaagagtgccctggctgcccttcgccatgcggaaaatatatttcctgtgcagagtgtctgaaattcgagaagggaccatttggtaagaactgtagcgctgcctgccccggactgcagttgagcaataaccctgtgaagggacggacatgtaaggagagagattcagaagggtgttgggttgcctacaccctggagcagcaggatgggatggaccgctacctgatatatgtggatgagtctagagagtgcgtcgctggccccaacatagccgcaatcgtgggggggaccgtggctggcatagtgttaattggaattctgctgctcgtcatttggaaagctctgatacacttgagtgatttaagagagtataggcggtttgaaaaagagaaactcaagtcccagtggaataatgacaatcccctcttcaaatcagccacgactaccgtgatgaacccaaagttcgccgagagctag

SEQ ID NO: 4536 - DNA, 2310 bp, Artificial Sequence
  derived and/or modified sequence
atgctgggcctgcggccccccctgctggccctggtgggcctgctgtccctcgggtgcgtgctcagtcaagagtgcacaaaatttaaggtaagttcttgtcgagagtgcatcgagtcagggcccggctgcacatggtgccagaaattaaatttcactggcccaggtgacccggacagtatccgatgtgacacccgtccccaattattgatgcgaggatgtgctgctgacgacattatggatcctacttctttagctgagacccaggaggatcataacggcgggcagaaacagctgagcccccaaaaggtgacgctatatctgagaccagggcaggccgctgcgttcaatgtgacttttagaagagcgaagggatatcctattgacctgtactaccttatggacttatcctactccatgctggacgacctgaggaacgtgaaaaagttggggggcgacttgctcagggcgctgaatgagatcactgagagcggacgaatcggttttggctccttcgtggataagactgtgctgccgtttgttaatacccatccagacaagctgcggaacccatgtcccaataaggaaaaagaatgtcagcctcctttcgccttcaggcacgtactgaagctgaccaacaattctaatcagtttcaaaccgaagtaggaaaacagcttatttcagggaacctggacgcccctgagggtggattggacgctatgatgcaggtggcagcatgtcctgaggaaatcggctggcggaacgtgacccgccttctggtatttgcaacggatgatgggtttcacttcgcaggcgatgggaaattgggcgccattttaacacctaatgacggccgctgtcacctggaggacaatctatacaaacggagcaacgagttcgattacccttcagtcggccagttggcacacaaactggctgagaacaatattcagccaatcttcgctgtgacatctagaatggtcaaaacctatgagaaattgaccgaaatcattcctaagagtgccgtgggagaattgtcagaagactcaagcaatgtggttcaattaatcaaaaatgcttataacaaactctcttcaagagtttttcttgatcataatgcactgccagacaccttgaaagtgacatatgattctttctgttccaatggagtgactcatcgcaaccagccccgtggtgattgtgatggagtgcaaataaatgtaccaataacctttcaggttaaggtcacagcaacggagtgtattcaagagcagagctttgtcatccgagcactgggttttacagatatcgtgaccgtccaggtgctgcctcagtgcgagtgcagatgtagggaccagagtcgcgatcgcagcctctgtcacgggaagggctttctggaatgtggcatctgtcggtgcgacacaggctacataggcaagaactgtgagtgccagactcaaggtcggtccagccaagaattggaaggctcttgtcggaaggacaacaactctattatttgcagcgggctgggcgactgcgtttgtgggcagtgcctttgccacacatccgacgtgccgggtaaacttatttatgggcagtattgcgagtgcgacaccatcaattgcgaaaggtacaacggtcaagtttgcggagggcctggtagagggctttgtttctgcggcaagtgccggtgtcacccagggtttgaaggatctgcgtgtcagtgtgagagaacaaccgaagggtgcctgaatccacgccgggtcgagtgcagcggtagggggagatgccggtgtaacgtgtgcgaatgccattcaggctaccagcttcccctctgccaggagtgccccggctgtccttctccttgtggcaaatacatcagctgtgccgaatgcctaaagttcgagaagggcccgtttggaaagaattgcagcgccgcctgtcctggccttcagctgtccaacaaccctgtcaaaggccgtacatgcaaagagcgcgactcagaagggtgctgggtcgcctacactcttgaacaacaggatggcatggaccgctacctgatctacgtagacgaatcccgggagtgtgtcgcaggccccaatattgcagcaatcgttggcgggacagtggcaggcatcgtgctgattgggatcctcctgttggtaatttggaaggcgctgattcatttatctgacctgagggagtaccgccggttcgagaaggagaaattaaaaagccagtggaacaacgataaccctcttttcaaaagcgcaacaacaacagtgatgaaccctaaattcgcggagtcgtag

SEQ ID NO: 4537 - DNA, 2310 bp, Artificial Sequence
  derived and/or modified sequence
atgctgggcctgcggccccccctgctggccctggtgggcctgctgtcacttggctgcgtcctgagccaggaatgtaccaaattcaaagtgagttcttgtagggagtgcatagaatcaggacctggctgcacctggtgccaaaagctaaatttcaccggccccggcgacccagactcaatacgttgtgacacccgtccacagcttcttatgcggggatgcgcagctgacgacattatggaccctacatctctggctgagacacaagaggatcacaatggagggcagaagcagctgtctcctcagaaagtgacgctgtacctaagacctggacaagcggccgctttcaacgtgactttccgccgggctaagggttatccaatcgacttgtattatctaatggatttgtcttactccatgctcgatgatcttcggaacgtgaaaaagttagggggggatctgcttcgggctctgaatgagattacagaaagcgggcgtatcggcttcggcagcttcgtcgataaaacagtcctgccttttgtcaacacccatcccgacaagctccggaacccttgccctaacaaggagaaggagtgccagccaccatttgctttccggcacgtgctgaagctcacaaacaactcaaaccaattccagactgaagttggcaagcagctcatcagtggcaacctcgatgcacctgaaggcggcttggacgccatgatgcaggtggctgcatgtccagaggaaattggctggaggaacgtgaccaggctgctagttttcgctacggacgatggatttcactttgccggggacggtaagttgggggccattctcactcctaacgacgggcgctgtcatctggaggacaacctatataaacgctcaaatgaattcgattacccaagcgtcggacagttggctcataagctggctgagaacaacatacaaccaattttcgcagtcacaagtcgcatggtgaagacctacgagaaactaacagaaatcatcccaaagagtgccgtgggcgagttgagcgaagactccagcaacgtggtccagctcattaagaatgcatacaacaaactgagttcaagagttttcctcgaccacaatgccctcccagataccctgaaagtaacatacgacagtttttgcagcaatggcgtgacccaccggaatcagccccgcggagactgtgacggtgtccagatcaacgtgcccataacctttcaggtcaaggtaacagcaacagagtgtatccaggagcaatctttcgtgattcgcgccctgggtttcactgatattgttacagtccaggtgctgccacagtgcgaatgcaggtgccgcgaccaatcacgagaccgttccttgtgtcacggcaagggcttcctggagtgcggaatttgtcgatgtgacactggatatataggcaagaactgtgagtgtcaaacacagggccgctctagtcaggaactcgagggctcttgtcgaaaggataacaactccataatctgcagcggactgggagactgcgtctgtggacagtgtctatgtcacactagcgatgttccagggaagctgatttacgggcagtattgtgaatgcgataccatcaactgtgagcggtataacggacaggtctgcggggggccaggacgaggattgtgcttttgcgggaagtgccgttgtcacccaggatttgagggctctgcttgtcaatgtgagagaaccacggagggctgcctaaaccctcgaagggttgaatgctctgggagaggcaggtgtcggtgcaatgtatgcgagtgtcactcaggttaccagttgcccctttgtcaggaatgcccaggctgtcctagcccttgcggaaagtacatatcctgcgccgaatgtctgaagtttgaaaaggggccatttgggaaaaattgctcagccgcgtgcccagggctgcagctgtctaataatcctgtcaaggggcgcacatgcaaggagagggactcggagggatgttgggttgcatataccctggaacagcaggacggcatggacagatatttgatttacgtcgatgagagtagagaatgcgtggctggccccaatatagctgctatcgttggcggcacagtcgctggcattgtattaataggtatattgctccttgtgatttggaaagcccttatccacttatcagatctgcgggagtatcgccgcttcgaaaaggaaaagctgaagtcacaatggaataatgacaaccctctgttcaaatcggccactacaactgtaatgaatcccaagttcgctgagagttag

SEQ ID NO: 4538 - DNA, 2310 bp, Artificial Sequence
  derived and/or modified sequence
atgctgggcctgcggccccccctgctggccctggtgggcctgctgtctctcggatgcgtgctctctcaagagtgcactaaattcaaagtctcgtcttgtagggagtgcattgaaagcggtcccgggtgtacctggtgccagaagctaaactttactgggcccggcgaccctgatagtattcggtgtgatacacgtccacaacttctgatgcgcggctgcgccgccgatgatatcatggatccgacttctctcgccgagactcaggaggatcacaacggcggacagaaacaactgagtcctcagaaggtcactctttatctgcgccccggccaagcggcagcatttaacgtcacatttcggagggcaaaagggtatcccattgacctgtactatttgatggatctttcgtatagtatgcttgatgacctcaggaatgtcaagaaactgggcggagacctgcttcgagctctgaacgagatcaccgagtccgggagaattggtttcgggagctttgttgataagaccgttcttcctttcgtgaatactcacccagataagctgagaaacccttgccccaacaaggagaaggagtgtcaaccccctttcgcatttcgacatgttctgaagttgactaataatagtaaccaattccaaaccgaagtaggcaagcagctaatttcaggcaatctcgatgctcccgagggaggcctggatgccatgatgcaggtggctgcctgtcccgaggaaatcggatggaggaatgtcactagacttctcgtttttgccacagatgatggatttcattttgcgggcgacggcaagcttggagctatcctgaccccgaacgatggccgatgccatctggaggataacctctataaacggtccaacgagtttgattacccttctgtcggccagcttgcacataaattagctgaaaataacatacaacccatctttgccgtgacatctagaatggtgaaaacctacgaaaagctcaccgaaatcattccaaagagcgcagtgggggaactatctgaggattcctcaaacgttgtgcaactgattaaaaatgcatacaacaagctttcaagccgcgtttttctggaccacaacgcccttccagacactctcaaggtcacttacgattcgttctgttccaacggagtgacccaccggaaccaaccacgaggcgactgcgatggcgtacagatcaatgtgcctattacctttcaagtgaaggtcacagcgaccgagtgtatacaagagcaaagtttcgtgatccgcgcccttggctttacggacattgtgacagtccaggttctacctcagtgcgaatgtcggtgtcgtgaccagagtagagacaggtctctctgtcatggtaaagggtttcttgagtgtgggatttgtcgctgtgacacaggttacatcggaaagaattgtgaatgtcaaactcagggaagatcttctcaagagctcgagggaagttgccgcaaggacaataattcaataatatgcagtggtcttggagactgtgtatgcggccaatgtttgtgccatacgtcggatgtacccggcaagctgatttacggccagtactgcgaatgtgacaccatcaattgtgaacggtataacggtcaagtgtgcggaggccctggtcgcggcctgtgtttctgtgggaagtgtagatgccaccctggctttgaggggtcagcttgccagtgcgaacgcactacagagggctgtctcaacccacgtagagtggaatgctcaggccgtggccggtgtaggtgcaatgtgtgcgaatgccacagcggataccagttacccctgtgccaggagtgtcctggctgtccgtcaccatgtggcaagtacatcagttgcgcggagtgcctgaagtttgagaagggccctttcggtaagaactgcagcgccgcttgtcctgggcttcaactgagtaacaatcctgtgaagggccggacctgtaaagaacgggacagtgaaggttgttgggtggcatacactctcgagcaacaagatggaatggacagatacttgatctacgtggatgagagcagagaatgcgtcgcaggacccaatattgcggctattgttggtggcactgtcgccggaatcgtactgatcgggattctcctgcttgtgatttggaaagcactgatccacctctcagacctgagggaataccggcgatttgagaaggagaagctgaaaagccagtggaataatgacaatcccttgttcaagtctgccaccaccaccgtgatgaatcctaaattcgccgagtcctag

SEQ ID NO: 4539 - DNA, 363 bp, Artificial Sequence
  derived and/or modified sequence
atgctgggcctgcggccccccctgctggccctggtgggcctgctgagcttgggttgtgttctgtctcaggagtgtacaaagttcaaagtatcttcttgcagagaatgcatcgagtcagggcccggctgcacctggtgtcagaaattaaattttaccggaccaggtgacccagacagcatcaggtgcgacacccggccccagctcctgatgcgtggttgtgcagctgacgacataatggatcccacctcattggcagaaactcaggaggaccacaatggagggcagaaacagctttcccctcaaaaagtgacactctatttacggccaggacaagccgcagcctttaatgttacattcagatag

SEQ ID NO: 4540 - DNA, 213 bp, Artificial Sequence
  derived and/or modified sequence
atgctgggcctgcggccccccctgctggccctggtgggcctgctgtcattaggctgcgtgttgagtcaggagtgcaccaaatttaaggtctcctcatgcagggagtgtattgaatctggcccgggttgtacctggtgccagaagcttaatttcaccggacctggagatcccgatagcatccggtgtgacacaaggccacaattgcttatgtag

SEQ ID NO: 4541 - DNA, 150 bp, Artificial Sequence
  derived and/or modified sequence
atgctgggcctgcggccccccctgctggccctggtgggcctgctgagtctagggtgcgtgctgtcccaagagtgcaccaagttcaaggtaagtagctgccgcgaatgtatagagtctggcccaggatgtacatggtgtcagaagctgtag

SEQ ID NO: 4542 - DNA, 483 bp, Artificial Sequence
  derived and/or modified sequence
atgctgggcctgcggccccccctgctggccctggtgggcctgctgtcattgggctgcgttctgtctcaggaatgtacgaagtttaaggtgagcagctgccgcgaatgcatagaatcagggcccggctgtacatggtgtcaaaagctcaacttcacagggcccggagatcccgactcaatcaggtgtgacacacgtccccagctgctgatgcggggatgcgccgccgacgacatcatggatcccacctcccttgccgagacccaggaagatcataacgggggccaaaagcagctctctcctcagaaggtcactctttatctcagacccgggcaagcagcagcatttaatgttactttcaggagggcaaaaggataccctatagacctgtactatctgatggacctgtcttactcgatgctagacgacctccggaacgtgaagaagctggggggagatttgttgcgagccctaaatgaaatctag

SEQ ID NO: 4543 - DNA, 501 bp, Artificial Sequence
  derived and/or modified sequence
atgctgggcctgcggccccccctgctggccctggtgggcctgctgtcacttggttgtgtactctctcaagagtgcaccaaattcaaggtctcttcgtgtcgagaatgcatcgagtctgggcccgggtgcacctggtgccagaaattaaacttcaccggccccggtgatcctgacagcatccgttgcgatacacgaccccagctcctgatgcgcggttgtgccgctgacgatattatggacccaacctctctcgcagagactcaagaggatcacaatgggggccagaagcagctgagccctcagaaggtgaccctgtatctgcgtcccggtcaggcggccgccttcaacgtgacttttcggcgggctaagggttatccaattgatttgtactacctgatggacctttcctactccatgctggatgaccttcgaaatgttaagaagctcggaggtgacctactacgagccctgaacgagataactgagtctggacgcatttag

SEQ ID NO: 4544 - DNA, 2310 bp, Artificial Sequence
  derived and/or modified sequence
atgctcgggttgcgcccaccccttctggcactggtgggcctcctgtccttagggtgcgtactgtctcaagagtgtacaaagtttaaggtttctagctgccgcgagtgcattgagagcggcccaggctgcacctggtgtcagaagctgaactttaccggacctggtgatcccgattccattaggtgtgatacaagaccccaactgctaatgcggggatgtgcggctgacgatataatggatcccacttcccttgctgaaactcaggaagaccacaacggcggacagaaacaactgtcacctcagaaagtgacactatatctcaggcctggacaggcagccgcattcaatgttaccttccggagggccaaggggtacccaattgatttatattatctcatggatctgagctactcgatgctagacgacttgcggaacgttaaaaagttagggggagatctccttcgcgcactaaacgaaattacagagagcggaagaatcggctttggcagctttgtggataagacagtgctgccattcgtgaatacacacccagacaaactccgaaacccgtgtccaaataaggaaaaggaatgtcagccaccatttgctttcaggcacgtgctgaagctgacaaacaatagcaatcagttccagactgaagtggggaagcagttaatttcgggcaatttagatgcccctgagggaggactggatgccatgatgcaagtggcagcgtgccctgaagagataggatggcgtaacgtcactagattattggtgtttgctactgacgatgggtttcatttcgctggtgatggcaaattgggggctattctcacgccaaacgatggccgttgtcatctcgaggacaatttgtacaagcggtcgaatgaattcgattatccctctgtcggccagctggcccacaagcttgcagaaaataatatccagccaattttcgccgttacatcaaggatggtcaagacatatgaaaagctgaccgaaattatcccaaaatccgcggttggagagcttagcgaggattcttcaaacgtagtccagctgatcaagaacgcatacaataagctctcttcaagagtgttcctggaccacaacgcactgcctgacactctgaaggtcacctatgatagcttttgcagcaacggtgtaactcacaggaaccagccacgtggcgactgtgacggcgtgcaaataaacgtgccaattacattccaagtgaaggtgactgccactgagtgcatccaagaacagtcgtttgtgatccgagcacttggcttcacagatatcgtgactgtgcaggtactgccccagtgtgaatgcagatgcagggatcagtctcgggatcggtccttgtgtcacggaaagggattcctggagtgcggcatctgcagatgcgatacagggtatattggaaagaactgcgagtgccagacacagggcaggagctcccaggagctggaaggctcttgcaggaaagacaacaatagtatcatctgcagtggcttaggggattgtgtctgtgggcagtgcctttgccacacttcagatgtaccagggaagttgatatacgggcagtactgtgagtgcgatacgattaattgcgaaagatataatggtcaggtttgcggaggtcctggccgtggcctttgtttttgcggtaaatgtaggtgccatcctggcttcgagggcagtgcttgtcagtgtgagcggaccactgagggttgtttgaatcccaggagagtggaatgcagtggccgagggagatgccggtgtaacgtttgcgagtgccactcgggttatcagttacccctctgtcaggaatgccccggttgtcctagcccttgtggtaagtacataagctgtgccgagtgcctgaagtttgagaaaggccctttcggcaaaaattgtagcgcggcttgcccaggcctccagctttccaacaatcccgtaaaaggacggacctgcaaagagcgtgactcagagggctgttgggttgcctacacgctagaacagcaggacggaatggatcggtacttgatttatgtggatgagtcccgggagtgtgtcgcaggaccgaacatagccgcaattgtcggcggaacggtggcaggtattgtgctgatcggaatcctgctgttggtgatatggaaggcactcatccatctatccgatctaagggagtatcgcaggttcgaaaaggagaagttgaagtcccagtggaataacgacaaccccctgttcaagtccgcaacaactaccgtcatgaatcctaagtttgcggaatcttag

SEQ ID NO: 4545 - DNA, 969 bp, Artificial Sequence
  derived and/or modified sequence
gggagattagggaaggatcttgccacaggcgtgctgtctcaggagtgtacaaaattcaaagtcagctcttgcagagaatgtatcgaatctggaccgggttgtacctggtgccaaaagctgaatttcaccggacctggcgatcccgactcgatcaggtgtgatacaaggcctcagctcttaatgagggggtgcgccgcagatgacattatggaccccacaagcctcgcagagacccaggaggaccacaatggcggacagaagcagctgagcccccagaaagttaccttatatctcagacccggacaagctgctgccttcaatgtgacatttaggcgggctaaaggataccctatcgacttgtattatctcatggacctgtcctatagtatgctcgacgacctgcgtaacgtgaaaaaactgggcggtgatctcctgcgcgcactgaatgagatcaccgagagcggaaggataggtttcggctcgttcgttgataagacagtgctcccattcgtgaacactcacccagacaagcttaggaacccttgtcctaacaaggaaaaggagtgccagccgccatttgctttccggcacgttctgaagctgaccaacaacagcaaccagttccagaccgaggttgggaagcagttgatttcaggcaatttggatgcccctgagggcggactggacgccatgatgcaggtagctgcctgtcctgaggagattggatggaggaacgtgaccaggctgctcgtgtttgccacagatgatggatttcatttcgccggtgacggcaagctgggcgcaattcttacaccaaacgacggaagatgccacctggaagacaacctgtacaaaagatcaaatgagtttgattatccttccgtgggacagctggctcataaactggcagaaaataatatccaacctattttcgccgtcacgtcgcgaatggtgaagacatacgagtag

SEQ ID NO: 4546 - DNA, 2310 bp, Artificial Sequence
  derived and/or modified sequence
atgttaggcctcagacccccactgctagccctggtggggctcttgtctctgggctgtgtgctttcacaggagtgtactaagttcaaggtatcctcatgtcgcgagtgtatcgagtctggtcctggctgtacatggtgccagaagcttaacttcacaggcccaggtgaccctgattctatacgctgtgatacccggccacagctactcatgcgcggatgtgctgctgatgacatcatggaccctaccagccttgctgagactcaggaagatcacaacggtgggcagaagcagctgagccctcagaaggtcacattgtacctccgtcccggacaggctgcagcttttaacgtcacttttcggagggctaagggctacccaatcgacctgtactacctgatggacctgtcttacagtatgctggacgacttacggaacgtgaaaaaattaggtggagatctgctacgggcactcaacgaaattactgagagcgggaggattggcttcggaagcttcgtcgacaaaacggtcctgccattcgtgaatacccacccagacaagttaaggaatccatgccccaataaagagaaggaatgccagcctccctttgccttcagacacgtgctgaagctgacaaataacagcaatcagttccagactgaggtcggcaagcagctaatatccggaaatctggacgccccagagggcggattggacgccatgatgcaggtggccgcatgccctgaggagatcggctggcgaaacgtcacaagattgcttgtgtttgccaccgatgatggattccatttcgccggagatgggaagctgggcgctattctgacccccaacgacggacggtgccatttggaggacaatttgtacaagcgcagtaatgaattcgactatccaagcgttggacaacttgctcacaaactggccgagaacaatattcagcccatctttgccgtcaccagtagaatggtcaagacatatgagaagctgactgagattatcccaaaaagtgcggtgggcgaactgtctgaggattcatctaacgtggtacagctcattaagaacgcctacaataagctgagtagtagagtgttccttgaccataatgcgctgcccgacaccctgaaggtgacatacgactccttttgctccaatggtgtaacacaccgcaaccagccccgtggcgattgcgatggggttcaaataaatgtcccaatcacttttcaagtgaaggtcaccgctacagagtgcatccaagagcagtctttcgtgattcgcgcactcggtttcacggacatcgtaaccgtccaggttctccctcaatgcgaatgcagatgtagggaccagtctcgcgatcggtctctgtgtcacgggaagggttttctggagtgcgggatctgtaggtgtgataccggttatataggcaagaactgcgagtgccaaacgcaaggcaggtcctcacaggaactcgaggggagctgtaggaaagacaataacagcatcatctgctccggcctgggcgattgcgtttgtgggcagtgcctttgtcatacttctgacgtgccaggaaaattaatatacgggcagtactgcgagtgtgataccataaattgcgaacgctataacggtcaggtatgcggtgggccagggagggggctgtgcttttgcggaaagtgcaggtgccacccaggcttcgaagggtcggcatgccagtgcgaaagaaccactgagggatgcctgaatcccaggagggtggagtgcagcgggcgagggcgttgtcggtgcaatgtgtgcgagtgtcacagcggatatcagttaccactttgccaggagtgccccggatgtccatcaccctgtggtaagtacatctcctgcgcagaatgtctgaagttcgagaaagggccatttgggaaaaactgctctgctgcctgcccaggactgcaactttctaacaatcccgtcaaggggaggacatgcaaagagcgtgatagcgaaggttgctgggttgcctacacgcttgagcaacaagacggtatggacaggtatctgatctacgtagacgagtccagagaatgtgtggctggcccaaatatcgctgcaatagttggtggcactgtggcgggtatcgttctgatcgggatactcctgttggttatttggaaggccctgatccatctgagtgacttacgagagtatcggaggttcgagaaagagaaactgaaatcccaatggaataatgataatcctcttttcaaaagtgcaaccacaacggtcatgaaccctaaatttgcggagagctag

SEQ ID NO: 4547 - DNA, 2310 bp, Artificial Sequence
  derived and/or modified sequence
atgctagggttgcggccacccctgcttgcacttgtaggcctgttgtcacttgggtgcgtcctgtcccaggagtgcactaaatttaaagtgtcatcttgccgcgaatgcattgaatctggtcccggatgtacttggtgccagaagttaaatttcacagggccaggcgatcccgacagtattaggtgcgacaccagaccccagctgctgatgagaggctgtgcggctgatgacattatggacccaacctctctcgccgaaacacaggaggatcacaacggaggacagaagcaactctcccctcaaaaggtgacgctctatctgcgcccagggcaagcagcggcatttaatgttacattcaggcgcgctaagggctatcccatcgacctctattaccttatggacttatcctacagcatgttagatgacctgcgcaacgtgaagaagttgggaggggatctgttgagggccctgaacgagatcacggagtctgggcgtatcggttttggttcttttgtggacaagaccgtgctgccattcgtgaatacccatcccgataaattgcgtaatccctgccctaataaagagaaagaatgccaaccccctttcgccttccgtcatgtcctgaagctgacaaataactcgaaccagtttcagacggaggttggcaaacagttgatctcggggaatctggatgccccagagggtgggctggacgctatgatgcaggtggccgcttgtcccgaggagattgggtggaggaatgtcactaggctgctcgtgttcgcaaccgacgacgggtttcacttcgcaggtgatggcaaactgggtgctatcctaactcctaacgatgggagatgccacttggaggataatctctataaaaggtccaacgaatttgattatcccagtgttggacagttggctcacaaattggctgagaacaacatccagccaattttcgcggttacttccaggatggtcaagacctacgaaaaattaaccgagatcatccccaagtctgccgtgggagagctgagcgaagatagcagtaatgtggtgcagttgatcaagaatgcgtacaacaagctcagctccagggtgttcctggaccacaacgctttgccagacactctgaaggttacctacgactcattctgtagcaacggcgtgacacacagaaaccagcctaggggtgactgcgatggagtgcagataaacgttccaatcacgtttcaggtcaaagtcacagccactgaatgtatccaagaacagtcctttgtgattcgcgcattgggcttcacagatatcgtcacagtccaggtgctgccacagtgcgaatgtagatgtcgtgaccaatcccgcgatcggtcactgtgccacggaaagggttttctggagtgcggaatctgcagatgtgatacagggtacatcggaaaaaactgtgagtgtcagacccagggtcgctcttctcaagagcttgagggatcttgccgcaaagacaataatagcattatctgctcaggtttgggggactgcgtgtgcggccagtgtctctgtcacacctcagacgtgcctggtaagctaatctatggccagtattgtgaatgtgatactatcaactgtgagcggtacaatggtcaagtttgtggcggtccaggcagaggattatgtttttgcggaaaatgtcgctgccacccaggcttcgagggaagcgcctgccagtgcgagcgcacgactgaagggtgtctaaacccgaggcgggtcgagtgttcaggcaggggacgctgccggtgcaacgtgtgtgagtgccatagtgggtaccagctgcccctgtgtcaggagtgtcctggctgcccatcaccatgtggcaagtatatctcgtgcgctgagtgtttgaaatttgaaaaaggacctttcggcaaaaattgcagcgccgcatgcccaggcctgcaattgtctaataatcctgtgaagggccgaacctgcaaagagagggactcggaggggtgttgggtggcatacaccttggagcagcaggatggtatggatcgctacctgatatacgtggatgagtcacgggagtgtgtcgcaggacccaatattgccgcaatcgtgggtggtaccgtggctgggatcgtcttgatcggcatccttctgttagtgatctggaaagctttgatccatttgtctgacctgcgcgagtaccggagatttgagaaggagaagctaaagagccagtggaacaacgataacccgctgttcaagagcgcgactactacagtgatgaaccccaaattcgctgagtcatag

SEQ ID NO: 4548 - DNA, 2310 bp, Artificial Sequence
  derived and/or modified sequence
atgcttgggctacggcctccactgctagcccttgttggattgctgtcactcggatgcgttttgagccaggaatgcactaaattcaaggtctccagctgtcgcgaatgtatcgaaagcgggccagggtgtacatggtgccaaaagctgaactttacagggcctggcgaccccgactccatccggtgtgatactcggccacagctgttaatgcgtgggtgtgccgctgacgacattatggaccccacatctctcgctgaaactcaagaggatcataatgggggacagaagcaattgtcccctcagaaggttaccctttatctcaggcctggtcaggccgctgcatttaatgttacttttcggagagcaaaagggtatccgatcgacctgtattacctgatggaccttagttattcaatgcttgatgatctgaggaatgttaagaagctagggggagaccttctccgcgctttaaacgagattaccgaatccgggagaataggctttggttcatttgtggacaagaccgtgctaccctttgtcaacactcaccctgataaactgagaaatccttgcccaaataaggagaaggagtgtcaaccgccatttgcgtttaggcacgtgctgaagttaactaacaacagcaaccagtttcagaccgaggtgggaaagcaacttatttccggaaacctcgacgcacccgaagggggactggacgcaatgatgcaagtcgctgcttgccccgaagaaataggatggcggaacgttacacgcttgctggtgttcgcaacagacgatggtttccattttgcgggagatgggaaactcggggctattcttacccctaacgatgggagatgccatctggaggataacctgtataagcgctcaaatgagttcgactacccaagtgtggggcagctcgcgcataaactggcagagaacaacatccagcccattttcgcagttacgtcgcgcatggtcaagacctacgagaagctgacggaaattatccctaaatccgcagtgggagaactgtctgaggattccagtaacgtcgtgcaactcataaaaaacgcttataataagctgtcatcgcgcgtttttcttgaccataacgcgctgccagacacattgaaggtcacttatgactctttttgcagtaacggagtgacccacaggaatcaacccaggggggactgtgatggcgttcagattaacgtccccatcaccttccaggtaaaagtgaccgcaacggaatgcatccaagagcagtcttttgttattcgagccctggggtttaccgatattgtgactgtccaggtcctgccccagtgtgagtgtcgatgtcgtgaccagtccagagatcgcagtctatgccacggaaaggggtttctggaatgcggcatttgccgttgtgatactgggtacatcggcaaaaattgcgaatgccaaacacagggtagaagctcccaggaactggaaggcagctgcagaaaagataacaatagcattatttgtagcggcctgggggattgtgtatgtggccagtgcctgtgtcacacaagcgacgtccctgggaaactgatttatggacagtattgtgaatgcgatacaatcaattgcgagcgatataacggacaggtctgcggcggaccaggccgtggcctgtgtttttgtgggaaatgtcgatgccacccaggcttcgagggctccgcctgccagtgcgagcggactacagagggatgtctcaacccacggagggtggagtgtagtggccgtggcaggtgcagatgtaatgtttgtgaatgtcacagcgggtatcagctgccgctatgccaggagtgtcctgggtgtccatctccctgtgggaaatatatctcctgtgctgagtgcctaaaattcgagaaaggaccctttggaaagaactgtagtgctgcctgtccaggactacagttaagcaataaccctgtaaaaggcagaacttgcaaagagcgtgactccgaagggtgttgggtggcctatactctcgaacaacaagatggcatggatcgatatctgatctatgtggacgagagtagagagtgtgtcgcaggtccaaacatcgcagccatcgtgggcggtaccgttgcaggcatcgtgctgataggcattcttcttctggtgatctggaaagcccttatccatttgagcgacttgcgggagtacagacgcttcgaaaaggagaaactgaagtcccaatggaacaacgacaacccactgtttaagtcggccactacgactgtaatgaaccctaaatttgcagagagttag

SEQ ID NO: 4549 - DNA, 2310 bp, Artificial Sequence
  derived and/or modified sequence
atgctagggctccggccaccactccttgccctcgttgggctgttgtcgctcggatgtgtgctatctcaggagtgcacaaagtttaaagttagttcctgccgcgagtgcatcgagtccggcccaggctgcacttggtgccaaaaacttaactttaccggtcccggagaccccgattccatacgttgtgatacccggcctcagctcctcatgagggggtgtgctgccgacgacattatggaccctacttctcttgccgagacacaggaagaccacaacgggggacagaagcagctgtcacctcagaaggtcactttatatctgcgccctgggcaggccgcagcttttaatgtaacctttagacgcgctaaggggtatccaattgatctatactatctgatggatctctcctactcgatgctggacgacttacggaatgtaaagaaactgggcggagatcttctgagggcactcaacgagattacagagtcaggaagaatagggtttggaagcttcgtcgataagacagtgctgcctttcgtgaatacacacccggacaagttgcgcaatccctgtcccaataaggaaaaggaatgccagccgccattcgctttcaggcacgttctcaagctgaccaacaactctaatcagttccagaccgaggtgggcaagcaattaatttcagggaaccttgacgcccctgagggaggccttgacgcaatgatgcaggtggctgcttgccccgaagagatcggatggaggaacgtcacacgccttcttgtttttgctactgacgacgggttccacttcgccggtgacggaaagctcggggctattctcacgccaaatgatgggaggtgtcatctggaggacaacttgtataagcggagtaacgaatttgattaccctagcgtggggcagttggcccacaaactggccgaaaataatatccagccaatctttgccgtgaccagccgaatggtcaaaacctatgaaaaacttacagaaatcatacctaaaagcgcagtgggagaactctcagaagactcgtcgaatgtggttcaattgattaagaacgcgtacaataaactgtccagcagggtattcttggaccataatgccttgcctgatacactcaaggtgacgtacgattccttttgctccaacggcgtgactcaccgtaatcaacccagaggagattgcgatggggttcaaattaacgtgcctatcacattccaggttaaagtcacggctacagaatgcattcaggaacagagtttcgtgatccgtgccctaggcttcaccgacatcgtgaccgttcaagtgttgccgcagtgcgagtgtcggtgtcgcgaccaatcacgcgatcggtccctgtgccacgggaaaggcttcctggaatgtgggatctgtcgctgcgataccggctatatcggcaaaaactgtgaatgccagactcagggtcgctcctctcaggagctcgaaggcagctgcaggaaagataataactccattatttgctccggactcggggactgtgtctgtggtcagtgtctctgtcacacatccgacgtgccagggaaactcatttatggccagtactgtgagtgcgataccattaactgcgagagatacaacggccaggtgtgcggaggaccaggaaggggactttgcttctgcggcaaatgtcggtgtcaccccggattcgaaggcagcgcttgccagtgtgagcggacaacagagggttgtctgaacccaagacgcgtggagtgctctggaaggggtcggtgccggtgtaatgtgtgtgaatgccattccggataccagctgcccttgtgccaggaatgcccaggctgccccagtccttgtgggaagtacatctcctgcgccgagtgccttaagttcgaaaagggacccttcgggaagaattgttcagctgcctgccctggtctccaactctctaataatcccgtgaagggccgaacttgtaaagagcgcgattctgaaggctgttgggttgcctacacgctggaacagcaagacgggatggataggtacttaatatatgtggatgagagtcgagagtgtgttgctggtccaaacattgccgcaatagttgggggaaccgtcgcgggaattgtgctaatcggaatcttattgcttgtgatttggaaggccctgattcaccttagtgacttgagggaatatcggcgatttgagaaagagaaattgaaatcgcagtggaataacgataatccactgtttaaaagcgctaccacaaccgttatgaacccgaaatttgctgagtcttag

SEQ ID NO: 4550 - DNA, 363 bp, Artificial Sequence
  derived and/or modified sequence
atgttgggcctacgaccgcctctactcgcgctagtaggcctgctttcgctggggtgtgtgctctcccaggagtgcacaaaatttaaggttagttcatgtcgagagtgcatcgagagtggccctgggtgcacttggtgccagaagttgaacttcacgggtccgggagaccctgatagtattcgttgcgatactagaccccagctgttgatgagaggctgcgccgcagatgacattatggacccgacaagcctggcagagacacaggaagaccacaacggcggtcaaaagcagctgtcaccccagaaggtgaccctatatttgcgacctggacaggctgcagcctttaacgttaccttccgatag

SEQ ID NO: 4551 - DNA, 213 bp, Artificial Sequence
  derived and/or modified sequence
atgctcggattgagaccaccactgctagctttggttggactgctctctctgggatgcgtgttgtcccaggagtgcaccaaatttaaagtgtcctcctgccgagagtgcattgagagtggtcccggatgtacatggtgccagaaactaaacttcactggaccaggggaccctgactctataaggtgcgatacaagaccacagttattgatgtag

SEQ ID NO: 4552 - DNA, 150 bp, Artificial Sequence
  derived and/or modified sequence
atgcttggccttcggcctcctctgctcgccctggtgggcttgctgtctctaggatgcgtcctcagccaagaatgtaccaagttcaaggtcagctcttgtcgagaatgcatcgagtcgggcccaggatgcacatggtgtcagaagctgtag

SEQ ID NO: 4553 - DNA, 483 bp, Artificial Sequence
  derived and/or modified sequence
atgctgggcttgaggccccctctgctcgcattagtgggcctcttatctctgggctgtgtcctgagtcaggaatgcaccaaattcaaagtgagctcttgccgcgagtgcatcgaatctgggcctggatgcacatggtgccagaaacttaacttcacaggacctggtgatcctgactccatcaggtgtgacacacgacctcagctactgatgcggggatgcgccgcagacgatatcatggatccaacttccctggcggagacacaggaggaccataatggcggtcagaagcaactgagcccacagaaagtcacactgtacctgcggccagggcaagctgctgctttcaatgtcacgttcagacgcgcaaaaggatatcccatagatctctattatctgatggatctctcttattccatgctggatgacctccgtaacgtcaaaaaactcgggggagatttgctgcgggcacttaacgagatatag

SEQ ID NO: 4554 - DNA, 501 bp, Artificial Sequence
  derived and/or modified sequence
atgttggggttacggcctcctctgctggcgctggttggactattatctctgggatgcgttctatcccaagaatgtacaaagttcaaagtgtcctcgtgtagggagtgcatcgagagtgggcctgggtgcacttggtgccagaaattaaattttacaggtccaggtgacccggattctatccggtgcgacacaagacctcagttactgatgcggggatgtgccgctgacgatataatggatcccacgtccctggctgagacgcaggaggatcacaatgggggacagaagcaattatcccctcagaaggtgaccttgtatcttagacctggccaagctgcggcttttaacgtgaccttcaggcgtgcgaaagggtacccaatcgacctctattacttaatggacctgagctacagcatgctggatgacctccgtaatgttaagaaattgggaggagacttgctgagggccctgaatgagattaccgagtctgggagaatctag

SEQ ID NO: 4555 - protein, 788 aa, Artificial Sequence
  derived and/or modified sequence
MRARPRPRPLWATVLALGALAGVGVGGPNICTTRGVSSCQQCLAVSPMCAWCSDEALPLGSPRCDLKENLLKDNCAPESIEFPVSEARVLEDRPLSDKGSGDSSQVTQVSPQRIALRLRPDDSKNFSIQVRQVEDYPVDIYYLMDLSYSMKDDLWSIQNLGTKLATQMRKLTSNLRIGFGAFVDKPVSPYMYISPPEALENPCYDMKTTCLPMFGYKHVLTLTDQVTRFNEEVKKQSVSRNRDAPEGGFDAIMQATVCDEKIGWRNDASHLLVFTTDAKTHIALDGRLAGIVQPNDGQCHVGSDNHYSASTTMDYPSLGLMTEKLSQKNINLIFAVTENVVNLYQNYSELIPGTTVGVLSMDSSNVLQLIVDAYGKIRSKVELEVRDLPEELSLSFNATCLNNEVIPGLKSCMGLKIGDTVSFSIEAKVRGCPQEKEKSFTIKPVGFKDSLIVQVTFDCDCACQAQAEPNSHRCNNGNGTFECGVCRCGPGWLGSQCECSEEDYRPSQQDECSPREGQPVCSQRGECLCGQCVCHSSDFGKITGKYCECDDFSCVRYKGEMCSGHGQCSCGDCLCDSDWTGYYCNCTTRTDTCMSSNGLLCSGRGKCECGSCVCIQPGSYGDTCEKCPTCPDACTFKKECVECKKFDRGALHDENTCNRYCRDEIESVKELKDTGKDAVNCTYKNEDDCVVRFQYYEDSSGKSILYVVEEPECPKGPDILVVLLSVMGAILLIGLAALLIWKLLITIHDRKEFAKFEEERARAKWDTANNPLYKEATSTFTNITYRGT

SEQ ID NO: 4556 - protein, 751 aa, Artificial Sequence
  derived and/or modified sequence
MCAWCSDEALPLGSPRCDLKENLLKDNCAPESIEFPVSEARVLEDRPLSDKGSGDSSQVTQVSPQRIALRLRPDDSKNFSIQVRQVEDYPVDIYYLMDLSYSMKDDLWSIQNLGTKLATQMRKLTSNLRIGFGAFVDKPVSPYMYISPPEALENPCYDMKTTCLPMFGYKHVLTLTDQVTRFNEEVKKQSVSRNRDAPEGGFDAIMQATVCDEKIGWRNDASHLLVFTTDAKTHIALDGRLAGIVQPNDGQCHVGSDNHYSASTTMDYPSLGLMTEKLSQKNINLIFAVTENVVNLYQNYSELIPGTTVGVLSMDSSNVLQLIVDAYGKIRSKVELEVRDLPEELSLSFNATCLNNEVIPGLKSCMGLKIGDTVSFSIEAKVRGCPQEKEKSFTIKPVGFKDSLIVQVTFDCDCACQAQAEPNSHRCNNGNGTFECGVCRCGPGWLGSQCECSEEDYRPSQQDECSPREGQPVCSQRGECLCGQCVCHSSDFGKITGKYCECDDFSCVRYKGEMCSGHGQCSCGDCLCDSDWTGYYCNCTTRTDTCMSSNGLLCSGRGKCECGSCVCIQPGSYGDTCEKCPTCPDACTFKKECVECKKFDRGALHDENTCNRYCRDEIESVKELKDTGKDAVNCTYKNEDDCVVRFQYYEDSSGKSILYVVEEPECPKGPDILVVLLSVMGAILLIGLAALLIWKLLITIHDRKEFAKFEEERARAKWDTEILLYYCSFILVHQSLESLRTEFTSKQKDGN

SEQ ID NO: 4557 - DNA, 2367 bp, Artificial Sequence
  derived and/or modified sequence
atgagagccagacccagacccagacccctgtgggccaccgtgctggccctgggcgccctggccggcgtgggcgtgggcggccccaacatctgcaccaccagaggcgtgagcagctgccagcagtgcctggccgtgagccccatgtgcgcctggtgcagcgacgaggccctgcccctgggcagccccagatgcgacctgaaggagaacctgctgaaggacaactgcgcccccgagagcatcgagttccccgtgagcgaggccagagtgctggaggacagacccctgagcgacaagggcagcggcgacagcagccaggtgacccaggtgagcccccagagaatcgccctgagactgagacccgacgacagcaagaacttcagcatccaggtgagacaggtggaggactaccccgtggacatctactacctgatggacctgagctacagcatgaaggacgacctgtggagcatccagaacctgggcaccaagctggccacccagatgagaaagctgaccagcaacctgagaatcggcttcggcgccttcgtggacaagcccgtgagcccctacatgtacatcagcccccccgaggccctggagaacccctgctacgacatgaagaccacctgcctgcccatgttcggctacaagcacgtgctgaccctgaccgaccaggtgaccagattcaacgaggaggtgaagaagcagagcgtgagcagaaacagagacgcccccgagggcggcttcgacgccatcatgcaggccaccgtgtgcgacgagaagatcggctggagaaacgacgccagccacctgctggtgttcaccaccgacgccaagacccacatcgccctggacggcagactggccggcatcgtgcagcccaacgacggccagtgccacgtgggcagcgacaaccactacagcgccagcaccaccatggactaccccagcctgggcctgatgaccgagaagctgagccagaagaacatcaacctgatcttcgccgtgaccgagaacgtggtgaacctgtaccagaactacagcgagctgatccccggcaccaccgtgggcgtgctgagcatggacagcagcaacgtgctgcagctgatcgtggacgcctacggcaagatcagaagcaaggtggagctggaggtgagagacctgcccgaggagctgagcctgagcttcaacgccacctgcctgaacaacgaggtgatccccggcctgaagagctgcatgggcctgaagatcggcgacaccgtgagcttcagcatcgaggccaaggtgagaggctgcccccaggagaaggagaagagcttcaccatcaagcccgtgggcttcaaggacagcctgatcgtgcaggtgaccttcgactgcgactgcgcctgccaggcccaggccgagcccaacagccacagatgcaacaacggcaacggcaccttcgagtgcggcgtgtgcagatgcggccccggctggctgggcagccagtgcgagtgcagcgaggaggactacagacccagccagcaggacgagtgcagccccagagagggccagcccgtgtgcagccagagaggcgagtgcctgtgcggccagtgcgtgtgccacagcagcgacttcggcaagatcaccggcaagtactgcgagtgcgacgacttcagctgcgtgagatacaagggcgagatgtgcagcggccacggccagtgcagctgcggcgactgcctgtgcgacagcgactggaccggctactactgcaactgcaccaccagaaccgacacctgcatgagcagcaacggcctgctgtgcagcggcagaggcaagtgcgagtgcggcagctgcgtgtgcatccagcccggcagctacggcgacacctgcgagaagtgccccacctgccccgacgcctgcaccttcaagaaggagtgcgtggagtgcaagaagttcgacagaggcgccctgcacgacgagaacacctgcaacagatactgcagagacgagatcgagagcgtgaaggagctgaaggacaccggcaaggacgccgtgaactgcacctacaagaacgaggacgactgcgtggtgagattccagtactacgaggacagcagcggcaagagcatcctgtacgtggtggaggagcccgagtgccccaagggccccgacatcctggtggtgctgctgagcgtgatgggcgccatcctgctgatcggcctggccgccctgctgatctggaagctgctgatcaccatccacgacagaaaggagttcgccaagttcgaggaggagagagccagagccaagtgggacaccgccaacaaccccctgtacaaggaggccaccagcaccttcaccaacatcacctacagaggcacctag

SEQ ID NO: 4558 - DNA, 2256 bp, Artificial Sequence
  derived and/or modified sequence
atgtgcgcctggtgcagcgacgaggccctgcccctgggcagccccagatgcgacctgaaggagaacctgctgaaggacaactgcgcccccgagagcatcgagttccccgtgagcgaggccagagtgctggaggacagacccctgagcgacaagggcagcggcgacagcagccaggtgacccaggtgagcccccagagaatcgccctgagactgagacccgacgacagcaagaacttcagcatccaggtgagacaggtggaggactaccccgtggacatctactacctgatggacctgagctacagcatgaaggacgacctgtggagcatccagaacctgggcaccaagctggccacccagatgagaaagctgaccagcaacctgagaatcggcttcggcgccttcgtggacaagcccgtgagcccctacatgtacatcagcccccccgaggccctggagaacccctgctacgacatgaagaccacctgcctgcccatgttcggctacaagcacgtgctgaccctgaccgaccaggtgaccagattcaacgaggaggtgaagaagcagagcgtgagcagaaacagagacgcccccgagggcggcttcgacgccatcatgcaggccaccgtgtgcgacgagaagatcggctggagaaacgacgccagccacctgctggtgttcaccaccgacgccaagacccacatcgccctggacggcagactggccggcatcgtgcagcccaacgacggccagtgccacgtgggcagcgacaaccactacagcgccagcaccaccatggactaccccagcctgggcctgatgaccgagaagctgagccagaagaacatcaacctgatcttcgccgtgaccgagaacgtggtgaacctgtaccagaactacagcgagctgatccccggcaccaccgtgggcgtgctgagcatggacagcagcaacgtgctgcagctgatcgtggacgcctacggcaagatcagaagcaaggtggagctggaggtgagagacctgcccgaggagctgagcctgagcttcaacgccacctgcctgaacaacgaggtgatccccggcctgaagagctgcatgggcctgaagatcggcgacaccgtgagcttcagcatcgaggccaaggtgagaggctgcccccaggagaaggagaagagcttcaccatcaagcccgtgggcttcaaggacagcctgatcgtgcaggtgaccttcgactgcgactgcgcctgccaggcccaggccgagcccaacagccacagatgcaacaacggcaacggcaccttcgagtgcggcgtgtgcagatgcggccccggctggctgggcagccagtgcgagtgcagcgaggaggactacagacccagccagcaggacgagtgcagccccagagagggccagcccgtgtgcagccagagaggcgagtgcctgtgcggccagtgcgtgtgccacagcagcgacttcggcaagatcaccggcaagtactgcgagtgcgacgacttcagctgcgtgagatacaagggcgagatgtgcagcggccacggccagtgcagctgcggcgactgcctgtgcgacagcgactggaccggctactactgcaactgcaccaccagaaccgacacctgcatgagcagcaacggcctgctgtgcagcggcagaggcaagtgcgagtgcggcagctgcgtgtgcatccagcccggcagctacggcgacacctgcgagaagtgccccacctgccccgacgcctgcaccttcaagaaggagtgcgtggagtgcaagaagttcgacagaggcgccctgcacgacgagaacacctgcaacagatactgcagagacgagatcgagagcgtgaaggagctgaaggacaccggcaaggacgccgtgaactgcacctacaagaacgaggacgactgcgtggtgagattccagtactacgaggacagcagcggcaagagcatcctgtacgtggtggaggagcccgagtgccccaagggccccgacatcctggtggtgctgctgagcgtgatgggcgccatcctgctgatcggcctggccgccctgctgatctggaagctgctgatcaccatccacgacagaaaggagttcgccaagttcgaggaggagagagccagagccaagtgggacaccgagatcctgctgtactactgcagcttcatcctggtgcaccagagcctggagagcctgagaaccgagttcaccagcaagcagaaggacggcaactag

SEQ ID NO: 4559 - DNA, 2367 bp, Artificial Sequence
  derived and/or modified sequence
atgcgagcacgaccccgccccagacccctctgggccacagtgttagcgctgggagcgctggccggtgtcggggtggggggaccaaacatatgtacaacccggggggtcagttcttgtcagcaatgtcttgctgtttcgcctatgtgcgcctggtgtagtgacgaggctctgcccctgggatctccgagatgcgacctcaaggagaacttattgaaggataactgcgcacctgagagtatcgagtttcctgtgtccgaagcacgagtcctggaggatcggccacttagtgataaaggctcaggcgacagctcacaagtgacacaggtttccccccaacgcatcgcccttcgcctgcgtcccgacgattctaagaactttagcatccaggttcggcaggtagaggattaccccgttgatatttattacctgatggaccttagttactccatgaaagacgacctgtggagtatccagaacctgggtactaaacttgccacccagatgcggaagctgacaagtaatctgcgaattggatttggagcatttgtcgataaaccagtgtccccctacatgtatatttcgccacccgaagctcttgagaacccctgttacgacatgaagaccacgtgcttgcctatgttcggatacaaacacgtgctgaccctaactgaccaggtcaccaggttcaatgaagaagttaagaaacagagcgtgtctcgaaaccgcgatgcaccagagggcggattcgacgccatcatgcaggccacagtatgcgacgagaaaataggctggaggaatgacgccagtcacctcctcgtctttaccacagacgctaaaacccacatagcccttgatggacgcctggccggtatcgtccagcctaacgatggtcagtgtcacgtcgggtctgacaatcactatagcgcttccaccactatggattatccctcccttggcctgatgactgagaagctgtcccagaaaaatatcaatttgattttcgctgttaccgaaaacgtggtgaatctctatcagaactatagtgagttgattccagggaccacagtcggtgtcttatcgatggactcaagtaatgttttgcagctgatagtggacgcgtatgggaagatacggtcgaaagttgaactggaggtgcgggatctccctgaggaactttctttgtctttcaatgcaacttgcctaaacaatgaggtgatccctgggctcaagagctgcatgggtttgaaaatcggcgataccgtaagcttcagcattgaggcaaaggtaagggggtgcccccaagagaaggagaaatcatttacaattaaacccgttggattcaaggactctctgatcgtgcaagtaaccttcgactgtgactgcgcttgccaggctcaagccgaaccaaattctcaccgctgcaacaatggaaacggtacgtttgaatgtggagtttgccgatgtggtccaggatggctagggagccagtgcgagtgcagcgaggaggattaccgaccctctcaacaggacgagtgctctcctagggaggggcagcctgtgtgttcacaacgaggagagtgcctatgtggccagtgcgtgtgtcactcaagcgattttggtaagattacggggaagtactgtgaatgcgacgacttttcatgcgtgcggtataagggcgaaatgtgctccggccacggccaatgtagctgtggcgactgcttgtgcgatagcgactggacaggctattattgcaactgtaccaccagaaccgacacttgcatgagctcaaacggccttttatgctccggcaggggtaagtgtgaatgcggcagctgtgtttgtatccagcctggtagctacggcgacacctgtgagaaatgtcccacttgtccggacgcttgtaccttcaaaaaggagtgcgtggagtgcaagaagtttgacagaggcgcactgcatgacgaaaatacatgcaatcgttactgcagagatgagatcgagagcgtaaaggagctgaaggataccggtaaagacgcggttaactgtacttacaaaaacgaggatgattgcgtcgtcaggtttcagtactatgaggattcatctggtaaatctatcctgtacgtggtggaagagcctgaatgcccgaaggggcccgacattctcgtggtgctgctgtcagtgatgggtgctatcctcctgatcgggctggccgcacttttaatctggaaactcctgatcacaatccatgatcgaaaggaattcgcaaagttcgaggaagagagagctagagcgaagtgggatacagctaacaaccccctttacaaagaagcaacgtcgacatttaccaatataacttatcgcggcacatag

SEQ ID NO: 4560 - DNA, 2256 bp, Artificial Sequence
  derived and/or modified sequence
atgtgtgcctggtgctcagatgaggcgctgcccctggggagtccaaggtgtgatctgaaggagaacctgctcaaggataattgtgccccagaatctatcgagttccccgtgtcagaggcccgtgttctggaggacaggccactgagcgataagggaagcggggactcttctcaggtgacccaggtaagtccccaaagaatcgcccttcggctgcgacccgatgacagcaaaaacttctcaattcaggtgaggcaggtagaggactacccagtggacatttattatctcatggacctgtcttattccatgaaagatgatttatggagcatccagaaccttggtacgaagcttgccacacagatgcgtaaattgacctctaacctcagaattggattcggtgcattcgtcgacaaacctgtatcaccatacatgtacatttctcctccagaggccctggaaaacccttgctatgacatgaagaccacttgcctgcccatgttcggatataagcacgtactgacgcttaccgaccaggtcactaggtttaacgaggaagtcaaaaaacagtcagtgagccggaatagggatgcccccgaaggcggcttcgatgctatcatgcaagccactgtttgcgacgagaaaattggttggaggaacgacgcatcacacttgctggtgtttaccaccgacgccaagacacatattgcactggacggacgattggctggaatagtgcagcccaacgatggtcagtgtcacgtcggctccgacaatcactacagcgctagcaccaccatggactacccaagcttagggctcatgaccgagaagctcagccaaaagaacataaacctcatctttgcagtgactgagaacgtcgtgaatttataccagaattattccgagctgatccctggtaccactgttggggtgctgtccatggacagtagtaacgtgctgcagctgatagtcgatgcttatggaaagattcgctcaaaagtggaattggaggtccgcgatctgccagaggagctctctctgagctttaacgctacctgccttaacaacgaagttattccaggattgaaatcatgtatgggcctaaaaatcggagacactgttagcttctccattgaagctaaagttaggggctgtccccaagagaaggaaaagagtttcacaatcaaacctgtgggcttcaaggatagcctgattgttcaagtgacatttgactgcgactgcgcttgccaagcccaggccgaacccaactctcataggtgcaataatggtaacgggaccttcgagtgtggtgtgtgtcggtgtggccccggttggctcggcagccaatgcgagtgcagtgaggaggactatcgtccctcccagcaggacgaatgcagtccacgggaggggcaacctgtgtgcagtcagagaggggaatgtctctgcggacagtgcgtgtgccattcaagcgactttggcaagattaccggcaaatattgcgaatgtgacgacttctcctgtgtcaggtataagggtgaaatgtgttccggtcatggccaatgctcctgcggagattgtctgtgcgactcagactggacaggctactattgtaattgtacgactcgcacggacacctgtatgtcctcaaatggactgctgtgctccggaagaggaaagtgtgagtgcggcagctgtgtatgtatccaaccaggctcttatggagatacgtgcgagaagtgcccgacctgcccggacgcgtgtacctttaaaaaagaatgtgtggagtgtaaaaagttcgataggggtgctctgcacgacgagaatacctgtaatcgttattgtcgcgacgaaattgagtctgtcaaggagctcaaggacacaggaaaggacgccgtcaattgcacttacaaaaacgaggacgattgtgtggtgagattccagtattatgaggattctagtggaaagagcatactgtacgtggtggaagagcccgagtgtcccaaggggccagatatcctggtggttctgctctcagtcatgggtgctatcttgctgatcggtcttgctgcattattaatttggaaactgcttataactatccacgataggaaagagttcgcgaagttcgaggaagagcgagccagggcaaagtgggatactgaaattctgttgtattactgctcctttatactggtgcaccagtctctggagagtctgcgtactgaatttacttctaagcagaaggatggtaattag

SEQ ID NO: 4561 - DNA, 2367 bp, Artificial Sequence
  derived and/or modified sequence
atgcgggctcggccacggccacgaccactgtgggcgactgttctggctctcggagcccttgccggcgtgggggtgggtggccctaatatatgcaccacgcgtggggtttcttcctgccagcagtgcctggcagtaagtccgatgtgcgcttggtgctcggacgaggcgttacctttagggtccccacgctgcgacctgaaggagaatttattgaaggacaattgcgctccagagagcatcgagtttccagtcagcgaggctagggtattagaggaccgacccttaagtgataagggatccggggattctagtcaggtgacccaagtgtctccacagcgcattgccttgcggcttaggcccgatgactccaagaacttctctattcaagtgaggcaggtggaagattaccccgtcgacatctactatttgatggacctgtcatactcaatgaaggacgatctttggtccattcagaacctgggaaccaaacttgccacccagatgcggaaattaacctccaacctaagaatcggattcggtgcattcgtcgataagccagtaagcccgtacatgtatatttcaccaccagaagcactggaaaatccgtgctatgacatgaagacgacatgtctgcccatgttcggatataagcacgtcctgactctgaccgaccaggtaacccggtttaacgaggaggtaaagaaacagagcgtgagtagaaatcgagacgcgcccgagggaggattcgacgccatcatgcaggccaccgtgtgtgacgaaaagatcgggtggaggaacgatgcctcacacctactggttttcacaacggacgcaaaaacccacattgcgctggatggcaggctggcaggcattgtgcaacccaacgatggccagtgtcatgtcggtagtgacaatcattattctgcatctaccactatggactatcctagtcttggactcatgacagagaaattatcccagaaaaatatcaacttgattttcgctgtcaccgagaacgttgtaaatctctatcagaactacagcgaactcatacccggaacaacagtgggtgtgctaagcatggactcaagcaatgttttgcagttgattgtcgatgcttacggcaagattcgcagtaaagttgaactggaggtgagagatctccccgaggagttgagtctcagttttaacgctacatgcctgaacaacgaagtcattcccggtctcaagtcttgtatgggactcaagattggagataccgtttctttttccattgaagctaaagtgcgcggctgtcctcaagagaaagaaaaaagtttcaccattaagcccgtcggtttcaaggatagcctcatcgtccaggttaccttcgactgcgactgtgcatgccaggcccaggcagaacctaattctcaccggtgtaacaacggaaatggcacatttgagtgcggcgtttgtcggtgcggccccggttggttgggtagtcagtgcgagtgtagtgaagaggactatcggccatctcaacaggatgagtgttcaccccgggaaggtcagccagtgtgtagtcaacgcggggaatgtctttgcgggcaatgtgtatgccactctagtgatttcggcaaaattacaggaaaatactgcgagtgcgatgacttctcttgtgtgcgctataagggagagatgtgttcagggcacggccagtgctcctgtggtgactgtctctgtgattccgactggaccggatattattgcaattgtacgacaagaactgacacatgtatgagtagcaatggcctcctttgctccggtagagggaagtgcgaatgcggaagttgcgtttgtatccaacctggaagctacggcgacacatgtgagaagtgccccacctgtccagacgcttgtacctttaaaaaggagtgcgttgaatgtaaaaaattcgaccggggcgcacttcacgacgagaatacatgtaatcgctattgccgcgatgagatcgagtcagtgaaagaactcaaggacaccggtaaagacgccgttaattgcacttacaagaatgaagacgactgcgtcgttagattccagtactacgaggattcatcgggaaaatccatcctgtatgtggttgaggagcctgagtgccctaaagggccagacatcttggtcgtactgctctctgtgatgggcgccatacttctcattggcctcgccgctcttctgatatggaagcttctcatcaccattcacgacaggaaagagttcgcaaagttcgaagaagagcgtgctagagcaaagtgggatactgctaacaacccattatataaagaggcaacttcaacgttcacgaatataacctacaggggaacatag

SEQ ID NO: 4562 - DNA, 2367 bp, Artificial Sequence
  derived and/or modified sequence
atgagggcccggccccggccccggcccctgtgggccaccgtgctggccctgggcgccctggccggcgtgggcgtgggcggccccaacatctgcaccacccggggcgtgagcagctgccagcagtgcctggccgtgagccccatgtgtgcctggtgcagtgatgaggccctgcccctgggcagcccccgctgtgacctgaaggagaacctgctgaaggacaactgtgcccctgagagcattgagttccctgtgtctgaggcccgggtgctggaggaccggcccctgagtgacaagggcagcggggacagcagccaggtgacccaggtgagcccccagagaattgccctgcggctgcggccagatgacagcaagaacttcagcatccaggtgcggcaggtggaggactaccctgtggacatctactacctgatggacctgagctacagcatgaaggatgacctgtggagcatccagaacctgggcaccaagctggccacccagatgaggaagctgaccagcaacctgagaattggatttggagcctttgtggacaagcctgtgagcccctacatgtacatcagccccccagaggccctggagaacccctgctatgacatgaagaccacctgcctgcccatgtttggctacaagcacgtgctgaccctgacagaccaggtgacccgcttcaatgaggaggtgaagaagcagagcgtgtccaggaacagagatgcccctgagggcggctttgatgccatcatgcaggccaccgtgtgtgatgagaagattggctggagaaatgatgccagccacctgctggtgttcaccacagatgccaagacccacatcgccctggatggccgcctggccggcatcgtgcagcccaatgatggccagtgccacgtgggcagtgacaaccactacagcgccagcaccaccatggactaccccagcctgggcctgatgacagagaagctgagccagaagaacatcaacctgatctttgctgtgacagaaaatgtggtgaacctgtaccagaactacagcgagctgatccctggcaccaccgtgggcgtgctgtccatggacagcagcaatgtgctgcagctgattgtggatgcctacggcaagatccgcagcaaggtggagctggaggtgcgggacctgcctgaggagctgagcctgtccttcaatgccacctgcctgaacaatgaagtcatccctggcctgaagagctgcatgggcctgaagattggagacacagtgtccttcagcattgaggccaaggtgcggggctgcccccaggagaaggagaagagcttcaccatcaagcctgtgggcttcaaggacagcctcatcgtgcaggtgacctttgactgtgactgtgcctgccaggcccaggccgagcccaacagccaccgctgcaacaatggaaatggcacctttgaatgtggggtgtgccgctgtggccctggctggctgggcagccagtgtgagtgcagcgaggaggactaccggcccagccagcaggatgaatgtagcccccgggagggccagcctgtgtgcagccagagaggagagtgcctgtgtggccagtgtgtgtgccacagcagtgactttgggaagatcaccgggaagtactgtgaatgtgatgacttcagctgtgtgcgctacaagggggagatgtgcagcggccacggccagtgcagctgtggggactgcctgtgtgacagcgactggacaggctactactgcaactgcaccaccaggacagacacctgcatgagcagcaatggcctgctgtgcagcggccggggcaaatgtgaatgtggcagctgtgtgtgcatccagcccggcagctatggagacacctgtgagaagtgccccacctgcccagatgcctgcaccttcaagaaggaatgtgtggagtgcaagaagtttgacagaggagccctgcatgatgagaacacctgcaaccgctactgcagagatgaaattgaatctgtgaaggagctgaaggacaccgggaaggatgctgtgaactgcacctacaagaatgaagatgactgtgtggtgcgcttccagtactatgaggacagcagcggcaagagcatcctgtatgtggtggaggagcctgagtgccccaagggccctgacatcctggtggtgctgctgtctgtgatgggcgccatcctgctgattggcctggccgccctgctgatctggaagctgctgatcaccatccatgacaggaaggagtttgccaagtttgaggaggagcgggcccgggccaagtgggacacagccaacaaccccctgtacaaggaggccaccagcaccttcaccaacatcacctaccggggcacctag

SEQ ID NO: 4563 - DNA, 2256 bp, Artificial Sequence
  derived and/or modified sequence
atgtgtgcctggtgcagtgatgaggccctgcccctgggcagcccccgctgtgacctgaaggagaacctgctgaaggacaactgtgcccctgagagcattgagttccctgtgtctgaggcccgggtgctggaggaccggcccctgagtgacaagggcagcggggacagcagccaggtgacccaggtgagcccccagagaattgccctgcggctgcggccagatgacagcaagaacttcagcatccaggtgcggcaggtggaggactaccctgtggacatctactacctgatggacctgagctacagcatgaaggatgacctgtggagcatccagaacctgggcaccaagctggccacccagatgaggaagctgaccagcaacctgcgcatcggctttggagcctttgtggacaagcctgtgagcccctacatgtacatcagccccccagaggccctggagaacccctgctatgacatgaagaccacctgcctgcccatgtttggctacaagcacgtgctgaccctgacagaccaggtgacccgcttcaatgaggaggtgaagaagcagagcgtgtccaggaacagagatgcccctgagggcggctttgatgccatcatgcaggccaccgtgtgtgatgagaagattggctggagaaatgatgccagccacctgctggtgttcaccacagatgccaagacccacatcgccctggatggccgcctggccggcatcgtgcagcccaatgatggccagtgccacgtgggcagtgacaaccactacagcgccagcaccaccatggactaccccagcctgggcctgatgacagagaagctgagccagaagaacatcaacctgatctttgctgtgacagaaaatgtggtgaacctgtaccagaactacagcgagctgatccctggcaccaccgtgggcgtgctgtccatggacagcagcaatgtgctgcagctgattgtggatgcctacggcaagatccgcagcaaggtggagctggaggtgcgggacctgcctgaggagctgagcctgtccttcaatgccacctgcctgaacaatgaggtgattcctggcctgaagagctgcatgggcctgaagatcggggacacagtgtccttcagcattgaggccaaggtgcggggctgcccccaggagaaggagaagagcttcaccatcaagcctgtgggcttcaaggacagcctgattgtgcaggtgacctttgactgtgactgtgcctgccaggcccaggccgagcccaacagccaccgctgcaacaatggaaatggcacctttgaatgtggggtgtgccgctgtggccctggctggctgggcagccagtgtgaatgttctgaggaggactaccggcccagccagcaggatgagtgcagcccccgggagggccagcctgtgtgcagccagagaggagaatgtctgtgtggccagtgtgtgtgccacagcagtgactttgggaagatcaccgggaagtactgtgaatgtgatgacttcagctgtgtgcgctacaagggggagatgtgcagcggccacggccagtgcagctgtggggactgcctgtgtgacagcgactggacaggctactactgcaactgcaccaccaggacagacacctgcatgagcagcaatggcctgctgtgcagcggccggggcaaatgtgaatgtggcagctgtgtgtgcatccagcccggcagctatggagacacctgtgagaagtgccccacctgcccagatgcctgcaccttcaagaaggaatgtgtggagtgcaagaagtttgacagaggagccctgcatgatgagaacacctgcaaccgctactgcagagatgaaattgagagcgtgaaggagctgaaggacaccgggaaggatgctgtgaactgcacctacaagaatgaagatgactgtgtggtgcgcttccagtactatgaggacagcagcggcaagagcatcctgtatgtggtggaggagccagaatgtcccaagggccctgacatcctggtggtgctgctgtctgtgatgggcgccatcctgctgattggcctggccgccctgctgatctggaagctgctgatcaccatccatgacaggaaggagtttgccaagtttgaggaggagcgggcccgggccaagtgggacacagagatcctgctgtactactgcagcttcatcctggtgcaccagagcctggagagcctgaggacagagttcaccagcaagcagaaggatggcaactag

SEQ ID NO: 4564 - DNA, 4894 bp, Artificial Sequence
  derived and/or modified sequence
cgccgcgggaggcggacgagatgcgagcgcggccgcggccccggccgctctgggcgactgtgctggcgctgggggcgctggcgggcgttggcgtaggagggcccaacatctgtaccacgcgaggtgtgagctcctgccagcagtgcctggctgtgagccccatgtgtgcctggtgctctgatgaggccctgcctctgggctcacctcgctgtgacctgaaggagaatctgctgaaggataactgtgccccagaatccatcgagttcccagtgagtgaggcccgagtactagaggacaggcccctcagcgacaagggctctggagacagctcccaggtcactcaagtcagtccccagaggattgcactccggctccggccagatgattcgaagaatttctccatccaagtgcggcaggtggaggattaccctgtggacatctactacttgatggacctgtcttactccatgaaggatgatctgtggagcatccagaacctgggtaccaagctggccacccagatgcgaaagctcaccagtaacctgcggattggcttcggggcatttgtggacaagcctgtgtcaccatacatgtatatctccccaccagaggccctcgaaaacccctgctatgatatgaagaccacctgcttgcccatgtttggctacaaacacgtgctgacgctaactgaccaggtgacccgcttcaatgaggaagtgaagaagcagagtgtgtcacggaaccgagatgccccagagggtggctttgatgccatcatgcaggctacagtctgtgatgaaaagattggctggaggaatgatgcatcccacttgctggtgtttaccactgatgccaagactcatatagcattggacggaaggctggcaggcattgtccagcctaatgacgggcagtgtcatgttggtagtgacaatcattactctgcctccactaccatggattatccctctttggggctgatgactgagaagctatcccagaaaaacatcaatttgatctttgcagtgactgaaaatgtagtcaatctctatcagaactatagtgagctcatcccagggaccacagttggggttctgtccatggattccagcaatgtcctccagctcattgttgatgcttatgggaaaatccgttctaaagtagagctggaagtgcgtgacctccctgaagagttgtctctatccttcaatgccacctgcctcaacaatgaggtcatccctggcctcaagtcttgtatgggactcaagattggagacacggtgagcttcagcattgaggccaaggtgcgaggctgtccccaggagaaggagaagtcctttaccataaagcccgtgggcttcaaggacagcctgatcgtccaggtcacctttgattgtgactgtgcctgccaggcccaagctgaacctaatagccatcgctgcaacaatggcaatgggacctttgagtgtggggtatgccgttgtgggcctggctggctgggatcccagtgtgagtgctcagaggaggactatcgcccttcccagcaggacgaatgcagcccccgggagggtcagcccgtctgcagccagcggggcgagtgcctctgtggtcaatgtgtctgccacagcagtgactttggcaagatcacgggcaagtactgcgagtgtgacgacttctcctgtgtccgctacaagggggagatgtgctcaggccatggccagtgcagctgtggggactgcctgtgtgactccgactggaccggctactactgcaactgtaccacgcgtactgacacctgcatgtccagcaatgggctgctgtgcagcggccgcggcaagtgtgaatgtggcagctgtgtctgtatccagccgggctcctatggggacacctgtgagaagtgccccacctgcccagatgcctgcacctttaagaaagaatgtgtggagtgtaagaagtttgaccggggagccctacatgacgaaaatacctgcaaccgttactgccgtgacgagattgagtcagtgaaagagcttaaggacactggcaaggatgcagtgaattgtacctataagaatgaggatgactgtgtcgtcagattccagtactatgaagattctagtggaaagtccatcctgtatgtggtagaagagccagagtgtcccaagggccctgacatcctggtggtcctgctctcagtgatgggggccattctgctcattggccttgccgccctgctcatctggaaactcctcatcaccatccacgaccgaaaagaattcgctaaatttgaggaagaacgcgccagagcaaaatgggacacagccaacaacccactgtataaagaggccacgtctaccttcaccaatatcacgtaccggggcacttaatgataagcagtcatcctcagatcattatcagcctgtgccacgattgcaggagtccctgccatcatgtttacagaggacagtatttgtggggagggatttggggctcagagtggggtaggttgggagaatgtcagtatgtggaagtgtgggtctgtgtgtgtgtatgtgggggtctgtgtgtttatgtgtgtgtgttgtgtgtgggagtgtgtaatttaaaattgtgatgtgtcctgataagctgagctccttagcctttgtcccagaatgcctcctgcagggattcttcctgcttagcttgagggtgactatggagctgagcaggtgttcttcattacctcagtgagaagccagctttcctcatcaggccattgtccctgaagagaagggcagggctgaggcctctcattccagaggaagggacaccaagccttggctctaccctgagttcataaatttatggttctcaggcctgactctcagcagctatggtaggaactgctgggcttggcagcccgggtcatctgtacctctgcctcctttcccctccctcaggccgaaggaggagtcagggagagctgaactattagagctgcctgtgccttttgccatcccctcaacccagctatggttctctcgcaagggaagtccttgcaagctaattctttgacctgttgggagtgaggatgtctgggccactcaggggtcattcatggcctgggggatgtaccagcatctcccagttcataatcacaacccttcagatttgccttattggcagctctactctggaggtttgtttagaagaagtgtgtcacccttaggccagcaccatctctttacctcctaattccacaccctcactgctgtagacatttgctatgagctggggatgtctctcatgaccaaatgcttttcctcaaagggagagagtgctattgtagagccagaggtctggccctatgcttccggcctcctgtccctcatccatagcacctccacatacctggccctgtgccttggtgtgctgtatccatccatggggctgattgtatttaccttctacctcttggctgccttgtgaaggaattattcccatgagttggctgggaataagtgccaggatggaatgatgggtcagttgtatcagcacgtgtggcctgttcttctatgggttggacaacctcattttaactcagtctttaatctgagaggccacagtgcaattttattttatttttctcatgatgaggttttcttaacttaaaagaacatgtatataaacatgcttgcattatatttgtaaatttatgtgatggcaaagaaggagagcataggaaaccacacagacttgggcagggtacagacactcccacttggcatcattcacagcaagtcactggccagtggctggatctgtgaggggctctctcatgatagaaggctatggggatagatgtgtggacacattggacctttcctgaggaagagggactgttcttttgtcccagaaaagcagtggctccattggtgttgacatacatccaacattaaaagccacccccaaatgcccaagaaaaaaagaaagacttatcaacatttgttccatgagcagaaaactggagctctggcctcagtgttacagctaaataatctttaattaaggcaagtcactttcttcttcttaaagctgttttctagtttgagaaatgatgggattttagcagccagtcttgaaggtctctttcagtatcaacattctaagatgctgggacttactgtgtcatcaaatgtgcggttaagattctctgggatattgatactgtttgtgtttttagttgggagatctgagagacctggctttggcaagagcagatgtcattccatatcacctttctcaatgaaagtctcattctatcctctctccaaacccgttttccaacatttgttaatagttacgtctctcctgatgtagcacttaagcttcatttagttattatttctttcttcactttgcacacatttgcatccacatattagggaagaggaatccataagtagctgaaatatctattctgtattattgtgttaacattgagaataagccttggaattagatatggggcaatgactgagccctgtctcacccatggattactccttactgtagggaatggcagtatggtagagggataaatagggggcggggagggatagtcatggatccaagaagtccttagaaatagtggcagggaacaggtgtggaagctcatgcctgtaattataaccttcagctactaagacaggtgtggtggctcacgcctgtgattataatcttcagttactaagacagagtccatgagagtgttaatgggacattttctttagataagatgttttatatgaagaaactgtatcaaagggggaagaaaatgtatttaacaggtgaatcaaatcaggaatcttgtctgagctactggaatgaagttcacaggtcttgaagacca

SEQ ID NO: 4565 - DNA, 2785 bp, Artificial Sequence
  derived and/or modified sequence
gactgtgctggcgctgggggcgctggcgggcgttggcgtaggagggcccaacatctgtaccacgcgaggtgtgagctcctgccagcagtgcctggctgtgagccccatgtgtgcctggtgctctgatgaggccctgcctctgggctcacctcgctgtgacctgaaggagaatctgctgaaggataactgtgccccagaatccatcgagttcccagtgagtgaggcccgagtactagaggacaggcccctcagcgacaagggctctggagacagctcccaggtcactcaagtcagtccccagaggattgcactccggctccggccagatgattcgaagaatttctccatccaagtgcggcaggtggaggattaccctgtggacatctactacttgatggacctgtcttactccatgaaggatgatctgtggagcatccagaacctgggtaccaagctggccacccagatgcgaaagctcaccagtaacctgcggattggcttcggggcatttgtggacaagcctgtgtcaccatacatgtatatctccccaccagaggccctcgaaaacccctgctatgatatgaagaccacctgcttgcccatgtttggctacaaacacgtgctgacgctaactgaccaggtgacccgcttcaatgaggaagtgaagaagcagagtgtgtcacggaaccgagatgccccagagggtggctttgatgccatcatgcaggctacagtctgtgatgaaaagattggctggaggaatgatgcatcccacttgctggtgtttaccactgatgccaagactcatatagcattggacggaaggctggcaggcattgtccagcctaatgacgggcagtgtcatgttggtagtgacaatcattactctgcctccactaccatggattatccctctttggggctgatgactgagaagctatcccagaaaaacatcaatttgatctttgcagtgactgaaaatgtagtcaatctctatcagaactatagtgagctcatcccagggaccacagttggggttctgtccatggattccagcaatgtcctccagctcattgttgatgcttatgggaaaatccgttctaaagtagagctggaagtgcgtgacctccctgaagagttgtctctatccttcaatgccacctgcctcaacaatgaggtcatccctggcctcaagtcttgtatgggactcaagattggagacacggtgagcttcagcattgaggccaaggtgcgaggctgtccccaggagaaggagaagtcctttaccataaagcccgtgggcttcaaggacagcctgatcgtccaggtcacctttgattgtgactgtgcctgccaggcccaagctgaacctaatagccatcgctgcaacaatggcaatgggacctttgagtgtggggtatgccgttgtgggcctggctggctgggatcccagtgtgagtgctcagaggaggactatcgcccttcccagcaggacgaatgcagcccccgggagggtcagcccgtctgcagccagcggggcgagtgcctctgtggtcaatgtgtctgccacagcagtgactttggcaagatcacgggcaagtactgcgagtgtgacgacttctcctgtgtccgctacaagggggagatgtgctcaggccatggccagtgcagctgtggggactgcctgtgtgactccgactggaccggctactactgcaactgtaccacgcgtactgacacctgcatgtccagcaatgggctgctgtgcagcggccgcggcaagtgtgaatgtggcagctgtgtctgtatccagccgggctcctatggggacacctgtgagaagtgccccacctgcccagatgcctgcacctttaagaaagaatgtgtggagtgtaagaagtttgaccggggagccctacatgacgaaaatacctgcaaccgttactgccgtgacgagattgagtcagtgaaagagcttaaggacactggcaaggatgcagtgaattgtacctataagaatgaggatgactgtgtcgtcagattccagtactatgaagattctagtggaaagtccatcctgtatgtggtagaagagccagagtgtcccaagggccctgacatcctggtggtcctgctctcagtgatgggggccattctgctcattggccttgccgccctgctcatctggaaactcctcatcaccatccacgaccgaaaagaattcgctaaatttgaggaagaacgcgccagagcaaaatgggacacagaaatccttttgtactattgctcattcatacttgttcatcaaagcctggagtccttaaggacagaatttacctctaaacagaaagatggaaactaaagtacatttattctgccaggcagaggaaaatattgacttattagatgatggctctaattcttttgcaactgacttgtcatcaggaactattaaccacaagaaatacatcaagttttctaaaacaatagagaaggaaatttcaccggaaattaggagtttgagcccagaatataaaaaaatatttgaaacatcaataatcttttgtggagaagaaaagtcctctgatttttcaggagaaaaaaaagttgggagaaagagtttacaagtacaacagcacagtaaaagaactgagattatccctccttttctgaagctgtcaaaggagaaggtgacaaggaaagaaaactctttatgcaagttgccgaatcagtacagcgttcacaagacttcatcacctctttgtacatcttctgcaattactcg

SEQ ID NO: 4566 - DNA, 3995 bp, Artificial Sequence
  derived and/or modified sequence
gcgggaggcggacgagatgcgagcgcggccgcggccccggccgctctgggcgactgtgctggcgctgggggcgctggcgggcgttggcgtaggagggcccaacatctgtaccacgcgaggtgtgagctcctgccagcagtgcctggctgtgagccccatgtgtgcctggtgctctgatgaggccctgcctctgggctcacctcgctgtgacctgaaggagaatctgctgaaggataactgtgccccagaatccatcgagttcccagtgagtgaggcccgagtactagaggacaggcccctcagcgacaagggctctggagacagctcccaggtcactcaagtcagtccccagaggattgcactccggctccggccagatgattcgaagaatttctccatccaagtgcggcaggtggaggattaccctgtggacatctactacttgatggacctgtcttactccatgaaggatgatctgtggagcatccagaacctgggtaccaagctggccacccagatgcgaaagctcaccagtaacctgcggattggcttcggggcatttgtggacaagcctgtgtcaccatacatgtatatctccccaccagaggccctcgaaaacccctgctatgatatgaagaccacctgcttgcccatgtttggctacaaacacgtgctgacgctaactgaccaggtgacccgcttcaatgaggaagtgaagaagcagagtgtgtcacggaaccgagatgccccagagggtggctttgatgccatcatgcaggctacagtctgtgatgaaaagattggctggaggaatgatgcatcccacttgctggtgtttaccactgatgccaagactcatatagcattggacggaaggctggcaggcattgtccagcctaatgacgggcagtgtcatgttggtagtgacaatcattactctgcctccactaccatggattatccctctttggggctgatgactgagaagctatcccagaaaaacatcaatttgatctttgcagtgactgaaaatgtagtcaatctctatcagaactatagtgagctcatcccagggaccacagttggggttctgtccatggattccagcaatgtcctccagctcattgttgatgcttatgggaaaatccgttctaaagtagagctggaagtgcgtgacctccctgaagagttgtctctatccttcaatgccacctgcctcaacaatgaggtcatccctggcctcaagtcttgtatgggactcaagattggagacacggtgagcttcagcattgaggccaaggtgcgaggctgtccccaggagaaggagaagtcctttaccataaagcccgtgggcttcaaggacagcctgatcgtccaggtcacctttgattgtgactgtgcctgccaggcccaagctgaacctaatagccatcgctgcaacaatggcaatgggacctttgagtgtggggtatgccgttgtgggcctggctggctgggatcccagtgtgagtgctcagaggaggactatcgcccttcccagcaggacgaatgcagcccccgggagggtcagcccgtctgcagccagcggggcgagtgcctctgtggtcaatgtgtctgccacagcagtgactttggcaagatcacgggcaagtactgcgagtgtgacgacttctcctgtgtccgctacaagggggagatgtgctcaggccatggccagtgcagctgtggggactgcctgtgtgactccgactggaccggctactactgcaactgtaccacgcgtactgacacctgcatgtccagcaatgggctgctgtgcagcggccgcggcaagtgtgaatgtggcagctgtgtctgtatccagccgggctcctatggggacacctgtgagaagtgccccacctgcccagatgcctgcacctttaagaaagaatgtgtggagtgtaagaagtttgaccggggagccctacatgacgaaaatacctgcaaccgttactgccgtgacgagattgagtcagtgaaagagcttaaggacactggcaaggatgcagtgaattgtacctataagaatgaggatgactgtgtcgtcagattccagtactatgaagattctagtggaaagtccatcctgtatgtggtagaagagccagagtgtcccaagggccctgacatcctggtggtcctgctctcagtgatgggggccattctgctcattggccttgccgccctgctcatctggaaactcctcatcaccatccacgaccgaaaagaattcgctaaatttgaggaagaacgcgccagagcaaaatgggacacagccaacaacccactgtataaagaggccacgtctaccttcaccaatatcacgtaccggggcacttaatgataagcagtcatcctcagatcattatcagcctgtgccacgattgcaggagtccctgccatcatgtttacagaggacagtatttgtggggagggatttggggctcagagtggggtaggttgggagaatgtcagtatgtggaagtgtgggtctgtgtgtgtgtatgtgggggtctgtgtgtttatgtgtgtgtgttgtgtgtgggagtgtgtaatttaaaattgtgatgtgtcctgataagctgagctccttagcctttgtcccagaatgcctcctgcagggattcttcctgcttagcttgagggtgactatggagctgagcaggtgttcttcattacctcagtgagaagccagctttcctcatcaggccattgtccctgaagagaagggcagggctgaggcctctcattccagaggaagggacaccaagccttggctctaccctgagttcataaatttatggttctcaggcctgactctcagcagctatggtaggaactgctgggcttggcagcccgggtcatctgtacctctgcctcctttcccctccctcaggccgaaggaggagtcagggagagctgaactattagagctgcctgtgccttttgccatcccctcaacccagctatggttctctcgcaagggaagtccttgcaagctaattctttgacctgttgggagtgaggatgtctgggccactcaggggtcattcatggcctgggggatgtaccagcatctcccagttcataatcacaacccttcagatttgccttattggcagctctactctggaggtttgtttagaagaagtgtgtcacccttaggccagcaccatctctttacctcctaattccacaccctcactgctgtagacatttgctatgagctggggatgtctctcatgaccaaatgcttttcctcaaagggagagagtgctattgtagagccagaggtctggccctatgcttccggcctcctgtccctcatccatagcacctccacatacctggccctgtgccttggtgtgctgtatccatccatggggctgattgtatttaccttctacctcttggctgccttgtgaaggaattattcccatgagttggctgggaataagtgccaggatggaatgatgggtcagttgtatcagcacgtgtggcctgttcttctatgggttggacaacctcattttaactcagtctttaatctgagaggccacagtgcaattttattttatttttctcatgatgaggttttcttaacttaaaagaacatgtatataaacatgcttgcattatatttgtaaatttatgtgatggcaaagaaggagagcataggaaaccacacagacttgggcagggtacagacactcccacttggcatcattcacagcaagtcactggccagtggctggatctgtgaggggctctctcatgatagaaggctatggggatagatgtgtggacacattggacctttcctgaggaagagggactgttcttttgtcccagaaaagcagtggctccattggtgttgacatacatccaacattaaaagccacccccaaatgcccaagaaaaaaagaaagacttatcaacatttgttccatgag

SEQ ID NO: 4567 - DNA, 2367 bp, Artificial Sequence
  derived and/or modified sequence
atgcgggcccggccccggccccggcccctgtgggccaccgtgctggccctcggcgcattggctggcgtgggcgtgggcggcccaaatatttgtaccacacgcggggttagttcatgccagcagtgtctcgcggttagtcctatgtgcgcttggtgcagcgacgaagctttgccattgggatcccctcggtgcgacctgaaggagaacttattgaaggataattgcgcccccgagtccattgaattccccgtgtctgaggcgagagtccttgaagatcggcctctctccgataagggctccggggattcctcccaagtcacgcaggtttcgcctcagcgcatcgctctcaggctaagacctgacgacagtaaaaacttcagtattcaggtgagacaggtggaggattaccctgttgacatctattacctcatggatctgagctattccatgaaggacgatctttggagcatccagaatctcggcaccaaactggcaacccagatgcgtaagctcactagtaatctgaggattgggtttggcgcattcgtggacaaaccggtgtcaccatacatgtacataagcccccctgaagccctggaaaatccgtgttacgacatgaagacaacctgtctgcctatgttcggttataagcacgtcctgaccctgactgatcaagttacaaggtttaatgaggaagtcaaaaaacaaagcgtttcaaggaaccgtgacgccccagagggtggctttgatgctattatgcaggctaccgtctgtgacgagaagatcgggtggagaaacgatgcgtctcacttgctggttttcactaccgacgcaaagactcacattgcgctggacggtcggctggccgggatcgtgcagcccaacgatggtcagtgccatgtcggttcagataaccactactctgcatcaaccacaatggactatccttccctgggattaatgaccgagaaactgtctcagaaaaatattaatctgattttcgcagtgactgagaatgttgttaacctataccagaattattctgagctgataccaggtacgacggttggtgttctgagcatggattcaagcaacgtcttgcagctaatcgtggatgcttatggtaagattaggtctaaggtggaacttgaggttagagacctaccagaagagctgtcactgtcatttaacgcgacctgcctgaacaatgaggtcattccaggtctcaaatcttgtatggggctgaaaattggagacaccgtgagtttcagcatcgaggccaaagtgcgggggtgcccgcaggagaaggaaaagtcttttaccatcaaacctgtcgggttcaaagattcacttatcgtccaagtgacttttgactgcgattgtgcgtgccaagcccaggccgagccaaatagtcatcgctgtaataacggcaacggcacgtttgagtgcggcgtctgcagatgcggtcctggatggctggggagccagtgcgaatgttcagaggaggactaccgaccgtcacagcaggacgaatgctctccgcgtgaaggacagcctgtgtgtagccagagaggagagtgtttatgtgggcaatgcgtctgccacagctctgacttcggaaagataaccgggaaatattgtgagtgcgatgatttctcgtgcgtgcgatacaaaggcgaaatgtgttcagggcatgggcagtgctcctgcggtgactgcctctgcgattcagattggactggctactattgcaattgtaccaccaggacagatacttgtatgtcaagcaacggtttgttgtgcagcgggagagggaagtgcgaatgcggctcttgcgtgtgtatccagcctggcagttacggcgacacttgcgagaagtgtcctacatgtccagacgcatgcactttcaaaaaggagtgcgtggagtgtaagaaatttgataggggggctctacatgatgaaaacacatgcaatcggtattgccgggatgaaatagagagcgtgaaggaattgaaagatacgggtaaagatgcagtgaactgcacttataagaacgaggacgactgcgttgttcggttccagtattacgaagatagtagcggaaaatccattttatacgtggtggaggagcccgaatgtcctaaagggccggacatacttgtcgttttactgtccgttatgggggctattttgcttatcgggctggctgcgctgctcatttggaaactactcataactattcatgatagaaaagaattcgccaaattcgaggaagaaagagcacgagctaaatgggatactgccaataacccattgtacaaggaggctacttcaacgtttaccaacattacttatagggggacttag

SEQ ID NO: 4568 - DNA, 2256 bp, Artificial Sequence
  derived and/or modified sequence
atgtgcgcctggtgcagcgacgaggccctgcccctgggcagccccagatgcgacctgaaagaaaatttactcaaggacaactgtgccccagagagtatcgagtttcctgtctcggaagcccgagtcctggaggacagacctctgagtgataagggcagcggtgacagttctcaagttacccaggtgagccctcaacggatcgcgcttagacttcgtcccgacgattctaagaactttagcattcaggtacggcaggtcgaggattatccagtcgacatatactatctgatggaccttagttattctatgaaggacgacctctggtctatacaaaacttaggtacgaagctggccacacagatgcggaagctgacatcaaacctgaggatcggcttcggggcatttgtggacaagcctgtttccccctatatgtacattagccctcccgaggctctagagaatccctgttacgacatgaagactacatgcctgccgatgtttggttacaaacacgtgctgactctgactgaccaggtcactcgctttaatgaagaggtgaagaagcagagcgtgagccgtaatcgagatgctccagaagggggtttcgacgctatcatgcaagccacagtttgtgatgagaagattggatggaggaatgacgcaagtcatctgctcgtatttaccacagacgctaagacccatatcgctctggacggacgcctagccgggatcgtgcagcccaatgacggtcaatgccacgtcggatcagacaaccactactctgcctccaccacgatggattatccatctctgggactcatgaccgagaagctgtcacaaaagaatattaacttgatcttcgcggtgacagaaaatgtcgtaaatctctatcagaattattctgagctcatcccaggcactactgtcggcgttctttcgatggatagcagcaacgtactgcagcttatcgtcgatgcttacgggaagatccggagcaaagtcgaactggaagttcgtgatctccccgaggaattgagcctcagtttcaacgctacctgcctgaataacgaggttattccaggcctcaagtcctgtatggggctgaaaattggagacacagtgtcattttctattgaggcaaaggtgcgaggatgtccacaagagaaggaaaaatcatttactatcaaacctgtgggattcaaggattcactgatcgtgcaagtgactttcgactgtgactgcgcctgtcaagctcaggcggaacctaatagccaccggtgcaataatggtaacgggacatttgaatgcggtgtctgtcgctgcgggccggggtggttagggtcccagtgcgagtgctctgaagaggactatagaccttctcagcaggacgaatgctctcctagagaaggccagccggtgtgcagtcagcggggtgagtgtctctgcggacagtgcgtctgtcacagttcggacttcggcaaaattacggggaagtactgcgagtgtgacgatttttcctgtgtacgatacaagggcgagatgtgcagcgggcatgggcagtgcagctgtggagattgtctttgcgattctgattggactggatattattgtaactgtaccacaaggacagatacctgtatgtcaagcaatggtctgctctgctctggcagagggaaatgcgagtgtgggtcttgcgtgtgcatccagcccggatcttacggcgacacctgtgagaaatgtcctacatgtcccgacgcttgcactttcaaaaaggaatgtgtcgagtgtaagaagttcgaccgtggtgctctacatgacgagaacacttgcaacaggtactgccgggatgagatcgaatccgtcaaggaactgaaggacacaggaaaggatgcagttaattgtacctacaaaaatgaggatgattgtgtggtgcggttccaatattatgaggactcttcgggtaagtctattttgtacgttgtagaagagccagagtgcccgaagggccccgacatcctcgtggtcctgctgagtgtgatgggcgccatcctcctcattggtttagccgcactactgatctggaaacttcttataacgatccatgacaggaaggaattcgcaaaattcgaggaagagagggccagggccaagtgggacacagagatcttgctgtactattgctcattcatcctggtgcaccagtctctggagtctctgaggaccgagttcaccagcaaacagaaggatggaaattag

SEQ ID NO: 4569 - DNA, 2367 bp, Artificial Sequence
  derived and/or modified sequence
atgcgggcccggccccggccccggcccctgtgggccaccgtgctggccttgggggcacttgctggcgtgggtgtgggagggccgaacatttgtacaacaagaggagtgtcatcctgtcagcagtgtctcgcagtgagtcccatgtgcgcgtggtgttccgacgaggccctcccactgggaagccccagatgtgacctgaaagagaaccttttaaaagataattgcgctccggagtccatcgagttccccgtctccgaagcaagggtcctagaagaccggccgctgagcgacaaaggttcaggagactcttcccaggtaactcaagtctcaccacaaagaattgctttaagactaagacccgatgattccaaaaacttttcgatccaggttagacaagtcgaagattaccctgtagacatctattacctaatggacttaagctatagtatgaaagacgacctctggtctatacagaacctgggaaccaaactcgctacccagatgcgaaaactcacgtctaatctgagaatcgggttcggtgccttcgtagataagccggtttccccatacatgtacattagccccccagaagctctggaaaacccttgctatgatatgaaaaccacttgtcttcccatgttcggttacaaacacgtcctaacactcacagaccaggtaaccaggtttaatgaggaagtgaagaaacagtccgtttcgcgcaacagggacgcgcccgagggaggttttgatgctattatgcaagcaaccgtgtgcgatgaaaaaatcggatggcgcaatgatgcttctcacctgcttgtcttcacaacggacgctaaaacccatatcgcgttggacggcaggttggcaggcattgttcagcctaacgacggacaatgccatgtgggttcagataaccactattctgcctcgactaccatggactaccctagccttgggttaatgacggagaagctctctcagaaaaatataaatctgatcttcgcagtcaccgagaatgtggttaatctctatcagaactattccgaacttatacctggcacgacggttggagtcctgagcatggactctagcaatgttctgcagctgattgtcgatgcctacgggaagattcgaagtaaagtcgaattagaggtccgcgatctgcctgaggaactgagcttaagctttaacgctacttgtcttaacaacgaagtgattccggggttgaagtcctgtatggggctcaaaatcggcgacaccgtgtcattttccattgaagcgaaagtaagaggctgtccacaggaaaaagagaagtcttttaccataaagcctgttggctttaaagactccctgatcgtccaggtaacttttgattgcgactgcgcatgtcaggcacaggccgagcctaattctcaccggtgtaataacggaaatggcaccttcgaatgtggtgtttgccgttgtggcccagggtggctaggctcacagtgtgagtgttccgaggaggattaccggcctagccaacaggacgagtgctctccaagggaggggcagcccgtgtgttcgcagcgcggagagtgtctgtgcggacagtgtgtctgccatagtagtgattttggtaaaatcaccgggaagtattgcgaatgtgacgacttttcttgtgtgcggtacaaaggtgaaatgtgttccggtcatgggcagtgttcctgcggggactgtctgtgcgacagcgactggaccggatattactgcaattgtacaaccaggacggatacctgcatgtcctcaaacggcctgctgtgttcgggacggggtaagtgtgagtgtgggtcctgtgtttgcatccagcctggaagctacggggacacttgtgaaaagtgccccacatgtcctgacgcctgcacttttaagaaagaatgtgtcgagtgtaaaaagtttgataggggagctctgcatgacgaaaatacgtgtaatcggtactgtcgcgacgaaatcgagtcagttaaagagctgaaggatactggaaaagacgccgtgaactgcacgtacaagaacgaggatgactgtgtggtacgttttcaatattatgaggatagttcaggtaagagcatcctgtatgttgtggaggagcctgagtgcccaaaggggccagatattctagtcgtcttactctcggtcatgggcgccattcttctaatcgggctggcggccctgctcatttggaaactcctcataaccatacacgaccgtaaggagtttgctaaattcgaggaagaacgggctcgagctaaatgggataccgccaacaatccgctgtacaaagaggcaacaagtacatttaccaatatcacctacagggggacttag

SEQ ID NO: 4570 - DNA, 2367 bp, Artificial Sequence
  derived and/or modified sequence
atgagggctagacctagaccccgtcccctgtgggccacagtactagccctgggagcacttgcgggagtgggggtgggagggcctaatatatgcacgacaagaggtgtaagcagttgtcagcaatgtctggcagtgtcccccatgtgcgcctggtgctcagatgaggccctcccgcttggctcaccgaggtgcgatctcaaggagaacctgttaaaggacaactgcgcgccagagagcattgagtttcccgtgagcgaagccagagtgttggaagaccgtcccctgtcagacaagggctccggcgatagctctcaggtgacacaagtgtcaccccagagaatagccttgcggctgcgaccagacgactcaaagaattttagcatccaggttaggcaagtcgaagactatcctgtagatatctactatctgatggacctgtcatattcaatgaaggacgatctctggtccatccagaacctgggcacaaaactagctactcagatgagaaagctgactagtaatctgcgcattgggtttggagccttcgtggacaaaccagtgagcccatacatgtacatttcacctcccgaggcactggagaatccatgctatgacatgaagaccacctgcctcccgatgttcggatataagcacgttttgacactcactgaccaggtaacaagatttaatgaggaagtcaaaaagcagtccgtcagccgaaatagagatgcccctgagggcggatttgatgcaataatgcaggcaactgtttgcgatgagaagataggatggagaaatgacgcctcgcatttgcttgtgttcactaccgacgctaagacacacatcgccctcgacgggcgattggctgggattgtgcaacccaatgacggacagtgtcacgtcggatctgacaaccactattctgcctccaccaccatggattatccatccctgggtttaatgacagagaagctctctcagaagaacattaacctgatctttgccgtcacagagaatgtcgtcaatctgtaccagaattacagtgagctcattcctggtaccactgtaggcgtgctgagcatggacagtagcaacgtgctgcaactgatcgtcgacgcttacggaaaaattaggtccaaggtggaactggaggtgagagatctgcctgaggaactgtcccttagctttaatgcaacctgcctcaataatgaggtgattccaggcctgaagtcatgcatgggcctcaaaattggcgacaccgtcagctttagtattgaagcaaaggtacggggatgtccacaggagaaggaaaaatccttcaccattaaacccgtgggctttaaggactcactgatcgttcaagtaaccttcgactgcgactgtgcttgccaggctcaggcggagcccaacagtcacaggtgtaataacggaaatggtaccttcgagtgcggagtgtgccggtgcggccctggttggcttgggtcgcaatgcgagtgttccgaggaagactacagacctagtcagcaggacgagtgtagtccacgggagggccagcctgtgtgttcccagagaggcgagtgcctctgcggccagtgtgtttgtcattctagcgactttggcaagattacaggcaagtactgcgaatgtgatgatttcagttgtgtgcggtacaaaggggaaatgtgttcaggtcatggacagtgtagttgtggagactgcctgtgcgactcggactggaccggctattactgtaattgcactacccggacagacacttgtatgagctcaaatggtctgttgtgctccggaagagggaagtgtgaatgcggatcatgtgtatgcattcagccgggaagttacggagatacatgcgagaagtgccctacatgtcctgatgcatgtacattcaagaaagagtgtgtggagtgtaaaaagtttgatcgcggtgctctccacgatgaaaacacatgcaaccgatactgccgggacgagatagaatctgtgaaggaactcaaggacaccggaaaggatgctgtcaactgcacctacaaaaacgaagatgactgtgtcgttcggttccaatactatgaggacagctctggtaaatctatcctgtatgtcgtggaggaacctgaatgccccaagggacccgacatattggtggtacttctctcagtcatgggcgcaattcttctgattgggctggcggcactgctcatttggaagctgctgattaccatccacgacagaaaagagtttgctaagtttgaggaagagagggctagggccaagtgggatactgccaacaacccactctacaaagaagccaccagcacgttcaccaacataacatacaggggaacatag

SEQ ID NO: 4571 - DNA, 2256 bp, Artificial Sequence
  derived and/or modified sequence
atgtgcgcctggtgtagtgatgaagcgttgcctctcggtagtccacggtgtgacctcaaggaaaaccttctgaaggacaactgcgcccctgaatcaatcgaattccccgttagcgaagctagggtcttagaggaccgacctttgtccgataagggatccggggactcaagccaggttactcaggtgagcccccagcgtattgccttaaggctgcgaccagacgatagtaaaaatttttcgatccaagtgcgccaggtcgaggattacccagtagatatatactacctcatggatctgtcgtatagtatgaaagatgacctatggagcatccagaatcttggcacaaaactcgccacacagatgagaaaactaacgtcaaacctgaggatcgggttcggcgctttcgtggataaacctgtgtccccttatatgtatatttccccccctgaggccctcgaaaatccatgctacgatatgaagaccacctgcttgccaatgtttggctacaagcacgtgctgacactcactgatcaggtgactcggttcaacgaagaagtgaagaaacagtccgtaagtagaaaccgcgatgccccagaggggggtttcgatgctattatgcaagctactgtctgcgacgaaaaaataggatggagaaatgacgccagccacctgctggtgtttaccacggacgccaaaacacatatcgccctggacggacgtctggccggaatcgtgcagccaaatgacggccagtgccatgtgggctctgataatcactacagcgccagcacgaccatggattatccttccctggggcttatgaccgagaaattgtcccagaagaatatcaatcttatattcgctgtgactgagaatgtagttaatttgtatcagaactactcagaactcattccaggcacaaccgtaggggtactttccatggatagcagcaatgtcttacaacttatcgtggacgcttacggcaagatcaggtccaaggtggaactagaagtccgggaccttcccgaagaactgtcactgagcttcaatgcaacctgtctgaacaacgaggtgatccccggtctaaagagttgcatggggctgaaaatcggcgataccgtgtcattcagtatagaagccaaggtgagaggatgtccccaagaaaaagagaaatctttcacaattaagcccgttggttttaaagactctttgatcgtacaggtgaccttcgactgcgattgcgcatgtcaggcgcaggctgagcctaactcgcataggtgtaataatggaaacggcacctttgaatgtggggtttgcaggtgtggtccaggctggttgggtagtcagtgcgaatgctccgaagaagattatcgtccttcccagcaggatgagtgctcaccgagagaagggcaaccggtgtgcagtcaaagaggagaatgtctgtgtggtcagtgcgtgtgccatagctccgacttcggcaagatcaccggcaaatactgcgagtgtgatgacttcagctgcgtccgttataagggcgagatgtgcagcggtcatgggcaatgtagctgtggcgactgcctgtgcgactccgactggaccgggtactactgcaattgcactacaagaactgatacttgcatgtcatcgaatgggcttctctgttcagggagaggaaaatgcgagtgcggctcctgcgtttgcatacagccagggagttatggcgatacttgcgagaagtgccccacctgtccagacgcttgcaccttcaagaaggaatgcgtcgagtgcaaaaagttcgatagaggggcactgcatgacgagaatacctgtaacaggtactgtcgcgacgagattgagtctgtgaaagaactaaaagacaccggtaaggatgcggtgaactgtacgtataaaaacgaagacgattgtgtggtccggttccaatattatgaagactcctcaggcaagtccatcttgtatgtggtggaggagcccgagtgtccaaagggtcctgatatattggtcgtactgctgagcgtgatgggcgcaattctcctcatcgggctagccgctcttctgatttggaagttgctgatcaccattcacgacaggaaagaatttgccaagtttgaagaagaacgggctagagccaagtgggacaccgagatacttttgtattattgctccttcattttggtgcatcagtccctcgagtccctgaggacagaatttacctccaaacagaaggacggaaactag

SEQ ID NO: 4572 - DNA, 2367 bp, Artificial Sequence
  derived and/or modified sequence
atgcgcgctcggccacgtccaaggccactttgggccacggtactcgccctgggggcattagccggagttggggtgggcggacccaatatctgcaccacccgcggtgtgagctcgtgtcagcaatgtctcgctgtatctcccatgtgtgcctggtgtagcgatgaggccctgcccctgggatctcccaggtgcgatctgaaggaaaacctgttaaaggataattgtgcacccgaatctatcgaattcccagtgtctgaggccagggttttggaagatagaccactgagtgataaaggctcgggcgattccagccaggttacacaagtgtctcctcaaagaatagcactgaggctgcggcctgacgatagcaaaaacttctctatccaggtccgacaagtggaggattaccctgtagatatctactaccttatggacttaagttattctatgaaggacgatctgtggtctattcagaatctgggcacaaaactggccactcagatgcgcaagctgacatccaacctcagaatcggcttcggcgcattcgtggacaagcccgtgtccccctacatgtacatcagccctccagaagctctggaaaacccttgctacgacatgaagaccacgtgtctcccaatgtttggatacaaacatgtgcttacactgactgatcaggtgactcggttcaatgaggaggtgaagaagcagagtgtgtctcgcaatagggatgcaccagagggcggttttgatgccattatgcaggcaaccgtatgtgatgagaaaataggctggaggaacgacgcctctcacctgctcgtgttcacgacagatgcaaagacacatatagccttagatggcaggctagctggtatagtgcagcccaatgatgggcagtgtcacgtaggttcggataaccactacagtgcatccacaacaatggattacccatccttagggctaatgaccgagaagctgagccagaagaatatcaatcttatcttcgctgtgacagaaaatgtggtgaatctatatcagaactactctgagctgatccccggaaccactgttggcgtgctaagcatggacagcagcaatgttttgcagttaattgtggacgcttacggcaaaattagatccaaagttgagttggaagtgcgtgaccttcctgaggaattaagtctgtcctttaatgcaacttgcctgaataatgaggtaatcccagggcttaaatcatgtatgggattgaagatcggagacacggtctctttcagcatcgaggctaaagtgagaggctgtccacaggagaaggagaagtcatttaccatcaaacctgtagggttcaaggattctttaattgtacaagtcactttcgattgcgattgtgcctgtcaggcccaggcagaaccaaacagccaccgatgcaacaatggcaatggtacctttgagtgcggtgtttgccgatgtggccctggatggttaggtagccagtgcgaatgttcagaggaagactacagaccaagccagcaggacgagtgttctcctcgtgaaggccaaccggtgtgcagtcagaggggagaatgcctctgtggccaatgtgtctgtcactctagcgattttggaaagatcacaggcaaatactgtgaatgcgacgatttctcctgcgtacggtataagggggagatgtgcagtgggcatggccagtgtagttgtggggactgtctgtgcgactctgactggacggggtattactgcaactgtaccacgcggacagacacctgcatgagttcgaatgggctcctctgctctggcagggggaagtgcgagtgtgggagctgtgtctgcattcagccaggatcatatggggatacttgtgaaaagtgccctacgtgtcccgacgcttgtacgttcaaaaaagaatgcgtggaatgcaaaaagtttgaccggggagcccttcacgatgagaatacctgcaaccggtactgcagagatgagatcgaatctgttaaggaactcaaagatacagggaaggatgcggtgaattgtacctacaagaacgaagatgattgcgtcgtccggtttcagtattacgaagactcaagtggtaagtcaattctgtacgtggtcgaagagccggaatgcccaaaaggtcctgatatactcgtagtgctgctgagtgtgatgggcgcaatcttactcatcggcctggctgccttactcatatggaagctgctcattactatccatgaccgcaaggaatttgccaaatttgaagaagagcgcgcacgggcaaagtgggacactgccaacaaccctctttacaaggaggctacctccacattcacaaatattacatatagggggacgtag

SEQ ID NO: 4573 - DNA, 5469 bp, Artificial Sequence
  derived and/or modified sequence
atggccggaccacggccaagcccatgggcacgcttattgttggccgcccttattagtgtttctctctcagggactttagccaatagatgtaaaaaggctcccgtgaagtcgtgcaccgaatgcgtaagggttgacaaggactgtgcctactgcactgacgagatgttccgcgacaggagatgtaatacacaggccgagctgctggccgccggatgccagagggaaagcatcgtagtcatggagtcatcttttcagatcaccgaagagacacagattgatactaccctgagacgaagtcaaatgtctccacagggtctacgagtgcgattaagacccggggaggaaaggcattttgaacttgaggtctttgagccactcgagagcccggtggacctgtatatcctcatggattttagcaacagcatgagtgacgacctggataatctgaagaaaatgggtcagaacttggcgagagtcctaagtcagcttactagtgactataccataggattcggtaaatttgtggacaaggtcagcgttccccagaccgacatgaggcctgagaaattaaaggagccttggccaaactcagacccccccttttcattcaagaatgttatatcacttacagaggacgtggacgagttccggaacaagctccaaggtgaacggatatcaggcaacctggatgcccctgagggcggattcgacgcgatcctgcagacagcagtgtgtacccgagatattggctggagacctgattccacacatttgctagttttctcaacggaatccgcgtttcactatgaagctgacggggccaatgtgttggccggtatcatgtctcgcaacgacgagaggtgccatctggacacaacagggacctacacgcaataccgtacccaggattatccctctgtgcccactctggtacgcctcctggcaaaacataacataatacccattttcgctgtgaccaactactcatactcttattacgaaaaattacacacttatttccctgtctcctcgttaggcgtgctgcaagaagattcttcaaacatcgtggaattactggaagaggcattcaatagaatccggtctaacctagacattagggccttagactcgccgcggggactgagaactgaagtcaccagcaagatgttccaaaaaacccgaaccggctccttccatatccgcagaggagaggtcggcatttaccaggtccaactcagggccctggagcatgtcgatggcactcacgtatgccaactgcccgaagatcagaagggcaatatccaccttaaaccctcattctccgatggcctgaagatggatgccggcattatttgcgacgtatgtacctgtgagctccagaaggaagtgaggtccgctaggtgtagtttcaacggtgattttgtttgtggccagtgtgtatgctccgagggctggagtgggcagacctgtaattgctcgacaggttcgctgtccgacattcagccttgcctgagagagggcgaggataaaccctgctctggccgtggggaatgccagtgcggccattgtgtttgctatggggagggacgctacgagggacagttttgtgagtatgacaattttcagtgcccccgcacctccggcttcctctgcaatgatcgcggccggtgtagtatggggcagtgcgtttgtgaacctggttggaccggcccttcttgtgactgccccctcagtaacgctacttgcattgactcgaacggcgggatctgcaacgggcgaggacactgcgagtgcgggaggtgccactgtcaccaacagtcactatacacagatacaatctgcgagatcaattactcggctatccatccaggcctctgtgaggatcttcggagctgcgtccaatgccaggcgtgggggactggtgagaagaaagggcgcacctgtgaggagtgtaactttaaagtgaaaatggtcgatgaactcaagcgggctgaggaggtagtggtcaggtgtagtttccgcgacgaagacgacgattgtacgtacagctacactatggaaggcgacggcgctccaggtccgaattctaccgtgcttgtccataaaaaaaaggactgtccacctgggtctttttggtggctgatccctctgcttctgctcctgctgccattgcttgcccttctgctccttctgtgttggaaatattgtgcgtgctgcaaagcttgcctagccctgcttccttgctgtaatcgcggacatatggtgggcttcaaagaggatcattatatgctacgagagaacctgatggcttcggaccatttggatactcctatgctccggagtggcaacctgaagggtcgagatgtcgtcaggtggaaagtgaccaacaacatgcaacgccctggatttgcaacccatgccgcatccataaatcctacagagctggtcccatatggcctcagcctcagactggccaggttatgtacggaaaatttgctgaaacctgacacaagggagtgcgcgcagctccgtcaggaggtggaggagaatctaaacgaggtgtaccgccagatatccggcgtgcacaagcttcagcagactaaatttcggcagcagccaaacgccgggaagaagcaggaccacaccatagtggacactgtgcttatggcaccgcgcagcgctaagcctgctctgctgaaactcacagaaaagcaagtggagcaaagggccttccatgacctcaaggtggcccccggctattatacactcacggctgatcaggacgcaagaggcatggtcgagtttcaggaaggcgtggagctggtcgacgtgagagtaccgttgttcattcggcccgaagatgacgatgaaaagcagctcctggttgaggctattgacgttccagccggaaccgctacccttggtcggcggctggtaaatataaccataatcaaggaacaggcccgagacgtggtatccttcgagcaaccagaattttccgtgagccgtggcgaccaagttgcgaggatccccgtgatcaggagggttctggatgggggcaaatcccaagtgagctatagaacgcaggacggaacagctcagggaaatcgcgactacatccccgtggagggcgagctcctcttccagcccggggaggcttggaaagaactccaggtgaaactgctcgagctgcaggaggtcgacagtctcctgagggggaggcaggttagacgatttcatgtccagctttctaatccaaagttcggtgcacaccttgggcagccccactctacaaccattataatacgagaccctgacgaattagatagaagcttcacttcacagatgttgtcatcccagcctccccctcacggggatctgggagcacctcaaaatcctaatgcaaaggcggctgggtccagaaagatacacttcaactggttgccaccttcaggcaaacccatgggctaccgggttaagtattggatccaaggcgacagcgagagcgaggcacatctactcgactctaaggtcccaagcgtggagctcactaatttgtacccctattgcgactatgagatgaaggtatgcgcctacggcgcccagggggaaggaccttatagctctctggtctcctgcaggactcatcaggaagtcccgtctgagcctggacgcctagcattcaacgtagtttctagcactgtcacccagctaagttgggccgagcctgccgaaaccaatggcgagatcactgcctacgaggtatgttatggactagtgaatgacgataataggcccattggtcccatgaagaaggttctggtcgataacccaaagaatcgcatgctcctgattgaaaatctccgtgagagccagccttatagatacaccgtaaaagcacgaaacggggctggttggggcccagaaagggaggccattataaaccttgctactcagccaaaacgaccgatgtccatccctattattcctgatattcctatcgtcgacgcccagagtggcgaagattacgattcctttcttatgtacagcgacgatgtcttacgctcgccttcgggctcacaaagaccatctgtaagtgatgatactggctgtggatggaagtttgaacccctgctgggagaggagctggatctgaggcgtgttacctggagactgcccccagagctgatcccccggctgtccgcctcctcaggtcgttcttccgatgccgaggctccccacggccctccagatgatggcggcgccgggggcaaaggcggtagcctgcctagaagcgcaacccccgggccaccaggagagcacctggtgaacggccgaatggactttgccttccccggcagcaccaattccctgcaccgcatgacaactaccagtgccgccgcttacggcactcatctgagcccccatgtaccccacagggttctgagtactagttctaccctgactcgtgattacaacagccttacaaggtcagagcactcacattccacaacgcttcctcgtgactatagcacccttacgagcgtgagttctcacgactctagactgacagccggagtaccagacacccctacccgtctcgtgtttagcgctttaggaccaacaagcctacgggtgagttggcaggagccccgttgcgaacgcccgctacagggttactcagtggagtatcagctacttaatggcggcgagttacatcgacttaacatccccaatcctgctcagacatcggtggttgtcgaggacttactgcctaaccactcctatgtgttccgagtcagggcccagtcccaggagggttggggccgcgagcgcgaaggagttattacaatagagagccaggtgcatccacagtcacccttgtgtcccctccctggatcagcctttaccctaagtaccccttcagctcccggacctctggtgtttactgccctcagtccggactctttgcagctgtcatgggagcgacctcgcagacccaatggcgacatagtgggctacctcgtgacctgtgagatggcccaggggggaggaccagctaccgcctttcgggtggacggtgatagcccagaaagccgcctgacggttcctggcctcagtgaaaacgtcccatataagttcaaagtgcaggcccgtacgacagaaggctttgggcctgagcgtgagggaatcattacaatcgagagccaggatgggggaccatttccccagttggggtcccgagccggcctgttccagcaccccttgcagagtgagtattcctccattaccactacacacactagtgccacagaacccttcctggttgatggtctaacgctgggcgctcagcacctagaggctggaggaagtttgacacgacacgtgacccaggaattcgtaagccggacacttaccactagcggaaccctttccactcacatggaccagcagttctttcagacctag

SEQ ID NO: 4574 - DNA, 5469 bp, Artificial Sequence
  derived and/or modified sequence
atggccggcccccggcccagcccctgggcccggctgctgctggccgccctgatctctgtgtccctgagcggcaccctggccaaccgctgcaagaaggcccctgtgaagagctgcacagaatgtgtgcgggtggacaaggactgtgcctactgcacagatgagatgttccgggaccggcgctgcaacacccaggccgagctgctggccgccggctgccagcgggagagcatcgtggtgatggagagcagcttccagatcacagaggagacccagattgacaccaccctgcggcgcagccagatgagcccccagggcctgcgggtgcggctgcggcctggagaggagcggcactttgagctggaggtgtttgagcccctggagagccctgtggacctgtacatcctgatggacttcagcaacagcatgtctgatgacctggacaacctgaagaagatgggccagaacctggcccgggtgctgagccagctgaccagtgactacaccatcggctttgggaagtttgtggacaaggtgtctgtgccccagacagacatgaggcctgagaagctgaaggagccctggcccaacagcgacccccccttctccttcaagaatgtcatcagcctgacagaagatgtggatgagttcaggaacaagctgcagggcgagcgcatcagcggcaacctggatgcccctgagggcggctttgatgccatcctgcagacagctgtgtgcacccgggacatcggctggaggccagacagcacccacctgctggtgttcagcacagaaagtgccttccactatgaagcagatggagccaacgtgctggccggcatcatgagcagaaatgatgagcgctgccacctggacaccaccggcacctacacccagtaccgcacccaggactaccccagcgtgcccaccctggtgcggctgctggccaagcacaacatcatccccatctttgctgtgaccaactacagctacagctactatgagaagctgcacacctacttccctgtgagcagcctgggcgtgctgcaggaggacagcagcaacatcgtggagctgctggaggaggccttcaaccgcatccgcagcaacctggacatccgggccctggacagcccccggggcctgaggacagaggtgaccagcaagatgttccagaagaccaggacaggcagcttccacatcagaagaggagaggtgggcatctaccaggtgcagctgcgggccctggagcacgtggatggcacccacgtgtgccagctgcctgaggaccagaagggcaacatccacctgaagcccagcttcagtgatggcctgaagatggatgctggcatcatctgtgatgtgtgcacctgtgagctgcagaaggaggtgcgcagcgcccgctgcagcttcaatggagactttgtgtgtggccagtgtgtgtgcagcgagggctggagcggccagacctgcaactgcagcacaggcagcctgagtgacatccagccctgcctgcgggagggggaggacaagccctgcagcggcagaggagagtgccagtgtggccactgtgtgtgctacggggagggccgctatgagggccagttctgtgaatatgacaacttccagtgccccaggaccagcggcttcctgtgcaatgaccggggccgctgcagcatgggccagtgtgtgtgtgagcccggctggacaggccccagctgtgactgccccctgagcaatgccacctgcatcgacagcaatggaggcatctgcaatggccggggccactgtgaatgtggccgctgccactgccaccagcagagcctgtacacagacaccatctgtgagatcaactacagcgccatccaccctggcctgtgtgaggacctgcggagctgtgtgcagtgccaggcctggggcaccggggagaagaagggccgcacctgtgaggagtgcaacttcaaggtgaagatggtggatgagctgaagagagctgaggaggtggtggtgcgctgcagcttcagagatgaagatgatgactgcacctacagctacaccatggagggagatggagcccctggccccaacagcacagtgctggtgcacaagaagaaggactgccccccaggcagcttctggtggctgatccccctgctgctgctgctgctgcccctgctggccctgctgctgctgctgtgctggaagtactgtgcctgctgcaaggcctgcctggccctgctgccctgctgcaacagaggccacatggtgggcttcaaggaggaccactacatgctgcgggagaacctgatggccagtgaccacctggacacccccatgctgcggagcggcaacctgaagggcagagatgtggtgcgctggaaggtgaccaacaacatgcagaggcctggctttgccacccatgctgccagcatcaaccccacagagctggtgccctacggcctgagcctgcggctggcccggctgtgcacagagaacctgctgaagccagacaccagagaatgtgcccagctgcggcaggaggtggaggagaacctgaatgaggtgtaccggcagatctctggagtgcacaagctgcagcagaccaagttccggcagcagcccaatgccggcaagaagcaggaccacaccatcgtggacacagtgctgatggcccccaggtctgccaagccagccctgctgaagctgacagagaagcaggtggagcagagggccttccatgacctgaaggtggcccctggctactacaccctgacagctgaccaggatgcccggggcatggtggagttccaggagggcgtggagctggtggatgtgcgggtgcccctcttcatccggccagaagatgatgatgagaagcagctgctggtggaggccattgatgtgcctgctggaacagccaccctgggccggcggctggtgaacatcaccatcatcaaggagcaggccagagatgtggtgtcctttgagcagcctgagttctctgtgtccagaggagaccaggtggcccgcatccctgtgatccggcgggtgctggatggcggcaagagccaggtgtcctaccgcacccaggacggcacagcccagggcaacagagactacatccctgtggagggggagctgctcttccagcccggggaggcctggaaggagctgcaggtgaagctgctggagctgcaggaggtggacagcctgctgcggggccggcaggtgcggcgcttccacgtgcagctgagcaaccccaagtttggagcccacctgggccagccccacagcaccaccatcatcatccgggaccctgatgagctggaccgctccttcaccagccagatgctgagcagccagcccccaccccacggggacctgggcgccccccagaaccccaatgccaaggccgccggcagcaggaagatccacttcaactggctgcccccatctgggaagcccatgggctacagagtgaagtactggatccagggcgacagcgagagcgaggcccacctgctggacagcaaggtgcccagcgtggagctgaccaacctgtacccctactgtgactatgagatgaaggtgtgtgcctatggagcccagggcgagggcccctacagcagcctggtgtcctgcaggacccaccaggaggtgcccagcgagcccggccgcctggccttcaacgtggtgagcagcacagtgacccagctgtcctgggccgagcctgctgagaccaatggagagatcacagcctatgaggtgtgctacggcctggtgaatgatgacaaccggcccatcggccccatgaagaaggtgctggtggacaaccccaagaacaggatgctgctgattgagaacctgcgggagagccagccctaccgctacacagtgaaggccagaaatggagctggctggggccctgagcgggaggccatcatcaacctggccacccagcccaagaggcccatgagcatccccatcatcccagacatccccatcgtggatgcccagagcggagaagattatgacagcttcctgatgtacagtgatgatgtgctgcggagccccagcggcagccagaggcccagcgtgtctgatgacaccggctgcggctggaagtttgagcccctgctgggggaggagctggacctgcggcgggtgacctggaggctgcccccagagctgatcccccggctgagcgccagcagcggccgcagcagtgatgctgaggccccccacggccccccagatgatggaggagctgggggcaaaggaggcagcctgcccaggtctgccaccccaggccccccaggagagcacctggtgaatggccgcatggactttgccttccctggcagcaccaacagcctgcacaggatgaccaccaccagcgctgctgcctacggcacccacctgagcccccacgtgccccaccgggtgctgagcaccagcagcaccctgacccgggactacaacagcctgaccaggtctgagcacagccacagcaccaccctgccccgggactacagcaccctgacctctgtgagcagccatgacagccggctgacagctggggtgcctgacacccccacccggctggtgttttctgccctgggccccaccagcctgcgggtgtcctggcaggagccccgctgtgagcggcccctgcagggctacagcgtggagtaccagctgctgaatggaggagagctgcaccggctgaacatccccaacccagcccagacctctgtggtggtggaggacctgctgcccaaccacagctatgtgttccgggtgcgggcccagagccaggagggctggggccgggagcgggagggcgtcatcaccatcgagagccaggtgcacccccagagccccctgtgccccctgcccggcagcgccttcaccctgagcacccccagcgcccctggccccctggtgttcaccgccctgagcccagacagcctgcagctgtcctgggagcggccccggcggcccaacggggacatcgtgggctacctggtgacctgtgagatggcccagggcggcggccctgccacagccttccgggtggatggagacagccctgagagccggctgactgtgcccggcctgtctgaaaatgtgccctacaagttcaaggtgcaggcccggaccacagagggcttcggccctgagcgggagggcatcatcaccatcgagagccaggacggcggccccttcccccagctgggcagcagagctggcctcttccagcaccccctgcagagcgagtacagcagcatcaccaccacccacaccagcgccacagagcccttcctggtggatggcctgaccctgggcgcccagcacctggaggccggcggcagcctgaccaggcatgtgacccaggagtttgtgtccaggaccctgaccaccagcggcaccctgagcacccacatggaccagcagttcttccagacctag

SEQ ID NO: 4575 - DNA, 5469 bp, Artificial Sequence
  derived and/or modified sequence
atggccggcccccggcccagcccctgggcccggctgctgctggccgcactgatctctgtcagcctgtcgggcaccttggcaaatcggtgcaagaaggccccggttaagtcttgtaccgaatgcgtaagagttgataaggactgcgcctactgcaccgatgagatgtttagagatagacggtgtaacacacaagcagagctgttggctgctggctgtcagcgggaatccatcgtggtgatggagtcatcattccaaattacagaggagactcaaattgacactactctaagacgcagccaaatgagcccccagggattacgagtcaggttaagaccaggtgaggagcggcatttcgagctcgaagtcttcgaacccctcgaaagtcctgttgacttgtacattcttatggatttcagcaatagcatgagtgacgacctggataacctgaagaaaatgggccaaaacctcgcaagagtcctatctcagttgacatcagattataccattggattcggaaaattcgtggacaaagtgtccgttccccagaccgatatgagacctgagaagcttaaagagccatggcccaacagcgaccctccattttctttcaagaacgtaatcagcttgaccgaagacgtggacgaattccgaaacaagctccaaggggaacgaatttcaggcaatcttgatgcgcccgaggggggatttgacgcgattttacaaaccgctgtctgcacgcgggacattggctggcgacccgacagcacccacctgttagtattttctactgaatcagccttccactacgaagctgatggggctaatgtgttggccggtattatgtctaggaacgatgaacggtgccatttggacacaaccggcacctatacccagtatagaacacaggactatcctagcgttcccaccctggttcgtctccttgctaagcataacattataccaatcttcgctgttactaactacagttattcatattacgagaagcttcatacctatttccctgtctcatcccttggcgtgctgcaggaggatagcagcaacatcgtcgagctccttgaggaggcatttaatcggattagaagtaacctggatatcagagccctggacagcccaaggggcctgagaacagaagtgacttctaagatgttccagaaaacccgcacaggctccttccatataagaagaggagaagtaggtatctaccaagtccagttaagagccctcgagcatgtcgatggcactcacgtgtgtcagctgccggaagaccaaaaagggaatattcacttgaagcctagtttttctgatggactcaaaatggacgcgggcatcatctgcgacgtctgtacatgcgagttgcagaaggaggtgcggagcgctcggtgctcttttaacggagatttcgtctgtggccagtgtgtctgttccgaaggatggtccgggcagacctgtaactgcagcacaggaagcctctccgatatccagccctgcctgcgcgaaggcgaggataaaccatgttccggccgaggggagtgtcagtgtggtcattgcgtctgttatggtgagggcagatacgaaggacagttttgtgaatacgacaattttcagtgtccgcgtacttctgggttcctgtgcaacgacagaggtaggtgctctatgggacagtgcgtgtgtgaaccaggttggactgggccatcgtgcgactgccccctatctaacgccacatgtattgacagcaatggtgggatctgtaatggccggggccattgcgagtgtggaagatgccattgccaccagcagagcctgtacacagatacaatctgcgaaatcaattatagtgcaatccaccctggcctctgtgaagacctgcgctcatgtgtgcagtgtcaggcctggggcacgggcgagaaaaaggggaggacctgtgaagagtgcaattttaaagtgaagatggtggacgaactgaagcgcgctgaagaagtggtggtgcggtgctccttccgagacgaagacgatgattgtacatactcctatactatggaaggggatggcgcccctggaccgaactcaaccgtgctggtacacaaaaagaaagattgtccccccgggtccttttggtggctgattccactccttctgttgctcctgcctctgcttgctctgctcctgttgctgtgctggaagtactgtgcctgttgtaaggcctgtctggcgctgctgccctgctgcaatcgtggacatatggtgggcttcaaggaggatcattacatgttaagggaaaacttaatggcatccgatcaccttgacactcccatgcttagatcaggcaatttaaagggaagggacgtagtcaggtggaaagtaactaataatatgcaaagaccaggcttcgccacgcacgctgcctccattaatcccacagaattagtgccctacggcctctccctcaggttggcacggctgtgcaccgagaacttgctcaagcctgatacgagagaatgcgcccagctccgacaggaggtggaggaaaacttgaatgaggtgtacaggcagataagcggcgtccataagctccagcagacgaagttccgtcagcagcccaacgcaggcaaaaagcaagaccacacgattgtggacactgtgctgatggcccctcgcagcgctaaacccgccctgctaaaacttaccgaaaaacaggtggaacaacgagcattccatgacctgaaggtggccccaggatactacactttgacagcagaccaagacgcacgcggaatggtagaattccaagagggcgtcgaattagtggatgtaagagtccctctgtttatccggccagaggatgacgacgagaagcagttgttagtcgaggctattgacgtgccagccggtactgctactctaggtcgcaggttggttaatatcaccatcattaaagaacaggcgcgggacgtggtgagttttgagcaacctgagttctccgtgtccagaggggaccaggtggccaggattcccgtaattcgcagagtgctggatggggggaagtctcaggtgagttatcggacccaggacggtactgcacagggaaacagggactacattcccgtggagggcgaactgctgtttcagcctggggaggcctggaaagaactgcaggtgaaactcctggagctccaggaggtcgatagcctgctacggggacgccaggtacgtaggtttcacgtccagctcagcaaccccaagttcggcgcacatcttggacagcctcatagcacgacaataatcatacgcgaccccgacgaactcgaccgcagttttacgtcccagatgctgagttcccaaccccctccacatggcgatctgggagcaccacagaacccaaacgctaaagcggctggatccagaaaaatacattttaattggcttccccctagtggcaaacctatggggtatcgggttaaatattggatacagggagacagcgaatctgaggcccacttgttagacagcaaggttccgtctgtcgagctcactaacctttatccttactgcgactatgaaatgaaggtgtgtgcatatggggcccagggagagggcccctattcctccctggtttcctgtaggactcaccaggaggtaccttcagaaccaggtcggttagcatttaacgtcgtttcctccaccgttacacagctcagctgggccgagccagccgagactaacggagagatcacggcgtacgaggtgtgctacggtctggtgaatgacgacaatcgccccatcggaccaatgaagaaagtcctcgtggacaatccgaaaaaccgaatgctcctgattgagaacctccgcgagtcacagccctaccgctatactgttaaggccagaaacggagcgggttgggggcctgagcgcgaagccatcattaacctggccacccagccgaagagacccatgagtatcccaatcatccccgatattcccatagtcgatgctcaaagcggcgaagattacgattcattcctgatgtacagcgatgatgtgcttcggtctccttcaggatcacagcgcccaagcgtctcagacgataccgggtgtggttggaagtttgagccattgcttggagaggaactggatcttaggagagtgacttggcggctcccacccgaacttataccgcggttaagtgccagctccgggcgtagtagcgatgcggaggctcctcacggccctccggacgacggaggagccggaggaaaagggggaagccttcccagaagcgccacccctggtcccccaggcgaacacctcgtgaacggtcggatggatttcgcatttcctgggagtactaacagtctccaccggatgactacgaccagtgcagcagcttacggtacacatctgtccccacacgtgcctcaccgggttctgtccaccagctctaccctcaccagggattacaattctctgacccgctcagaacacagccatagcacaacactgcctcgagattatagcactcttacctctgtgagctctcacgactctagactgacagccggggttccagacaccccgacgcgccttgtcttttcggctctgggacccacttccctccgcgtttcctggcaggagccccgatgtgagcgacctctgcagggctactctgtggaataccaactgctgaacggcggagaactccaccgcctgaacatcccaaaccctgcccaaacttctgtcgtggttgaagatctgctcccaaatcactcttacgttttcagagtcagagcccagtcccaggaaggatgggggcgtgaacgggagggcgttattaccattgagtcccaagtccaccctcagtcccctctatgtcctctcccaggctcggcatttaccctgtctacccctagcgcccccggacctctcgtcttcactgctctgagtcctgattccctacagctcagctgggaaagacctcgacgccccaacggcgatattgtggggtatctagtcacttgcgagatggcccagggcggaggaccagccacagctttcagagtggacggggattcccctgaatcaaggctcactgttccgggcttatctgagaatgtgccctacaaattcaaggtgcaggcccgcacaacggagggatttgggcccgagcgagaaggcattatcacaattgaatctcaggatggagggccattcccacagctcggatcacgggcagggctgttccagcaccctttgcagagcgaatattcttcgattactacaacgcacacatccgccactgaaccctttctggtggacggattaacactaggagcccaacacctcgaggccggaggatccttgacgaggcatgtgacacaggaattcgtcagtaggacgctcactacttcgggcaccctttcgacccatatggatcagcaattctttcaaacgtag

SEQ ID NO: 4576 - DNA, 5469 bp, Artificial Sequence
  derived and/or modified sequence
atggccggaccacgaccctccccatgggccagactgctcctcgccgctctgatctctgtctctctttctgggactttagcgaatcgatgtaagaaggccccagttaagtcatgcactgaatgcgtacgcgtggataaagactgcgcctactgtacggacgaaatgtttcgagatcggaggtgtaatacccaggccgaacttctggccgctggatgccaacgggaatcgattgttgtcatggagagctccttccagatcacagaggagactcaaattgataccaccctgagacgctcgcaaatgagcccccagggccttagagttcgcctgcgccctggtgaagaaaggcactttgagttagaagtattcgaacccctcgaatctccagtcgacctttatatcctgatggacttctcgaactctatgtctgacgacttggacaatctgaaaaagatgggtcagaacttggcccgagtgctgtcccaacttacatccgattacacaatcggctttggcaaatttgtcgataaggtgtccgtgcctcagacagacatgaggcccgaaaaactgaaagaaccttggcccaacagcgacccaccattcagcttcaagaatgtcatcagtctaactgaagatgtggatgagttcaggaataagctacagggagaaaggatcagtggtaatctggacgcacccgaggggggattcgacgccatcttgcagactgctgtgtgcacgagggatatcggctggagaccagattccactcacttattagtcttcagcaccgaatcggcctttcattacgaggccgatggggctaatgtcttggccggaataatgagccgtaatgacgagcggtgccacctagacacaacaggaacgtacacacaataccggacccaggactaccccagcgtgccaacactagtgcgcctgttggcaaaacacaatatcatccctatctttgcggtaaccaactacagttactcatactacgagaaattgcatacttattttccagtgtcttccttgggcgtcttacaggaggacagcagtaatattgtggaactacttgaagaagcattcaataggatccgtagcaacctggatatccgggcattggacagtcctcgcggtctgcgcacggaagttacaagtaaaatgtttcaaaagacccgaaccggctccttccatatcagaaggggcgaggtgggcatttatcaggtacagctgagggccttggagcacgtcgatggtacacatgtttgtcagctgcctgaggaccaaaagggcaacatacacttgaagcctagcttttctgacggtctgaaaatggacgctgggatcatttgcgacgtctgcacatgtgaactgcagaaagaggttaggtccgccagatgctcatttaatggcgatttcgtttgcgggcagtgtgtctgttctgagggttggtcgggccagacatgcaactgcagcacagggtctttatctgacatccagccctgtctgagagagggggaggacaaaccttgctccgggcgaggggagtgccaatgtggccactgtgtctgctatggcgagggtcgatatgaaggtcagttctgcgaatatgataattttcagtgccctagaaccagtggtttcctctgcaacgacaggggcaggtgctcaatgggccaatgtgtgtgtgaaccgggttggacgggaccctcatgcgactgtcccctgagcaacgccacatgtatagattctaacggcggaatatgcaatggacgaggccactgcgaatgtgggagatgccactgtcatcagcagtctttgtacactgacaccatctgtgagattaactactcagctatacaccctggactgtgtgaggacctgcggagttgcgtccagtgccaggcatggggcactggcgaaaaaaagggcaggacctgcgaagagtgcaatttcaaagtcaagatggtggatgagctgaaaagggctgaggaagtcgttgttaggtgctcttttcgcgatgaagacgatgactgcacatacagctacactatggaaggcgatggagcaccaggccctaattcaaccgtcctcgtgcataaaaaaaaggactgcccaccaggaagcttctggtggcttatccccctgttgctgctgctgttgccactgctcgccttactactattgctgtgctggaaatattgcgcgtgctgcaaggcatgccttgccctcctaccctgttgcaaccgtggtcacatggtgggctttaaggaggatcactacatgctcagagagaacctgatggcctctgatcatctagacacacctatgctccgtagtggtaatctgaagggtagggacgtggttcggtggaaagtgacaaacaatatgcagagacctggctttgctactcatgccgcttcaattaaccccactgagctggtgccttatggcctttctttacggcttgcgagactttgtaccgagaatcttttaaagcccgacactcgggagtgtgcccagctgagacaagaggtggaggagaatctcaacgaggtctaccggcagatcagcggagtccataagcttcagcaaactaagtttcgacagcaacctaacgctggaaaaaagcaagaccacaccatcgtcgacaccgtgctgatggcacctagatctgcgaagcctgctttgctgaaactgacagagaagcaagtggagcagagagcctttcacgatttgaaggtggcaccaggctactacacattaacagcggaccaagatgccaggggcatggtggagtttcaggaaggggttgaactggttgatgtccgagtgccactgtttattcggcctgaggacgatgatgaaaaacagctacttgtcgaggcgatcgacgtgcctgctgggacagcaacattgggtaggcggctggttaacattactattatcaaggagcaggctagagatgttgttagctttgagcaaccagagttttcagtaagccgaggcgaccaggtggccagaatcccagttatccgcagagttcttgatggcggaaaatctcaggtgagctataggacccaggacggcactgcccagggcaacagggattatatccccgtggagggagaactgctattccagccaggcgaggcctggaaagagctccaggtcaagctcctcgagcttcaggaggtggatagcctgctgagaggacggcaagtaagaagattccacgtccagctttccaacccaaaatttggagctcaccttggtcaaccccactccaccactatcatcattagagatccggatgaactggatagatcttttacgtcacaaatgttatcaagccaacctcccccacatggagacctcggagcccctcagaatcccaacgccaaggcagccggatcccggaaaattcactttaactggctgccacctagcggaaagccaatgggatatagggtaaaatattggatacagggagattccgagtcagaagcacacctgttggacagcaaggtgccaagcgtagagctgactaacttatatccctactgcgactatgagatgaaggtttgtgcttatggtgcccaaggcgaggggccatacagctccttggtgtcctgcagaacccatcaggaggtgccttcagaaccagggcgacttgctttcaatgttgtgagctccactgtgactcagttgagctgggccgagcctgcagagactaatggcgaaatcaccgcctacgaggtgtgttacggactggttaatgatgacaatcgcccaattggtccaatgaaaaaggtcctcgtggataatccaaagaatcgcatgctgttaattgaaaacctgagagagagtcagccctaccggtatacagtgaaggcccgaaacggagcaggctggggcccagagagggaagcgatcattaatctggctacccaaccaaaacgacctatgtctatccccattattcctgacattccaatcgtggacgcccaatctggagaggactacgatagcttcttgatgtatagtgatgatgtcctacgcagtcctagcggctcacaacgccctagcgtgtccgatgacaccggatgcggatggaaattcgagcccctcctgggagaggagctggatctgaggcgggttacttggcgattgcctcccgagctgattccacgcttgagcgcttcttccgggagaagctctgatgccgaggcaccacacggaccacctgacgatggaggcgctggaggcaaggggggaagtctcccacgatcagcaaccccaggaccacccggtgaacatttagtcaacggaaggatggactttgcctttcctggtagcacgaactcactgcatcgaatgaccaccacttccgcagctgcatacgggacccacctgagtccacatgtcccccacagggtgctgagcacctcttcaactctgactagagactacaatagtctcacgcggagcgaacactctcatagcactacccttccacgcgactatagcaccctgacgtccgtgtccagccacgacagccggttaacagcaggcgtgcccgacacaccaacccggcttgtgttttctgcattaggtccaaccagcctgcgagtcagttggcaggagcctcggtgcgagcgcccactgcagggttactctgttgagtaccagctgctgaacggcggtgagctccaccggctgaacatccctaatccagcacagacttctgtggtggtggaagatcttctgcctaaccattcctatgtgtttcgcgtaagagcccagtcccaggaaggttggggaagggagcgagagggcgttatcacaatcgagtcacaggtccaccctcagagccctctgtgccccctgccaggctcagcattcaccttgtctacgccatctgccccaggtccgctcgtctttaccgcgttatccccagatagcttgcagctctcgtgggagcggcctcgcagaccaaatggtgacatcgtcggctatcttgttacctgtgaaatggctcagggaggcggtcctgccactgcattccgagttgatggcgattctcccgagtcccggctgacggtgcctggactgagtgaaaacgtgccttacaagtttaaggtgcaggctcgtacaactgagggatttggcccagaacgagagggtataatcaccatcgagagccaagacggagggcctttccctcagcttggttcccgggcaggacttttccagcaccctttgcagtcagaatattcctcaattaccactacgcacacttccgccacagaaccgttcctggtagacggtctcacccttggagcacaacacctggaggctggcggatcactcactagacacgtcactcaagaattcgtgagccggactctaacgacaagcggcaccctgtcgactcacatggaccagcagttctttcaaacctat

SEQ ID NO: 4577 - DNA, 5469 bp, Artificial Sequence
  derived and/or modified sequence
atggccggccccagacccagcccctgggccagactgctgctggccgccctgatcagcgtgagcctgagcggcaccctggccaacagatgcaagaaggcccccgtgaagagctgcaccgagtgcgtgagagtggacaaggactgcgcctactgcaccgacgagatgttcagagacagaagatgcaacacccaggccgagctgctggccgccggctgccagagagagagcatcgtggtgatggagagcagcttccagatcaccgaggagacccagatcgacaccaccctgagaagaagccagatgagcccccagggcctgagagtgagactgagacccggcgaggagagacacttcgagctggaggtgttcgagcccctggagagccccgtggacctgtacatcctgatggacttcagcaacagcatgagcgacgacctggacaacctgaagaagatgggccagaacctggccagagtgctgagccagctgaccagcgactacaccatcggcttcggcaagttcgtggacaaggtgagcgtgccccagaccgacatgagacccgagaagctgaaggagccctggcccaacagcgacccccccttcagcttcaagaacgtgatcagcctgaccgaggacgtggacgagttcagaaacaagctgcagggcgagagaatcagcggcaacctggacgcccccgagggcggcttcgacgccatcctgcagaccgccgtgtgcaccagagacatcggctggagacccgacagcacccacctgctggtgttcagcaccgagagcgccttccactacgaggccgacggcgccaacgtgctggccggcatcatgagcagaaacgacgagagatgccacctggacaccaccggcacctacacccagtacagaacccaggactaccccagcgtgcccaccctggtgagactgctggccaagcacaacatcatccccatcttcgccgtgaccaactacagctacagctactacgagaagctgcacacctacttccccgtgagcagcctgggcgtgctgcaggaggacagcagcaacatcgtggagctgctggaggaggccttcaacagaatcagaagcaacctggacatcagagccctggacagccccagaggcctgagaaccgaggtgaccagcaagatgttccagaagaccagaaccggcagcttccacatcagaagaggcgaggtgggcatctaccaggtgcagctgagagccctggagcacgtggacggcacccacgtgtgccagctgcccgaggaccagaagggcaacatccacctgaagcccagcttcagcgacggcctgaagatggacgccggcatcatctgcgacgtgtgcacctgcgagctgcagaaggaggtgagaagcgccagatgcagcttcaacggcgacttcgtgtgcggccagtgcgtgtgcagcgagggctggagcggccagacctgcaactgcagcaccggcagcctgagcgacatccagccctgcctgagagagggcgaggacaagccctgcagcggcagaggcgagtgccagtgcggccactgcgtgtgctacggcgagggcagatacgagggccagttctgcgagtacgacaacttccagtgccccagaaccagcggcttcctgtgcaacgacagaggcagatgcagcatgggccagtgcgtgtgcgagcccggctggaccggccccagctgcgactgccccctgagcaacgccacctgcatcgacagcaacggcggcatctgcaacggcagaggccactgcgagtgcggcagatgccactgccaccagcagagcctgtacaccgacaccatctgcgagatcaactacagcgccatccaccccggcctgtgcgaggacctgagaagctgcgtgcagtgccaggcctggggcaccggcgagaagaagggcagaacctgcgaggagtgcaacttcaaggtgaagatggtggacgagctgaagagagccgaggaggtggtggtgagatgcagcttcagagacgaggacgacgactgcacctacagctacaccatggagggcgacggcgcccccggccccaacagcaccgtgctggtgcacaagaagaaggactgcccccccggcagcttctggtggctgatccccctgctgctgctgctgctgcccctgctggccctgctgctgctgctgtgctggaagtactgcgcctgctgcaaggcctgcctggccctgctgccctgctgcaacagaggccacatggtgggcttcaaggaggaccactacatgctgagagagaacctgatggccagcgaccacctggacacccccatgctgagaagcggcaacctgaagggcagagacgtggtgagatggaaggtgaccaacaacatgcagagacccggcttcgccacccacgccgccagcatcaaccccaccgagctggtgccctacggcctgagcctgagactggccagactgtgcaccgagaacctgctgaagcccgacaccagagagtgcgcccagctgagacaggaggtggaggagaacctgaacgaggtgtacagacagatcagcggcgtgcacaagctgcagcagaccaagttcagacagcagcccaacgccggcaagaagcaggaccacaccatcgtggacaccgtgctgatggcccccagaagcgccaagcccgccctgctgaagctgaccgagaagcaggtggagcagagagccttccacgacctgaaggtggcccccggctactacaccctgaccgccgaccaggacgccagaggcatggtggagttccaggagggcgtggagctggtggacgtgagagtgcccctgttcatcagacccgaggacgacgacgagaagcagctgctggtggaggccatcgacgtgcccgccggcaccgccaccctgggcagaagactggtgaacatcaccatcatcaaggagcaggccagagacgtggtgagcttcgagcagcccgagttcagcgtgagcagaggcgaccaggtggccagaatccccgtgatcagaagagtgctggacggcggcaagagccaggtgagctacagaacccaggacggcaccgcccagggcaacagagactacatccccgtggagggcgagctgctgttccagcccggcgaggcctggaaggagctgcaggtgaagctgctggagctgcaggaggtggacagcctgctgagaggcagacaggtgagaagattccacgtgcagctgagcaaccccaagttcggcgcccacctgggccagccccacagcaccaccatcatcatcagagaccccgacgagctggacagaagcttcaccagccagatgctgagcagccagccccccccccacggcgacctgggcgccccccagaaccccaacgccaaggccgccggcagcagaaagatccacttcaactggctgccccccagcggcaagcccatgggctacagagtgaagtactggatccagggcgacagcgagagcgaggcccacctgctggacagcaaggtgcccagcgtggagctgaccaacctgtacccctactgcgactacgagatgaaggtgtgcgcctacggcgcccagggcgagggcccctacagcagcctggtgagctgcagaacccaccaggaggtgcccagcgagcccggcagactggccttcaacgtggtgagcagcaccgtgacccagctgagctgggccgagcccgccgagaccaacggcgagatcaccgcctacgaggtgtgctacggcctggtgaacgacgacaacagacccatcggccccatgaagaaggtgctggtggacaaccccaagaacagaatgctgctgatcgagaacctgagagagagccagccctacagatacaccgtgaaggccagaaacggcgccggctggggccccgagagagaggccatcatcaacctggccacccagcccaagagacccatgagcatccccatcatccccgacatccccatcgtggacgcccagagcggcgaggactacgacagcttcctgatgtacagcgacgacgtgctgagaagccccagcggcagccagagacccagcgtgagcgacgacaccggctgcggctggaagttcgagcccctgctgggcgaggagctggacctgagaagagtgacctggagactgccccccgagctgatccccagactgagcgccagcagcggcagaagcagcgacgccgaggccccccacggcccccccgacgacggcggcgccggcggcaagggcggcagcctgcccagaagcgccacccccggcccccccggcgagcacctggtgaacggcagaatggacttcgccttccccggcagcaccaacagcctgcacagaatgaccaccaccagcgccgccgcctacggcacccacctgagcccccacgtgccccacagagtgctgagcaccagcagcaccctgaccagagactacaacagcctgaccagaagcgagcacagccacagcaccaccctgcccagagactacagcaccctgaccagcgtgagcagccacgacagcagactgaccgccggcgtgcccgacacccccaccagactggtgttcagcgccctgggccccaccagcctgagagtgagctggcaggagcccagatgcgagagacccctgcagggctacagcgtggagtaccagctgctgaacggcggcgagctgcacagactgaacatccccaaccccgcccagaccagcgtggtggtggaggacctgctgcccaaccacagctacgtgttcagagtgagagcccagagccaggagggctggggcagagagagagagggcgtgatcaccatcgagagccaggtgcacccccagagccccctgtgccccctgcccggcagcgccttcaccctgagcacccccagcgcccccggccccctggtgttcaccgccctgagccccgacagcctgcagctgagctgggagagacccagaagacccaacggcgacatcgtgggctacctggtgacctgcgagatggcccagggcggcggccccgccaccgccttcagagtggacggcgacagccccgagagcagactgaccgtgcccggcctgagcgagaacgtgccctacaagttcaaggtgcaggccagaaccaccgagggcttcggccccgagagagagggcatcatcaccatcgagagccaggacggcggccccttcccccagctgggcagcagagccggcctgttccagcaccccctgcagagcgagtacagcagcatcaccaccacccacaccagcgccaccgagcccttcctggtggacggcctgaccctgggcgcccagcacctggaggccggcggcagcctgaccagacacgtgacccaggagttcgtgagcagaaccctgaccaccagcggcaccctgagcacccacatggaccagcagttcttccagacctag

SEQ ID NO: 4578 - protein, 1218 aa, Artificial Sequence
  derived and/or modified sequence
MRSPRTRGRSGRPLSLLLALLCALRAKVCGASGQFELEILSMQNVNGELQNGNCCGGARNPGDRKCTRDECDTYFKVCLKEYQSRVTAGGPCSFGSGSTPVIGGNTFNLKASRGNDRNRIVLPFSFAWPRSYTLLVEAWDSSNDTVQPDSIIEKASHSGMINPSRQWQTLKQNTGVAHFEYQIRVTCDDYYYGFGCNKFCRPRDDFFGHYACDQNGNKTCMEGWMGPECNRAICRQGCSPKHGSCKLPGDCRCQYGWQGLYCDKCIPHPGCVHGICNEPWQCLCETNWGGQLCDKDLNYCGTHQPCLNGGTCSNTGPDKYQCSCPEGYSGPNCEIAEHACLSDPCHNRGSCKETSLGFECECSPGWTGPTCSTNIDDCSPNNCSHGGTCQDLVNGFKCVCPPQWTGKTCQLDANECEAKPCVNAKSCKNLIASYYCDCLPGWMGQNCDININDCLGQCQNDASCRDLVNGYRCICPPGYAGDHCERDIDECASNPCLNGGHCQNEINRFQCLCPTGFSGNLCQLDIDYCEPNPCQNGAQCYNRASDYFCKCPEDYEGKNCSHLKDHCRTTPCEVIDSCTVAMASNDTPEGVRYISSNVCGPHGKCKSQSGGKFTCDCNKGFTGTYCHENINDCESNPCRNGGTCIDGVNSYKCICSDGWEGAYCETNINDCSQNPCHNGGTCRDLVNDFYCDCKNGWKGKTCHSRDSQCDEATCNNGGTCYDEGDAFKCMCPGGWEGTTCNIARNSSCLPNPCHNGGTCVVNGESFTCVCKEGWEGPICAQNTNDCSPHPCYNSGTCVDGDNWYRCECAPGFAGPDCRININECQSSPCAFGATCVDEINGYRCVCPPGHSGAKCQEVSGRPCITMGSVIPDGAKWDDDCNTCQCLNGRIACSKVWCGPRPCLLHKGHSECPSGQSCIPILDDQCFVHPCTGVGECRSSSLQPVKTKCTSDSYYQDNCANITFTFNKEMMSPGLTTEHICSELRNLNILKNVSAEYSIYIACEPSPSANNEIHVAISAEDIRDDGNPIKEITDKIIDLVSKRDGNSSLIAAVAEVRVQRRPLKNRTDFLVPLLSSVLTVAWICCLVTAFYWCLRKRRKPGSHTHSASEDNTTNNVREQLNQIKNPIEKHGANTVPIKDYENKNSKMSKIRTHNSEVEEDDMDKHQQKARFAKQPAYTLVDREEKPPNGTPTKHPNWTNKQDNRDLESAQSLNRMEYIV

SEQ ID NO: 4579 - protein, 1059 aa, Artificial Sequence
  derived and/or modified sequence
MINPSRQWQTLKQNTGVAHFEYQIRVTCDDYYYGFGCNKFCRPRDDFFGHYACDQNGNKTCMEGWMGPECNRAICRQGCSPKHGSCKLPGDCRCQYGWQGLYCDKCIPHPGCVHGICNEPWQCLCETNWGGQLCDKDLNYCGTHQPCLNGGTCSNTGPDKYQCSCPEGYSGPNCEIAEHACLSDPCHNRGSCKETSLGFECECSPGWTGPTCSTNIDDCSPNNCSHGGTCQDLVNGFKCVCPPQWTGKTCQLDANECEAKPCVNAKSCKNLIASYYCDCLPGWMGQNCDININDCLGQCQNDASCRDLVNGYRCICPPGYAGDHCERDIDECASNPCLNGGHCQNEINRFQCLCPTGFSGNLCQLDIDYCEPNPCQNGAQCYNRASDYFCKCPEDYEGKNCSHLKDHCRTTPCEVIDSCTVAMASNDTPEGVRYISSNVCGPHGKCKSQSGGKFTCDCNKGFTGTYCHENINDCESNPCRNGGTCIDGVNSYKCICSDGWEGAYCETNINDCSQNPCHNGGTCRDLVNDFYCDCKNGWKGKTCHSRDSQCDEATCNNGGTCYDEGDAFKCMCPGGWEGTTCNIARNSSCLPNPCHNGGTCVVNGESFTCVCKEGWEGPICAQNTNDCSPHPCYNSGTCVDGDNWYRCECAPGFAGPDCRININECQSSPCAFGATCVDEINGYRCVCPPGHSGAKCQEVSGRPCITMGSVIPDGAKWDDDCNTCQCLNGRIACSKVWCGPRPCLLHKGHSECPSGQSCIPILDDQCFVHPCTGVGECRSSSLQPVKTKCTSDSYYQDNCANITFTFNKEMMSPGLTTEHICSELRNLNILKNVSAEYSIYIACEPSPSANNEIHVAISAEDIRDDGNPIKEITDKIIDLVSKRDGNSSLIAAVAEVRVQRRPLKNRTDFLVPLLSSVLTVAWICCLVTAFYWCLRKRRKPGSHTHSASEDNTTNNVREQLNQIKNPIEKHGANTVPIKDYENKNSKMSKIRTHNSEVEEDDMDKHQQKARFAKQPAYTLVDREEKPPNGTPTKHPNWTNKQDNRDLESAQSLNRMEYIV

SEQ ID NO: 4580 - DNA, 3657 bp, Artificial Sequence
  derived and/or modified sequence
atgagaagccccagaaccagaggcagaagcggcagacccctgagcctgctgctggccctgctgtgcgccctgagagccaaggtgtgcggcgccagcggccagttcgagctggagatcctgagcatgcagaacgtgaacggcgagctgcagaacggcaactgctgcggcggcgccagaaaccccggcgacagaaagtgcaccagagacgagtgcgacacctacttcaaggtgtgcctgaaggagtaccagagcagagtgaccgccggcggcccctgcagcttcggcagcggcagcacccccgtgatcggcggcaacaccttcaacctgaaggccagcagaggcaacgacagaaacagaatcgtgctgcccttcagcttcgcctggcccagaagctacaccctgctggtggaggcctgggacagcagcaacgacaccgtgcagcccgacagcatcatcgagaaggccagccacagcggcatgatcaaccccagcagacagtggcagaccctgaagcagaacaccggcgtggcccacttcgagtaccagatcagagtgacctgcgacgactactactacggcttcggctgcaacaagttctgcagacccagagacgacttcttcggccactacgcctgcgaccagaacggcaacaagacctgcatggagggctggatgggccccgagtgcaacagagccatctgcagacagggctgcagccccaagcacggcagctgcaagctgcccggcgactgcagatgccagtacggctggcagggcctgtactgcgacaagtgcatcccccaccccggctgcgtgcacggcatctgcaacgagccctggcagtgcctgtgcgagaccaactggggcggccagctgtgcgacaaggacctgaactactgcggcacccaccagccctgcctgaacggcggcacctgcagcaacaccggccccgacaagtaccagtgcagctgccccgagggctacagcggccccaactgcgagatcgccgagcacgcctgcctgagcgacccctgccacaacagaggcagctgcaaggagaccagcctgggcttcgagtgcgagtgcagccccggctggaccggccccacctgcagcaccaacatcgacgactgcagccccaacaactgcagccacggcggcacctgccaggacctggtgaacggcttcaagtgcgtgtgccccccccagtggaccggcaagacctgccagctggacgccaacgagtgcgaggccaagccctgcgtgaacgccaagagctgcaagaacctgatcgccagctactactgcgactgcctgcccggctggatgggccagaactgcgacatcaacatcaacgactgcctgggccagtgccagaacgacgccagctgcagagacctggtgaacggctacagatgcatctgcccccccggctacgccggcgaccactgcgagagagacatcgacgagtgcgccagcaacccctgcctgaacggcggccactgccagaacgagatcaacagattccagtgcctgtgccccaccggcttcagcggcaacctgtgccagctggacatcgactactgcgagcccaacccctgccagaacggcgcccagtgctacaacagagccagcgactacttctgcaagtgccccgaggactacgagggcaagaactgcagccacctgaaggaccactgcagaaccaccccctgcgaggtgatcgacagctgcaccgtggccatggccagcaacgacacccccgagggcgtgagatacatcagcagcaacgtgtgcggcccccacggcaagtgcaagagccagagcggcggcaagttcacctgcgactgcaacaagggcttcaccggcacctactgccacgagaacatcaacgactgcgagagcaacccctgcagaaacggcggcacctgcatcgacggcgtgaacagctacaagtgcatctgcagcgacggctgggagggcgcctactgcgagaccaacatcaacgactgcagccagaacccctgccacaacggcggcacctgcagagacctggtgaacgacttctactgcgactgcaagaacggctggaagggcaagacctgccacagcagagacagccagtgcgacgaggccacctgcaacaacggcggcacctgctacgacgagggcgacgccttcaagtgcatgtgccccggcggctgggagggcaccacctgcaacatcgccagaaacagcagctgcctgcccaacccctgccacaacggcggcacctgcgtggtgaacggcgagagcttcacctgcgtgtgcaaggagggctgggagggccccatctgcgcccagaacaccaacgactgcagcccccacccctgctacaacagcggcacctgcgtggacggcgacaactggtacagatgcgagtgcgcccccggcttcgccggccccgactgcagaatcaacatcaacgagtgccagagcagcccctgcgccttcggcgccacctgcgtggacgagatcaacggctacagatgcgtgtgcccccccggccacagcggcgccaagtgccaggaggtgagcggcagaccctgcatcaccatgggcagcgtgatccccgacggcgccaagtgggacgacgactgcaacacctgccagtgcctgaacggcagaatcgcctgcagcaaggtgtggtgcggccccagaccctgcctgctgcacaagggccacagcgagtgccccagcggccagagctgcatccccatcctggacgaccagtgcttcgtgcacccctgcaccggcgtgggcgagtgcagaagcagcagcctgcagcccgtgaagaccaagtgcaccagcgacagctactaccaggacaactgcgccaacatcaccttcaccttcaacaaggagatgatgagccccggcctgaccaccgagcacatctgcagcgagctgagaaacctgaacatcctgaagaacgtgagcgccgagtacagcatctacatcgcctgcgagcccagccccagcgccaacaacgagatccacgtggccatcagcgccgaggacatcagagacgacggcaaccccatcaaggagatcaccgacaagatcatcgacctggtgagcaagagagacggcaacagcagcctgatcgccgccgtggccgaggtgagagtgcagagaagacccctgaagaacagaaccgacttcctggtgcccctgctgagcagcgtgctgaccgtggcctggatctgctgcctggtgaccgccttctactggtgcctgagaaagagaagaaagcccggcagccacacccacagcgccagcgaggacaacaccaccaacaacgtgagagagcagctgaaccagatcaagaaccccatcgagaagcacggcgccaacaccgtgcccatcaaggactacgagaacaagaacagcaagatgagcaagatcagaacccacaacagcgaggtggaggaggacgacatggacaagcaccagcagaaggccagattcgccaagcagcccgcctacaccctggtggacagagaggagaagccccccaacggcacccccaccaagcaccccaactggaccaacaagcaggacaacagagacctggagagcgcccagagcctgaacagaatggagtacatcgtgtag

SEQ ID NO: 4581 - DNA, 3180 bp, Artificial Sequence
  derived and/or modified sequence
atgatcaaccccagcagacagtggcagaccctgaagcagaacaccggcgtggcccacttcgagtaccagatcagagtgacctgcgacgactactactacggcttcggctgcaacaagttctgcagacccagagacgacttcttcggccactacgcctgcgaccagaacggcaacaagacctgcatggagggctggatgggccccgagtgcaacagagccatctgcagacagggctgcagccccaagcacggcagctgcaagctgcccggcgactgcagatgccagtacggctggcagggcctgtactgcgacaagtgcatcccccaccccggctgcgtgcacggcatctgcaacgagccctggcagtgcctgtgcgagaccaactggggcggccagctgtgcgacaaggacctgaactactgcggcacccaccagccctgcctgaacggcggcacctgcagcaacaccggccccgacaagtaccagtgcagctgccccgagggctacagcggccccaactgcgagatcgccgagcacgcctgcctgagcgacccctgccacaacagaggcagctgcaaggagaccagcctgggcttcgagtgcgagtgcagccccggctggaccggccccacctgcagcaccaacatcgacgactgcagccccaacaactgcagccacggcggcacctgccaggacctggtgaacggcttcaagtgcgtgtgccccccccagtggaccggcaagacctgccagctggacgccaacgagtgcgaggccaagccctgcgtgaacgccaagagctgcaagaacctgatcgccagctactactgcgactgcctgcccggctggatgggccagaactgcgacatcaacatcaacgactgcctgggccagtgccagaacgacgccagctgcagagacctggtgaacggctacagatgcatctgcccccccggctacgccggcgaccactgcgagagagacatcgacgagtgcgccagcaacccctgcctgaacggcggccactgccagaacgagatcaacagattccagtgcctgtgccccaccggcttcagcggcaacctgtgccagctggacatcgactactgcgagcccaacccctgccagaacggcgcccagtgctacaacagagccagcgactacttctgcaagtgccccgaggactacgagggcaagaactgcagccacctgaaggaccactgcagaaccaccccctgcgaggtgatcgacagctgcaccgtggccatggccagcaacgacacccccgagggcgtgagatacatcagcagcaacgtgtgcggcccccacggcaagtgcaagagccagagcggcggcaagttcacctgcgactgcaacaagggcttcaccggcacctactgccacgagaacatcaacgactgcgagagcaacccctgcagaaacggcggcacctgcatcgacggcgtgaacagctacaagtgcatctgcagcgacggctgggagggcgcctactgcgagaccaacatcaacgactgcagccagaacccctgccacaacggcggcacctgcagagacctggtgaacgacttctactgcgactgcaagaacggctggaagggcaagacctgccacagcagagacagccagtgcgacgaggccacctgcaacaacggcggcacctgctacgacgagggcgacgccttcaagtgcatgtgccccggcggctgggagggcaccacctgcaacatcgccagaaacagcagctgcctgcccaacccctgccacaacggcggcacctgcgtggtgaacggcgagagcttcacctgcgtgtgcaaggagggctgggagggccccatctgcgcccagaacaccaacgactgcagcccccacccctgctacaacagcggcacctgcgtggacggcgacaactggtacagatgcgagtgcgcccccggcttcgccggccccgactgcagaatcaacatcaacgagtgccagagcagcccctgcgccttcggcgccacctgcgtggacgagatcaacggctacagatgcgtgtgcccccccggccacagcggcgccaagtgccaggaggtgagcggcagaccctgcatcaccatgggcagcgtgatccccgacggcgccaagtgggacgacgactgcaacacctgccagtgcctgaacggcagaatcgcctgcagcaaggtgtggtgcggccccagaccctgcctgctgcacaagggccacagcgagtgccccagcggccagagctgcatccccatcctggacgaccagtgcttcgtgcacccctgcaccggcgtgggcgagtgcagaagcagcagcctgcagcccgtgaagaccaagtgcaccagcgacagctactaccaggacaactgcgccaacatcaccttcaccttcaacaaggagatgatgagccccggcctgaccaccgagcacatctgcagcgagctgagaaacctgaacatcctgaagaacgtgagcgccgagtacagcatctacatcgcctgcgagcccagccccagcgccaacaacgagatccacgtggccatcagcgccgaggacatcagagacgacggcaaccccatcaaggagatcaccgacaagatcatcgacctggtgagcaagagagacggcaacagcagcctgatcgccgccgtggccgaggtgagagtgcagagaagacccctgaagaacagaaccgacttcctggtgcccctgctgagcagcgtgctgaccgtggcctggatctgctgcctggtgaccgccttctactggtgcctgagaaagagaagaaagcccggcagccacacccacagcgccagcgaggacaacaccaccaacaacgtgagagagcagctgaaccagatcaagaaccccatcgagaagcacggcgccaacaccgtgcccatcaaggactacgagaacaagaacagcaagatgagcaagatcagaacccacaacagcgaggtggaggaggacgacatggacaagcaccagcagaaggccagattcgccaagcagcccgcctacaccctggtggacagagaggagaagccccccaacggcacccccaccaagcaccccaactggaccaacaagcaggacaacagagacctggagagcgcccagagcctgaacagaatggagtacatcgtgtag

SEQ ID NO: 4582 - DNA, 3657 bp, Artificial Sequence
  derived and/or modified sequence
atgaggagccccaggactagagggcgaagcggacgccccctctcattactgctcgcactcctgtgcgctctgagagccaaggtttgcggagccagtgggcagtttgagctcgaaatattgtcgatgcagaacgtgaacggcgagctacagaacggcaactgttgcgggggagctcggaatcccggggaccggaagtgcacacgtgacgagtgcgacacatactttaaagtgtgcctcaaggaatatcaatccagagtgacagccggcggtccctgcagttttggaagcggctctactcctgtaatcggcgggaacacattcaatctgaaagcttcccggggcaacgaccggaacaggatcgtgctccccttttccttcgcctggccgagatcctataccctcctggtggaggcctgggattccagtaacgataccgtgcagcccgatagcattattgagaaggcttcacacagcggtatgatcaatcccagtcgtcagtggcagactttgaaacagaacacaggagtggcccactttgaataccagatccgggtgacctgcgacgactattactacggtttcgggtgcaacaagttctgtcgtcctcgtgacgattttttcggtcattacgcctgtgaccagaacggaaacaagacctgcatggagggctggatgggaccagagtgcaatcgggccatctgccgccagggatgctcgccgaaacatgggtcctgcaagctgcctggggactgtcgatgtcagtatggatggcaaggcctgtactgcgataaatgcattccacacccaggatgcgtccacgggatatgcaacgagccgtggcagtgcctgtgcgagaccaactgggggggacagctgtgtgacaaggacctgaactattgcgggacgcaccagccctgcttaaacggggggacttgctccaatacagggccagacaagtaccagtgcagttgtcccgagggatatagcgggccaaactgcgagatagccgagcatgcctgcctgagtgacccttgccataacaggggatcctgcaaagagaccagcctgggtttcgaatgtgaatgttcacccggttggaccggaccaacttgctctaccaacattgatgattgttcccccaataattgttcccacggagggacatgccaagatctggtaaacggcttcaagtgtgtgtgcccgccacaatggaccggcaagacctgccaactggacgctaacgagtgcgaggccaagccatgtgtcaatgcgaaatcctgcaaaaatctgatcgctagctattactgcgattgtctgccagggtggatggggcaaaactgtgatatcaacatcaacgattgtctggggcagtgccagaatgatgcctcctgtcgcgacctggtaaatggttaccggtgcatttgtccccccggatacgccggggatcattgtgaacgggacatagacgagtgtgcttctaacccctgcttaaatgggggacactgtcagaatgaaatcaataggttccagtgtctgtgtccaactgggttttcaggtaatctgtgccagctcgatatcgattattgtgagcctaatccttgccagaatggggctcagtgttacaacagggcatcagactatttttgcaaatgcccagaggactatgaaggtaaaaattgttctcatttgaaggatcactgtcggactaccccgtgcgaggttatcgactcatgcaccgttgcaatggctagcaacgatacgcctgagggagtccgttacatttcctccaatgtatgcgggccacatggtaagtgtaagtctcagtctgggggaaagttcacgtgcgactgcaacaaaggcttcacaggaacttactgtcatgaaaatattaatgactgtgagagtaacccctgtaggaatggcggcacctgtattgacggagttaacagttacaagtgcatttgttccgacggatgggaaggtgcttactgcgaaacaaatatcaacgattgttcacaaaatccctgccataatggcggcacatgtagggacctggtcaacgatttttattgtgactgtaaaaatggatggaagggcaagacctgccactcaagggattcacagtgtgacgaggccacctgcaataacgggggaacgtgttacgacgagggcgatgcctttaagtgtatgtgccctggaggttgggagggtacaacttgtaacattgctagaaatagctcctgtctcccaaatccctgccacaatggaggaacctgcgtggtcaacggtgagtcttttacatgcgtctgcaaggaaggatgggaaggtcctatctgcgcacaaaataccaacgactgctcacctcatccgtgctacaatagtgggacctgcgttgatggcgacaattggtatcgctgtgagtgtgctccaggtttcgcgggtcctgattgccgcatcaatatcaacgagtgccagagctcaccttgtgcatttggcgccacctgtgtggatgagattaacgggtaccggtgtgtgtgccccccgggtcatagcggcgccaaatgccaggaggtttccgggcggccctgcataacgatggggtccgtgattccggatggcgcgaagtgggacgatgattgcaatacctgccaatgtctgaacggtagaatcgcctgcagcaaagtttggtgtggacctcggccttgcctgctgcacaagggccactctgaatgccccagtggtcagtcttgcattcccatactggatgaccagtgttttgttcatccatgtacgggcgtgggggagtgtagaagcagcagcctgcagcccgtaaaaacaaaatgcacatctgatagctattatcaagataactgtgctaatatcacatttaccttcaacaaggagatgatgagtccaggattaaccacagaacacatctgctctgaactccggaacctgaatatactgaaaaacgtatctgctgagtactccatctatattgcctgtgagccatcccctagtgctaacaacgagattcatgtggctatctcagctgaggacatacgcgacgacggcaatcccatcaaagagattacagataaaattatcgacctggtgtccaaacgcgacggaaactcgtctctgatcgcagccgtggctgaggtgcgtgttcaacgccggcctctgaaaaaccgcaccgacttcctggtaccattgctctcatccgtcctgacagtggcatggatatgttgtcttgtgactgcattctactggtgcctgaggaagaggcggaagccaggcagccacactcattccgcctctgaggacaatactacaaacaatgtccgcgaacaacttaatcagataaaaaatccaatcgagaaacatggggccaacacagtgccaattaaggactatgagaataagaacagcaagatgtccaagattcgcacccacaacagtgaggttgaagaggacgacatggataagcatcagcagaaggcgcggtttgctaaacagcctgcctacacattagtcgatcgggaagaaaagccaccgaacgggacccccaccaaacatcccaactggactaacaagcaagataatcgcgacttggagagcgcgcagagcctcaatcggatggaatacattgtctag

SEQ ID NO: 4583 - DNA, 3180 bp, Artificial Sequence
  derived and/or modified sequence
atgattaacccatctcggcagtggcagacactgaaacagaataccggagttgcccacttcgaatatcaaataagggtgacctgcgacgactactactacggttttggttgcaacaagttctgcagaccacgcgatgacttttttggacactatgcttgcgatcagaacggtaacaagacctgcatggaaggttggatgggcccagagtgcaatagagcaatctgtagacaggggtgttcacccaaacatgggtcatgcaagctaccaggggactgtcgatgtcagtatggttggcagggcctctattgcgataaatgcattccacatcctgggtgtgtccacgggatatgtaatgaaccctggcagtgcctgtgcgaaactaattggggggggcagctgtgcgacaaagatctgaactattgcggcacgcaccagccatgtctgaacggtggcacttgttcaaacactggcccagataaataccagtgctcatgcccggagggctattccggtcctaactgcgaaatcgctgagcatgcctgtcttagcgatccgtgtcacaacaggggctcttgcaaagagaccagcttgggattcgagtgcgaatgctcaccaggatggactggacctacatgctctaccaacatcgatgattgcagcccaaataattgcagccatggcggcacatgccaggacctagtcaacggtttcaaatgtgtgtgtccaccacagtggacaggtaagacatgtcagcttgatgcgaacgaatgcgaggctaagccgtgcgttaacgccaaaagttgtaaaaatcttatcgcaagttactattgtgactgtctgcccggctggatgggtcagaattgcgatattaatatcaacgattgccttggacagtgtcaaaatgatgcctcttgccgtgatctggtgaatgggtaccggtgcatctgcccaccgggctatgccggagaccactgtgaacgggacatcgacgagtgcgcttcgaatccatgcctcaatggaggacattgtcaaaatgagataaatagattccagtgtttgtgccctacgggtttcagcgggaacctgtgccagttggacatcgattactgtgagccgaacccttgtcagaatggggctcagtgctacaatagggcatctgactatttttgtaagtgccctgaggactacgaggggaagaactgcagccacctcaaagatcactgcaggacaacaccctgtgaagttatcgatagctgcaccgtagccatggcctcaaatgacacgcccgagggcgtaagatatatcagctctaatgtgtgcgggcctcatggcaagtgcaaatcccagtctggagggaaatttacctgcgattgcaataaaggcttcacaggcacgtattgccacgaaaatatcaacgattgtgagagcaacccctgtaggaacggcggaacatgtatcgatggggtcaacagttacaaatgcatctgctcggacgggtgggagggcgcatattgcgaaaccaacatcaacgactgctcacagaacccctgccataacgggggtacatgtcgggacctcgttaatgatttctactgcgactgcaagaatggttggaagggcaaaacatgtcattctagagactctcagtgtgacgaagcgacctgcaacaatggcggtacttgctatgatgagggagacgcgtttaaatgtatgtgcccaggtggatgggagggtacgacttgcaacatcgcacgtaattccagctgcttgcctaatccatgtcataatggcggtacatgcgttgtgaacggagagagttttacgtgcgtgtgtaaagagggctgggaagggcctatctgcgcccaaaacaccaacgattgctctccacacccctgctacaattcaggaacctgcgtcgatggagacaactggtataggtgcgaatgcgctcctgggttcgcaggacccgattgtcggattaatatcaatgaatgtcaatcgtcaccctgcgcatttggcgccacctgcgttgatgagatcaatggataccgctgtgtgtgtccccccggacactctggcgctaagtgtcaggaagtgtccggccgcccttgcatcacaatgggctccgtgataccagacggtgccaaatgggatgatgactgcaacacatgtcaatgtctcaacgggcgcattgcttgctccaaggtctggtgcggcccacgcccctgccttctgcacaaaggccatagtgagtgcccgtcaggacaatcctgcattcctattctagacgaccagtgtttcgtgcacccttgtacaggagtaggggagtgtcgctcttccagcctgcagcccgtgaaaactaagtgtacctctgattcctactaccaggataactgcgcaaacattaccttcaccttcaataaggaaatgatgtcgcctgggctcaccaccgagcacatctgcagtgaacttcggaatttgaatatcctgaaaaatgtgtccgctgagtatagtatatatattgcctgcgaaccctcgcccagcgccaataacgaaatccacgtggcgatatcagccgaggatattagagacgacgggaatccaattaaagagattacggataaaatcatcgacctggtgtccaaacgtgatgggaactcttcactgattgcagccgtcgccgaggtcagagttcagcggagaccgcttaaaaatcgtactgactttctggtacctctgttgagcagcgttctaacagttgcttggatttgctgcctggtaacagcattttattggtgcttgagaaaaaggagaaagcctggatcacatacccatagcgctagtgaagacaacactaccaacaatgtgcgagagcagctgaatcaaatcaagaaccctatcgaaaagcatggtgctaatactgtgccgatcaaagactacgagaataaaaactccaaaatgagtaagattcgaacacataattctgaggtagaagaggacgacatggataaacaccaacagaaggctcgatttgctaagcagcctgcctatacattagtggacagggaagaaaagccacccaatggaacccctaccaagcaccccaactggaccaataagcaagacaatagggatttggagtcagcacagtctctcaaccgaatggagtatattgtctag

SEQ ID NO: 4584 - DNA, 3657 bp, Artificial Sequence
  derived and/or modified sequence
atgaggagccccaggacccggggccgcagcggccggcccctgagcctgctgctggccctgctgtgtgccctgcgggccaaggtgtgtggggccagcggccagtttgagctggagatcctgtccatgcagaatgtgaatggagagctgcagaatggaaactgctgcggcggggccagaaatcctggggacaggaagtgcaccagagatgaatgtgacacctacttcaaggtgtgcctgaaggagtaccagagccgggtgacagctgggggcccctgcagctttggcagcggcagcacccctgtgattggaggcaacaccttcaacctgaaggccagcagaggaaatgacaggaaccgcatcgtgctgcccttctcctttgcctggcccaggagctacaccctgctggtggaggcctgggacagcagcaatgacacagtgcagcctgacagcatcatcgagaaggccagccacagcggcatgatcaaccccagccggcagtggcagaccctgaagcagaacacaggagtggcccactttgagtaccagatccgggtgacctgtgatgactactactacggcttcggctgcaacaagttctgccggcccagagatgacttcttcggccactacgcctgtgaccagaatggaaacaagacctgcatggagggctggatgggccctgagtgcaacagagccatctgccggcagggctgcagccccaagcacggcagctgcaagctgcccggggactgccgctgccagtatggctggcagggcctgtactgtgacaagtgcatcccccaccctggctgtgtgcacggcatctgcaatgagccctggcagtgcctgtgtgagaccaactggggcggccagctgtgtgacaaggacctgaactactgcggcacccaccagccctgcctgaatggaggcacctgcagcaacacaggccctgacaagtaccagtgcagctgcccagagggctacagcggccccaactgtgaaattgctgagcacgcctgcctgagtgacccctgccacaacagaggcagctgcaaggagaccagcctgggctttgaatgtgaatgttctcctggctggacaggccccacctgcagcaccaacattgatgactgcagccccaacaactgcagccatggaggcacctgccaggacctggtgaatggcttcaagtgtgtgtgccccccccagtggacaggcaagacctgccagctggatgccaatgaatgtgaggccaagccctgtgtgaatgccaagagctgcaagaacctgattgccagctactactgtgactgcctgcccggctggatgggccagaactgtgacatcaacatcaatgactgcctgggccagtgccagaatgatgccagctgccgggacctggtgaatggctaccgctgcatctgccccccaggctacgccggggaccactgtgagcgggacattgatgaatgtgccagcaacccctgcctgaatggaggccactgccagaatgagatcaaccgcttccagtgcctgtgccccaccggcttcagcggcaacctgtgccagctggacatcgactactgtgagcccaacccctgccagaatggagcccagtgctacaacagagccagtgactacttctgcaagtgcccagaagattatgagggcaagaactgcagccacctgaaggaccactgcaggaccaccccctgtgaggtgattgacagctgcaccgtggccatggccagcaatgacaccccagagggcgtgcgctacatcagcagcaatgtgtgtggcccccacggcaagtgcaagagccagagcggcggcaagttcacctgtgactgcaacaagggcttcaccggcacctactgccacgagaacatcaatgactgtgagagcaacccctgcagaaatggaggcacctgcattgatggagtgaacagctacaagtgcatctgcagtgatggctgggagggcgcctactgtgagaccaacatcaatgactgcagccagaacccctgccacaacggcggcacctgccgggacctggtgaatgacttctactgtgactgcaagaatggctggaagggcaagacctgccacagccgggacagccagtgtgatgaggccacctgcaacaacggcggcacctgctatgatgaaggagatgccttcaagtgcatgtgccctgggggctgggagggcaccacctgcaacatcgccaggaacagcagctgcctgcccaacccctgccacaatggaggcacctgtgtggtgaatggagagagcttcacctgtgtgtgcaaggagggctgggagggccccatctgtgcccagaacaccaatgactgcagcccccacccctgctacaacagcggcacctgtgtggatggagacaactggtaccgctgtgaatgtgcccctggctttgctggccctgactgccgcatcaacatcaatgaatgccagagcagcccctgtgcctttggagccacctgtgtggatgagatcaatggctaccgctgtgtgtgccccccaggccacagcggggccaagtgccaggaggtgtctggccggccctgcatcaccatgggcagcgtcatcccagatggagccaagtgggatgatgactgcaacacctgccagtgcctgaatggccgcatcgcctgcagcaaggtgtggtgtggcccccggccctgcctgctgcacaagggccacagcgagtgccccagcggccagagctgcatccccatcctggatgaccagtgctttgtgcacccctgcacaggagtgggagaatgtcgcagcagcagcctgcagcctgtgaagaccaagtgcaccagtgacagctactaccaggacaactgtgccaacatcaccttcaccttcaacaaggagatgatgagccctggcctgaccacagagcacatctgcagcgagctgaggaacctgaacatcctgaagaatgtgtctgctgagtacagcatctacatcgcctgtgagcccagccccagcgccaacaatgagatccacgtggccatctctgctgaggacatcagagatgatggcaaccccatcaaggagatcacagacaagatcatcgacctggtgtccaagagagatggcaacagcagcctgattgctgctgtggccgaggtgcgggtgcagaggcggcccctgaagaacagaacagacttcctggtgcccctgctgagctctgtgctgactgtggcctggatctgctgcctggtgacagccttctactggtgcctgaggaagaggaggaagccaggcagccacacccacagcgccagcgaggacaacaccaccaacaacgtgcgggagcagctgaaccagatcaagaaccccatcgagaagcatggagccaacacagtgcccatcaaggactatgagaacaagaacagcaagatgagcaagatccgcacccacaacagcgaggtggaggaggatgacatggacaagcaccagcagaaggccaggtttgccaagcagcctgcctacaccctggtggaccgggaggagaagcccccaaatggcacccccaccaagcaccccaactggaccaacaagcaggacaacagagacctggagagcgcccagagcctgaacaggatggagtacatcgtgtag

SEQ ID NO: 4585 - DNA, 3180 bp, Artificial Sequence
  derived and/or modified sequence
atgatcaaccccagccggcagtggcagaccctgaagcagaacacaggagtggcccactttgagtaccagatccgggtgacctgtgatgactactactacggcttcggctgcaacaagttctgccggcccagagatgacttcttcggccactacgcctgtgaccagaatggaaacaagacctgcatggagggctggatgggccctgagtgcaacagagccatctgccggcagggctgcagccccaagcacggcagctgcaagctgcccggggactgccgctgccagtatggctggcagggcctgtactgtgacaagtgcatcccccaccctggctgtgtgcacggcatctgcaatgagccctggcagtgcctgtgtgagaccaactggggcggccagctgtgtgacaaggacctgaactactgcggcacccaccagccctgcctgaatggaggcacctgcagcaacacaggccctgacaagtaccagtgcagctgcccagagggctacagcggccccaactgtgaaattgctgagcacgcctgcctgagtgacccctgccacaacagaggcagctgcaaggagaccagcctgggctttgaatgtgagtgcagccctggctggacaggccccacctgcagcaccaacattgatgactgcagccccaacaactgcagccacggcggcacctgccaggacctggtgaatggcttcaagtgtgtgtgccccccccagtggacaggcaagacctgccagctggatgccaatgaatgtgaggccaagccctgtgtgaatgccaagagctgcaagaacctgattgccagctactactgtgactgcctgcccggctggatgggccagaactgtgacatcaacatcaatgactgcctgggccagtgccagaatgatgccagctgccgggacctggtgaatggctaccgctgcatctgccccccaggctacgccggggaccactgtgagcgggacattgatgaatgtgccagcaacccctgcctgaatggaggccactgccagaatgagatcaaccgcttccagtgcctgtgccccaccggcttcagcggcaacctgtgccagctggacatcgactactgtgagcccaacccctgccagaatggagcccagtgctacaacagagccagtgactacttctgcaagtgcccagaggactatgagggcaagaactgcagccacctgaaggaccactgcaggaccaccccctgtgaggtgattgacagctgcaccgtggccatggccagcaatgacaccccagagggcgtgcgctacatcagcagcaatgtgtgtggcccccacggcaagtgcaagagccagagcggcggcaagttcacctgtgactgcaacaagggcttcaccggcacctactgccacgagaacatcaatgactgtgagagcaacccctgcagaaatggaggcacctgcattgatggagtgaacagctacaagtgcatctgcagtgatggctgggagggcgcctactgtgagaccaacatcaatgactgcagccagaacccctgccacaatggaggcacctgccgggacctggtgaatgacttctactgtgactgcaagaatggctggaagggcaagacctgccacagccgggacagccagtgtgatgaggccacctgcaacaatggaggcacctgctatgatgaaggagatgccttcaagtgcatgtgccctgggggctgggagggcaccacctgcaacatcgccaggaacagcagctgcctgcccaacccctgccacaacggcggcacctgtgtggtgaatggagagagcttcacctgtgtgtgcaaggagggctgggagggccccatctgtgcccagaacaccaatgactgcagcccccacccctgctacaacagcggcacctgtgtggatggagacaactggtaccgctgtgaatgtgcccctggctttgctggccctgactgccgcatcaacatcaatgaatgccagagcagcccctgtgccttcggggccacctgtgtggatgagatcaatggctaccgctgtgtgtgccccccaggccacagcggggccaagtgccaggaggtgtctggccggccctgcatcaccatgggcagcgtcatcccagatggagccaagtgggatgatgactgcaacacctgccagtgcctgaatggaagaattgcctgcagcaaggtgtggtgtggcccccggccctgcctgctgcacaagggccacagtgaatgtcccagcggccagagctgcatccccatcctggatgaccagtgctttgtgcacccctgcaccggggtgggggagtgccgcagcagcagcctgcagcctgtgaagaccaagtgcaccagtgacagctactaccaggacaactgtgccaacatcaccttcaccttcaacaaggagatgatgagccctggcctgaccacagagcacatctgcagcgagctgaggaacctgaacatcctgaagaatgtgtctgctgagtacagcatctacatcgcctgtgagcccagccccagcgccaacaatgagatccacgtggccatctctgctgaggacatcagagatgatggcaaccccatcaaggagatcacagacaagatcatcgacctggtgtccaagagagatggcaacagcagcctgattgctgctgtggccgaggtgcgggtgcagaggcggcccctgaagaacagaacagacttcctggtgcccctgctgagctctgtgctgactgtggcctggatctgctgcctggtgacagccttctactggtgcctgaggaagaggaggaagccaggcagccacacccacagcgccagcgaggacaacaccaccaacaacgtgcgggagcagctgaaccagatcaagaaccccatcgagaagcacggggccaacacagtgcccatcaaggactatgagaacaagaacagcaagatgagcaagatccgcacccacaacagcgaggtggaggaggatgacatggacaagcaccagcagaaggccaggtttgccaagcagcctgcctacaccctggtggaccgggaggagaagccacccaacggcacccccaccaagcaccccaactggaccaacaagcaggacaacagagacctggagagcgcccagagcctgaacaggatggagtacatcgtgtag

SEQ ID NO: 4586 - DNA, 5901 bp, Artificial Sequence
  derived and/or modified sequence
cacgcgtcattgtgttacctgcggccggcccgcgagctaggctggtttttttttttctcccctccctcccccctttttccatgcagctgatctaaaagggaataaaaggctgcgcataatcataataataaaagaaggggagcgcgagagaaggaaagaaagccgggaggtggaagaggagggggagcgtctcaaagaagcgatcagaataataaaaggaggccgggctctttgccttctggaacgggccgctcttgaaagggcttttgaaaagtggtgttgttttccagtcgtgcatgctccaatcggcggagtatattagagccgggacgcggcggccgcaggggcagcggcgacggcagcaccggcggcagcaccagcgcgaacagcagcggcggcgtcccgagtgcccgcggcgcgcggcgcagcgatgcgttccccacggacgcgcggccggtccgggcgccccctaagcctcctgctcgccctgctctgtgccctgcgagccaaggtgtgtggggcctcgggtcagttcgagttggagatcctgtccatgcagaacgtgaacggggagctgcagaacgggaactgctgcggcggcgcccggaacccgggagaccgcaagtgcacccgcgacgagtgtgacacatacttcaaagtgtgcctcaaggagtatcagtcccgcgtcacggccggggggccctgcagcttcggctcagggtccacgcctgtcatcgggggcaacaccttcaacctcaaggccagccgcggcaacgaccgcaaccgcatcgtgctgcctttcagtttcgcctggccgaggtcctatacgttgcttgtggaggcgtgggattccagtaatgacaccgttcaacctgacagtattattgaaaaggcttctcactcgggcatgatcaaccccagccggcagtggcagacgctgaagcagaacacgggcgttgcccactttgagtatcagatccgcgtgacctgtgatgactactactatggctttggctgcaataagttctgccgccccagagatgacttctttggacactatgcctgtgaccagaatggcaacaaaacttgcatggaaggctggatgggccccgaatgtaacagagctatttgccgacaaggctgcagtcctaagcatgggtcttgcaaactcccaggtgactgcaggtgccagtacggctggcaaggcctgtactgtgataagtgcatcccacacccgggatgcgtccacggcatctgtaatgagccctggcagtgcctctgtgagaccaactggggcggccagctctgtgacaaagatctcaattactgtgggactcatcagccgtgtctcaacgggggaacttgtagcaacacaggccctgacaaatatcagtgttcctgccctgaggggtattcaggacccaactgtgaaattgctgagcacgcctgcctctctgatccctgtcacaacagaggcagctgtaaggagacctccctgggctttgagtgtgagtgttccccaggctggaccggccccacatgctctacaaacattgatgactgttctcctaataactgttcccacgggggcacctgccaggacctggttaacggatttaagtgtgtgtgccccccacagtggactgggaaaacgtgccagttagatgcaaatgaatgtgaggccaaaccttgtgtaaacgccaaatcctgtaagaatctcattgccagctactactgcgactgtcttcccggctggatgggtcagaattgtgacataaatattaatgactgccttggccagtgtcagaatgacgcctcctgtcgggatttggttaatggttatcgctgtatctgtccacctggctatgcaggcgatcactgtgagagagacatcgatgaatgtgccagcaacccctgtttgaatgggggtcactgtcagaatgaaatcaacagattccagtgtctgtgtcccactggtttctctggaaacctctgtcagctggacatcgattattgtgagcctaatccctgccagaacggtgcccagtgctacaaccgtgccagtgactatttctgcaagtgccccgaggactatgagggcaagaactgctcacacctgaaagaccactgccgcacgaccccctgtgaagtgattgacagctgcacagtggccatggcttccaacgacacacctgaaggggtgcggtatatttcctccaacgtctgtggtcctcacgggaagtgcaagagtcagtcgggaggcaaattcacctgtgactgtaacaaaggcttcacgggaacatactgccatgaaaatattaatgactgtgagagcaacccttgtagaaacggtggcacttgcatcgatggtgtcaactcctacaagtgcatctgtagtgacggctgggagggggcctactgtgaaaccaatattaatgactgcagccagaacccctgccacaatgggggcacgtgtcgcgacctggtcaatgacttctactgtgactgtaaaaatgggtggaaaggaaagacctgccactcacgtgacagtcagtgtgatgaggccacgtgcaacaacggtggcacctgctatgatgagggggatgcttttaagtgcatgtgtcctggcggctgggaaggaacaacctgtaacatagcccgaaacagtagctgcctgcccaacccctgccataatgggggcacatgtgtggtcaacggcgagtcctttacgtgcgtctgcaaggaaggctgggaggggcccatctgtgctcagaataccaatgactgcagccctcatccctgttacaacagcggcacctgtgtggatggagacaactggtaccggtgcgaatgtgccccgggttttgctgggcccgactgcagaataaacatcaatgaatgccagtcttcaccttgtgcctttggagcgacctgtgtggatgagatcaatggctaccggtgtgtctgccctccagggcacagtggtgccaagtgccaggaagtttcagggagaccttgcatcaccatggggagtgtgataccagatggggccaaatgggatgatgactgtaatacctgccagtgcctgaatggacggatcgcctgctcaaaggtctggtgtggccctcgaccttgcctgctccacaaagggcacagcgagtgccccagcgggcagagctgcatccccatcctggacgaccagtgcttcgtccacccctgcactggtgtgggcgagtgtcggtcttccagtctccagccggtgaagacaaagtgcacctctgactcctattaccaggataactgtgcgaacatcacatttacctttaacaaggagatgatgtcaccaggtcttactacggagcacatttgcagtgaattgaggaatttgaatattttgaagaatgtttccgctgaatattcaatctacatcgcttgcgagccttccccttcagcgaacaatgaaatacatgtggccatttctgctgaagatatacgggatgatgggaacccgatcaaggaaatcactgacaaaataatcgatcttgttagtaaacgtgatggaaacagctcgctgattgctgccgttgcagaagtaagagttcagaggcggcctctgaagaacagaacagatttccttgttcccttgctgagctctgtcttaactgtggcttggatctgttgcttggtgacggccttctactggtgcctgcggaagcggcggaagccgggcagccacacacactcagcctctgaggacaacaccaccaacaacgtgcgggagcagctgaaccagatcaaaaaccccattgagaaacatggggccaacacggtccccatcaaggattatgagaacaagaactccaaaatgtctaaaataaggacacacaattctgaagtagaagaggacgacatggacaaacaccagcagaaagcccggtttgccaagcagccggcgtacacgctggtagacagagaagagaagccccccaacggcacgccgacaaaacacccaaactggacaaacaaacaggacaacagagacttggaaagtgcccagagcttaaaccgaatggagtacatcgtatagcagaccgcgggcactgccgccgctaggtagagtctgagggcttgtagttctttaaactgtcgtgtcatactcgagtctgaggccgttgctgacttagaatccctgtgttaatttaagttttgacaagctggcttacactggcaatggtagtttctgtggttggctgggaaatcgagtgccgcatctcacagctatgcaaaaagctagtcaacagtaccctggttgtgtgtccccttgcagccgacacggtctcggatcaggctcccaggagcctgcccagccccctggtctttgagctcccacttctgccagatgtcctaatggtgatgcagtcttagatcatagttttatttatatttattgactcttgagttgtttttgtatattggttttatgatgacgtacaagtagttctgtatttgaaagtgcctttgcagctcagaaccacagcaacgatcacaaatgactttattatttattttttttaattgtatttttgttgttgggggaggggagactttgatgtcagcagttgctggtaaaatgaagaatttaaagaaaaaaatgtcaaaagtagaactttgtatagttatgtaaataattcttttttattaatcactgtgtatatttgatttattaacttaataatcaagagccttaaaacatcattcctttttatttatatgtatgtgtttagaattgaaggtttttgatagcattgtaagcgtatggctttatttttttgaactcttctcattacttgttgcctataagccaaaattaaggtgtttgaaaatagtttattttaaaacaataggatgggcttctgtgcccagaatactgatggaatttttttgtacgacgtcagatgtttaaaacaccttctatagcatcacttaaaacacgttttaaggactgactgaggcagtttgaggattagtttagaacaggtttttttgtttgtttgttttttgtttttctgctttagacttgaaaagagacaggcaggtgatctgctgcagagcagtaagggaacaagttgagctatgacttaacatagccaaaatgtgagtggttgaatatgattaaaaatatcaaattaattgtgtgaacttggaagcacaccaatcttactttgtaaattctgatttcttttcaccattcgtacataatactgaaccacttgtagatttgatttttttttttaatctactgcatttagggagtattctaataagctagttgaatacttgaaccataaaatgtccagtaagatcactgtttagatttgccatagagtacactgcctgccttaagtgaggaaatcaaagtgctattacgaagttcaagatcaaaaaggcttataaaacagagtaatcttgttggttcaccattgagaccgtgaagatactttgtattgtcctattagtgttatatgaacatacaaatgcatctttgatgtgttgttcttggcaataaattttgaaaagtaatatttattaaatttttttgtatgaaaacatggaacagtgtggcctcttctgagcttacgtagttctaccggctttgccatgtgcttctgccaccctgctgagtctgttctggtaatcggggtataataggctctgcctgacagagggatggaggaagaactgaaaggcttttcaaccacaaaactcatctggagttctcaaagacctggggctgctgtgaagctggaactgcgggagccccatctaggggagccttgattcccttgttattcaacagcaagtgtgaatactgcttgaataaacaccactggattaatggcc

SEQ ID NO: 4587 - DNA, 3758 bp, Artificial Sequence
  derived and/or modified sequence
attgaaacaatccacccggtagagtgaacagcttgaggttgatcctggcctgtgataagagccaggtcagtatacttgttagggacatgtgagagacctccccgccacactgcagcattcacagcacctttcctggacctcctgtcacctcgcaggtcagggagttatgtcccctgggaacccagggcttgtccagagctacccacagttgtctgcatttccaggtagcccgattttggggttctaggatgtttcatctcctgggggggtaatcaaatccctggaagaggacaagaaagactgagaacctgacagtattattgaaaaggcttctcactcgggcatgatcaaccccagccggcagtggcagacgctgaagcagaacacgggcgttgcccactttgagtatcagatccgcgtgacctgtgatgactactactatggctttggctgcaataagttctgccgccccagagatgacttctttggacactatgcctgtgaccagaatggcaacaaaacttgcatggaaggctggatgggccccgaatgtaacagagctatttgccgacaaggctgcagtcctaagcatgggtcttgcaaactcccaggtgactgcaggtgccagtacggctggcaaggcctgtactgtgataagtgcatcccacacccgggatgcgtccacggcatctgtaatgagccctggcagtgcctctgtgagaccaactggggcggccagctctgtgacaaagatctcaattactgtgggactcatcagccgtgtctcaacgggggaacttgtagcaacacaggccctgacaaatatcagtgttcctgccctgaggggtattcaggacccaactgtgaaattgctgagcacgcctgcctctctgatccctgtcacaacagaggcagctgtaaggagacctccctgggctttgagtgtgagtgttccccaggctggaccggccccacatgctctacaaacattgatgactgttctcctaataactgttcccacgggggcacctgccaggacctggttaacggatttaagtgtgtgtgccccccacagtggactgggaaaacgtgccagttagatgcaaatgaatgtgaggccaaaccttgtgtaaacgccaaatcctgtaagaatctcattgccagctactactgcgactgtcttcccggctggatgggtcagaattgtgacataaatattaatgactgccttggccagtgtcagaatgacgcctcctgtcgggatttggttaatggttatcgctgtatctgtccacctggctatgcaggcgatcactgtgagagagacatcgatgaatgtgccagcaacccctgtttgaatgggggtcactgtcagaatgaaatcaacagattccagtgtctgtgtcccactggtttctctggaaacctctgtcagctggacatcgattattgtgagcctaatccctgccagaacggtgcccagtgctacaaccgtgccagtgactatttctgcaagtgccccgaggactatgagggcaagaactgctcacacctgaaagaccactgccgcacgaccccctgtgaagtgattgacagctgcacagtggccatggcttccaacgacacacctgaaggggtgcggtatatttcctccaacgtctgtggtcctcacgggaagtgcaagagtcagtcgggaggcaaattcacctgtgactgtaacaaaggcttcacgggaacatactgccatgaaaatattaatgactgtgagagcaacccttgtagaaacggtggcacttgcatcgatggtgtcaactcctacaagtgcatctgtagtgacggctgggagggggcctactgtgaaaccaatattaatgactgcagccagaacccctgccacaatgggggcacgtgtcgcgacctggtcaatgacttctactgtgactgtaaaaatgggtggaaaggaaagacctgccactcacgtgacagtcagtgtgatgaggccacgtgcaacaacggtggcacctgctatgatgagggggatgcttttaagtgcatgtgtcctggcggctgggaaggaacaacctgtaacatagcccgaaacagtagctgcctgcccaacccctgccataatgggggcacatgtgtggtcaacggcgagtcctttacgtgcgtctgcaaggaaggctgggaggggcccatctgtgctcagaataccaatgactgcagccctcatccctgttacaacagcggcacctgtgtggatggagacaactggtaccggtgcgaatgtgccccgggttttgctgggcccgactgcagaataaacatcaatgaatgccagtcttcaccttgtgcctttggagcgacctgtgtggatgagatcaatggctaccggtgtgtctgccctccagggcacagtggtgccaagtgccaggaagtttcagggagaccttgcatcaccatggggagtgtgataccagatggggccaaatgggatgatgactgtaatacctgccagtgcctgaatggacggatcgcctgctcaaaggtctggtgtggccctcgaccttgcctgctccacaaagggcacagcgagtgccccagcgggcagagctgcatccccatcctggacgaccagtgcttcgtccacccctgcactggtgtgggcgagtgtcggtcttccagtctccagccggtgaagacaaagtgcacctctgactcctattaccaggataactgtgcgaacatcacatttacctttaacaaggagatgatgtcaccaggtcttactacggagcacatttgcagtgaattgaggaatttgaatattttgaagaatgtttccgctgaatattcaatctacatcgcttgcgagccttccccttcagcgaacaatgaaatacatgtggccatttctgctgaagatatacgggatgatgggaacccgatcaaggaaatcactgacaaaataatcgatcttgttagtaaacgtgatggaaacagctcgctgattgctgccgttgcagaagtaagagttcagaggcggcctctgaagaacagaacagatttccttgttcccttgctgagctctgtcttaactgtggcttggatctgttgcttggtgacggccttctactggtgcctgcggaagcggcggaagccgggcagccacacacactcagcctctgaggacaacaccaccaacaacgtgcgggagcagctgaaccagatcaaaaaccccattgagaaacatggggccaacacggtccccatcaaggattatgagaacaagaactccaaaatgtctaaaataaggacacacaattctgaagtagaagaggacgacatggacaaacaccagcagaaagcccggtttgccaagcagccggcgtacacgctggtagacagagaagagaagccccccaacggcacgccgacaaaacacccaaactggacaaacaaacaggacaacagagacttggaaagtgcccagagcttaaaccgaatggagtacatcgtatagcagaccgcgggcactgccgccgctagtgtggcctcttctgagcttacgtagttctaccggctttgccatgtgcttctgccaccctgctgagtctgttctggtaatcggggtataataggctctgcctgacagagggatggaggaagaactgaaaggcttttcaaccacaaaactcatctggagttctcaaagacctggggctgctgtgaagctggaactgcgggagccccatcta

SEQ ID NO: 4588 - DNA, 3657 bp, Artificial Sequence
  derived and/or modified sequence
atgcggagcccccggacccggggccggagcggccggcccctgagcttactcctggcccttctgtgcgctcttcgagctaaggtatgcggtgccagtggccaattcgaactggagattctatcaatgcaaaacgtaaacggggaactgcagaacggcaactgctgtggcggagcacgaaacccaggagacaggaaatgtacacgcgacgaatgcgacacatactttaaggtgtgcctgaaggaatatcaatcccgggtgaccgccggcggcccttgttcatttggatccggttccactcctgtaatcggggggaatacctttaatttgaaagctagcaggggaaatgaccggaacaggattgtgctgcccttctcttttgcatggccccgcagctacaccttgcttgtggaggcttgggacagttcaaacgacactgtacagccggattcaatcatcgaaaaagctagccacagtggaatgatcaatccgagtcggcagtggcagaccctgaagcagaacacaggcgtggcccacttcgaataccagattcgcgtcacttgtgacgactattattatggatttggctgcaataaattctgccgtcccagagacgattttttcggacactatgcttgtgaccagaacggcaataaaacttgtatggaagggtggatgggccccgagtgtaaccgggccatctgccgacagggttgttcacctaaacatggtagttgtaagctaccaggtgactgccgttgccaatatggctggcagggcctttactgcgacaaatgtatcccgcaccccgggtgcgttcacggtatatgtaacgaaccatggcagtgtctctgcgagacaaactggggcgggcagctttgcgataaagacttgaattattgtggcactcatcaaccctgtttgaatgggggaacctgttctaacacaggacctgataagtaccagtgctcatgtcctgaggggtacagtggccccaactgcgagatagccgagcatgcatgtctgtctgacccatgccataatcgaggatcctgtaaagaaacctctctggggtttgagtgcgagtgttctcccggctggacaggtcccacttgctctaccaacatcgacgactgcagtcctaacaattgcagccatggtggcacatgtcaggacctggtcaatggatttaagtgcgtatgcccaccacagtggaccggcaagacttgccagctcgatgctaacgaatgtgaagccaagccttgtgtcaacgccaaaagttgtaaaaacctcattgcctcatactattgcgattgtctgccgggatggatgggtcagaattgcgatatcaatatcaatgactgtttgggacagtgtcagaatgacgcctcttgccgggacctggtgaacggttaccgatgtatttgtcctccaggctatgccggcgaccattgtgaacgagatatcgacgagtgcgccagtaacccttgcctgaatggtggacattgtcagaacgagattaacagatttcaatgcctgtgtcccaccgggtttagcggcaacctgtgtcaactcgacatcgattactgtgagccaaatccctgccagaatggagcacaatgctacaacagagcctccgactatttttgtaaatgtcctgaggactacgaaggaaagaactgttcccacctcaaggatcactgtcggacaacaccctgcgaagtgatcgatagctgcacggtggcaatggcaagcaacgatactccagaaggggtaagatatatatcctccaacgtgtgtgggccgcatggcaaatgcaagtcacaatctggcgggaagtttacctgcgattgcaataagggctttaccggaacttattgtcacgaaaacattaacgactgcgagtctaatccctgtagaaacggtggcacgtgcatcgatggggtgaacagctataagtgcatctgttctgatggatgggagggcgcctactgtgagacgaatattaacgactgttcccagaacccatgtcacaacgggggcacatgccgcgacctcgtgaatgacttttactgcgactgcaagaacgggtggaagggcaaaacctgccattcccgcgactcgcagtgcgacgaggcaacatgcaataacggcgggacttgttatgatgagggcgacgcatttaaatgcatgtgtccaggaggttgggaaggtactacctgcaacatagccagaaactcttcctgcctgcctaatccatgtcacaatggaggcacctgtgtggtgaacggagaatccttcacgtgtgtgtgtaaggaggggtgggagggccctatctgtgctcagaacactaatgattgcagcccgcacccgtgttataatagtggaacctgtgtggatggggacaattggtataggtgtgaatgtgcccctggtttcgctggccccgattgcagaatcaatattaacgagtgccagtcttccccgtgtgccttcggggccacttgcgtggatgagattaatgggtacagatgcgtctgcccaccagggcattcaggggcaaaatgccaggaggtttcaggtagaccgtgtatcactatggggagcgtcatcccagatggtgccaaatgggacgacgactgtaatacctgccaatgtctgaatggccgtatcgcttgcagtaaggtgtggtgtggacctagaccctgcctgctgcacaagggacacagcgagtgcccgagtgggcaaagctgcatcccaatcctcgatgatcagtgttttgttcatccttgcacaggcgtaggcgagtgtcggtcaagtagccttcagccagttaagaccaagtgtacaagcgacagttattaccaggataactgcgctaacataacttttacattcaataaagagatgatgtcgcctggactgacgactgaacacatttgctcggagctgcgcaatctgaatatactgaaaaacgtgagcgcagaatactctatctatattgcatgcgagccatccccctcagccaataacgagatccacgtggccatctcagccgaggatatcagagatgacggtaatccaataaaggagatcacagacaaaataatcgacctggttagcaagagggacggaaatagcagcctcatagcagccgtagcggaggtgagagttcagaggagaccgctaaaaaatcgaaccgattttctcgtgcccctcctcagctccgtgctaaccgtcgcctggatatgctgcctcgtgaccgccttctactggtgtcttcgtaaacggcggaagcccggtagtcacacacattccgcttctgaggacaacacaacgaacaatgtgagagagcagctgaaccaaattaagaaccccattgagaagcacggagctaacaccgtgcccatcaaggactatgaaaataagaattccaagatgagtaaaattcggacgcacaactccgaggtggaggaggacgacatggacaagcaccaacagaaggcccgctttgctaaacagcccgcctacaccctggtggatagggaggagaaaccgcctaacggcaccccaactaagcatccaaattggactaacaaacaggataacagagatctggagtctgctcagtctttgaataggatggagtacatcgtgtag

SEQ ID NO: 4589 - DNA, 3180 bp, Artificial Sequence
  derived and/or modified sequence
atgatcaaccccagccggcagtggcagaccctgaagcagaacaccggcgtcgcacacttcgagtatcagattagagttacatgtgatgattattactacggtttcggctgcaacaagttttgtcggccaagagatgatttcttcgggcattacgcatgtgaccagaatggcaataagacctgtatggagggctggatgggtcccgaatgtaacagggccatttgccgtcagggctgctcgccaaagcatggatcttgcaaactgccaggggattgtcgctgccaatacggctggcagggcctctactgcgacaagtgcatcccacacccgggctgcgtgcacgggatatgcaacgaaccctggcaatgcttatgtgaaacgaactggggggggcaactgtgcgacaaagacctgaactattgtggtactcaccagccttgcctgaacggaggcacttgctccaacacaggacccgacaaatatcagtgttcatgtcccgaggggtactccggcccgaattgcgagattgcagaacatgcgtgcctttcggacccatgtcacaaccgggggtcttgcaaggaaacttctctggggttcgagtgcgagtgtagtcctggatggaccgggccaacatgctcaaccaatattgatgattgcagtccaaataattgcagccacggaggtacatgccaggatcttgtgaacgggtttaagtgtgtctgtccgcctcaatggacgggcaagacctgtcagctggacgccaacgagtgtgaggctaagccatgcgtaaatgccaaatcttgtaagaatttaattgcttcatactattgcgattgcctcccaggttggatgggccagaactgcgacattaatattaacgattgccttggccagtgtcaaaacgacgcctcatgcagggatctggtcaatggctatagatgcatctgtccacctggctatgcgggggaccactgcgaaagggatattgacgagtgcgcatcaaacccttgcctaaatggaggccactgccagaacgagataaataggtttcagtgtctatgcccaactggcttttcagggaatttatgtcaactggatattgactattgtgaacctaatccatgtcaaaacggagctcagtgttataaccgagcctccgattacttttgtaaatgtcctgaggattatgaaggcaagaattgttcacatctgaaggaccactgtcgcaccacgccctgtgaagtcatcgacagttgcactgtggccatggctagtaatgatactcccgagggtgtccgctatatctcttctaacgtctgtgggccacacggcaaatgcaaatcccagtcaggcggaaagtttacatgtgattgtaataaaggatttacagggacgtattgtcacgaaaatataaacgattgcgagagcaacccctgccgaaatggagggacctgcatcgatggggtaaattcttacaagtgtatctgttctgatggctgggaaggggcctactgtgaaacaaacatcaatgactgcagtcagaatccttgccataacggagggacatgtagagatctcgtgaacgatttttactgtgactgcaagaacggatggaaaggcaaaacatgccacagccgtgactcccagtgtgacgaagcaacgtgcaacaacggaggaacctgttatgacgagggagacgcatttaagtgcatgtgtcccggcggatgggagggcacaacatgcaacatcgcaaggaattcttcatgtctacctaatccttgccataacgggggcacttgtgtagtgaacggggagtccttcacttgcgtgtgcaaggaggggtgggagggcccaatttgcgctcaaaatacaaacgattgctctcctcacccatgctacaacagtgggacgtgcgttgatggggacaactggtacaggtgtgagtgcgcccctgggttcgcaggaccagattgtaggatcaatatcaatgagtgccaaagttcaccttgtgcctttggagcgacatgtgttgatgagatcaacgggtatcgttgtgtgtgtccacctgggcactcaggcgccaagtgccaggaagtgtctgggcggccctgtatcacaatggggagtgtcatccccgatggggccaagtgggatgacgattgcaatacatgtcagtgcctgaatggaagaatcgcctgctccaaggtgtggtgcggcccacgcccttgtcttttgcataaaggccattctgagtgtccgagtgggcaaagctgtatccccatcttagatgaccagtgttttgttcacccctgtaccggagtgggcgagtgccgctctagctctctgcagcctgttaaaactaagtgtacttccgacagctattaccaggataattgcgctaacatcacttttactttcaacaaggaaatgatgagccccggtctcaccacagagcatatttgtagtgaactgaggaacctgaacatcctgaaaaacgtttcggccgagtactctatttatatcgcctgtgaaccatccccctctgccaacaacgagatccacgtcgctattagcgcagaagacatacgcgacgacggtaacccaatcaaggaaattaccgacaagatcatcgatcttgtttccaagagagacggcaatagcagccttattgcggcagtcgccgaggtgcgggttcagagacggcccctcaaaaatcgcacagactttcttgtccctcttctgtcatccgtgctcacagtggcctggatttgttgcctggtcaccgccttttattggtgcctgagaaagcgcagaaaacccggcagtcatactcattcagcttccgaggataacacaaccaataatgtaagggaacagttgaaccaaattaaaaatccaatcgagaaacacggagctaatacagtgccaattaaggattacgagaacaaaaattcaaagatgtctaagattcgcactcacaatagtgaggtcgaagaagacgatatggataaacatcaacaaaaagcgaggttcgccaaacaacctgcctataccctagttgaccgggaagaaaaaccgccaaatggcacacctaccaaacatcccaactggaccaataagcaagacaatcgagatctcgagtccgcccagagtctgaaccgaatggagtacatcgtgtag

SEQ ID NO: 4590 - DNA, 3657 bp, Artificial Sequence
  derived and/or modified sequence
atgcgctccccacggacccgaggcagatccggacgacctctgtccctcttactagctttgttgtgtgctctccgggctaaggtgtgcggtgcctctggtcagttcgaacttgaaattctgagcatgcagaatgtgaacggtgagttgcaaaatggtaattgttgcggtggtgcacgtaatcccggtgatcgtaagtgcacccgcgatgaatgcgatacatactttaaggtctgtcttaaggaatatcagagccgggtgactgcagggggtccttgttcttttggttctggctctacgccggtgattggcggtaacacctttaatctgaaggcctcacggggaaatgatcgaaacaggatcgtgctcccattctccttcgcctggcctcgtagttacacactgttagtcgaagcatgggacagttctaatgacactgttcagccggactcaattattgagaaggccagccattccggcatgattaacccctctaggcagtggcaaacactgaaacagaacaccggcgtcgcgcactttgagtaccagataagggttacatgtgacgactattattacggattcggctgcaacaaattttgcaggccccgagatgacttcttcggacactatgcctgcgatcagaatgggaacaagacttgcatggagggctggatgggcccagagtgcaatagggctatctgccgccaggggtgctctccgaagcacgggagctgcaaactgcctggagactgcagatgtcaatatggctggcaaggtctctactgcgataaatgtatcccgcaccctgggtgcgtgcatggcatttgcaacgagccttggcaatgtctgtgtgaaactaattggggtggtcaactgtgcgacaaggatctcaattattgtggtactcatcagccgtgccttaacggaggtacctgttcaaatacaggccctgataagtaccagtgttcgtgccctgaaggctactctggacctaattgcgagattgcggagcatgcctgcctttcagacccatgccacaaccgaggttcatgtaaagagacctcactgggatttgagtgcgagtgctccccagggtggaccgggcctacctgcagtacgaacatagatgattgctcccctaataactgttcccatggaggcacatgtcaggacctggttaacggctttaagtgcgtgtgccctccccaatggacagggaaaacttgtcagttggatgccaatgagtgcgaggctaagccatgtgtgaacgctaaaagctgcaagaacttgatcgcctcatattattgcgattgcttgccagggtggatgggtcaaaactgtgacatcaatatcaacgactgtctcggacagtgccaaaacgatgcctcctgcagggacctggtcaacggataccgatgtatttgtccgccagggtacgctggcgaccactgcgagcgcgacatcgacgaatgtgcctccaacccctgcctgaatggcggacattgtcagaacgaaatcaacagattccaatgtctgtgtcccaccgggttctccggcaacttgtgccaacttgacatcgactactgtgagccaaatccctgccagaacggtgctcagtgctataacagggcttccgactatttttgtaagtgccccgaggattacgagggaaaaaactgcagccatctgaaagatcattgtcgaacaactccctgcgaggttattgattcctgcactgtggccatggctagcaatgacacccctgagggggtcaggtacatttcgtccaacgtgtgcggccctcatgggaagtgcaagagccagtccggcggaaaattcacttgcgattgtaataaaggatttaccggaacctattgccatgaaaacatcaacgattgcgagtccaacccctgcaggaacggaggcacctgcatcgacggcgtgaactcctataaatgcatatgttccgacggttgggagggggcttattgtgaaaccaatatcaacgactgctcacagaatccttgtcacaatggagggacatgtcgcgacctggtgaacgacttctattgcgactgtaaaaacggctggaagggaaagacgtgtcacagccgggattcccagtgcgacgaagctacgtgtaacaacggaggcacttgctacgatgagggcgacgcttttaagtgtatgtgtcctgggggttgggagggtactacttgtaacattgccagaaactctagttgcctgccaaacccgtgccacaatggtggaacttgcgtagttaacggtgagtcctttacttgcgtgtgtaaggaggggtgggagggtccaatttgtgctcagaacactaacgactgctctcctcatccatgctacaatagcgggacctgcgttgacggggataactggtacagatgcgaatgcgctcccggatttgctgggcctgactgccgaatcaacattaacgaatgccagtccagcccctgtgcattcggagcaacttgtgtggacgagattaatggctataggtgcgtatgccccccagggcacagtggagctaaatgtcaggaagtgtctggccgaccgtgcatcacaatgggcagtgttatccccgatggtgcaaaatgggacgacgactgtaatacatgtcagtgtctgaatgggaggattgcttgttcaaaagtctggtgtgggcctcgcccttgtctgctccataagggccactccgaatgccccagcggacagtcatgcatcccaatcctggatgaccagtgtttcgtgcacccatgcacgggagtaggcgaatgccggtcaagctcactccaacccgttaaaacgaaatgcacatcagattcatattatcaagacaactgtgcaaacatcacattcacatttaataaagagatgatgagtccaggcctgacaacggagcatatatgttctgagctgcgaaaccttaatatattaaagaacgtgtcagctgaatactctatttacattgcctgtgaaccatcgccatcagcgaacaatgagatccatgtggccatcagcgcggaagacattagggatgatgggaatcccatcaaagagatcacggataagatcattgatctggtttcgaaaagggacggtaatagttctcttattgctgccgtggctgaagttagggtccaacgtaggccactgaaaaaccggacagacttcttagtcccactgttgtcatcggtgctcaccgtcgcctggatctgctgcctcgtaactgccttttattggtgtttaaggaaaagacgaaaaccgggatcacatacccactctgcaagcgaagataatacaaccaataacgtcagggaacaactaaaccaaatcaaaaacccaattgaaaaacatggtgccaatactgtgcccatcaaggactacgagaataagaattctaagatgagcaagataaggacccacaactccgaggtggaagaggatgatatggacaagcaccagcagaaggctcgcttcgccaaacaaccagcttatacactcgttgaccgcgaggaaaagcctcccaatggaacgccaaccaagcatcccaattggacaaacaaacaggacaatagggacctagagagtgcccagtccctgaaccgcatggaatacattgtctag

SEQ ID NO: 4591 - DNA, 3180 bp, Artificial Sequence
  derived and/or modified sequence
atgattaacccaagcagacagtggcaaaccttgaagcagaacacaggtgtggcacacttcgaataccaaattagggttacttgcgacgactattattatggtttcgggtgcaacaagttctgcaggcctagggatgatttcttcggccactatgcatgcgatcagaacgggaacaaaacatgcatggaggggtggatggggccagagtgcaatagagctatttgtaggcaaggttgcagccccaagcacggctcgtgcaagctgccaggtgattgtcgttgccaatatggctggcagggactgtactgtgacaagtgtatcccacacccagggtgtgttcacggcatttgcaacgaaccatggcagtgtctgtgcgaaaccaattggggcggacaactctgtgataaggatctcaactattgtgggacacaccagccatgtctcaacggcggaacttgttctaacacgggacctgataagtaccagtgttcctgccctgaagggtatagcggcccaaactgtgagatagccgaacacgcgtgcctttcagacccatgtcacaatcgcggatcctgcaaagaaaccagcctcggattcgaatgcgagtgctccccgggttggacaggccctacgtgttctaccaacatcgatgactgctcccctaacaactgcagccacgggggaacctgccaggacctggtcaacggttttaaatgcgtgtgcccaccccagtggacgggcaaaacctgccagctggacgccaacgaatgtgaagccaagccctgcgtgaacgcgaagtcgtgcaaaaacctgatcgccagctactattgtgactgtctccccggttggatgggccagaattgcgatataaacatcaatgattgcctgggccagtgccagaacgatgcgtcttgcagggacctcgtgaacgggtaccgctgcatttgtcctcctggctatgccggagaccattgcgaaagggacatcgatgagtgtgcgagtaacccctgtctgaacggcggacattgtcagaacgagattaatcgcttccaatgtctttgccccaccggatttagtggcaatctctgccagctcgacattgactattgtgaaccgaacccatgccaaaatggcgcacaatgttacaatcgagccagtgactacttctgtaagtgtcctgaggactatgaaggaaaaaactgctcccacttgaaagatcattgtagaaccacaccttgcgaagtgattgactcctgcacagtggcaatggcctcgaatgacaccccagaaggagtgcgctacatctccagcaatgtctgtggtccccatgggaagtgcaagtcgcagtctggcggtaagttcacctgtgattgcaacaagggattcactggcacgtactgccatgagaatataaacgattgcgagtcaaacccttgcagaaacggcggaacgtgtatcgatggcgtgaactcctacaaatgtatttgcagtgacggctgggagggcgcatactgtgagaccaatatcaacgactgctctcagaacccttgtcacaacgggggaacctgccgtgacctcgtgaatgacttttactgtgattgtaagaacgggtggaaaggcaagacttgtcatagcagggactcccaatgcgacgaggccacttgcaataatggagggacctgctacgatgagggagacgcattcaagtgcatgtgtcctggaggatgggaaggaacaacgtgtaatatcgccagaaattccagctgccttcccaatccttgccataatggagggacctgcgtggttaacggagaatccttcacatgcgtctgcaaggagggctgggagggtccaatctgtgcccagaacacaaacgactgcagccctcacccttgctataattctggtacctgtgtggacggggacaattggtacaggtgcgaatgcgcacccggttttgcgggacccgactgtcgaatcaacataaatgaatgtcagagctctccatgtgcttttggagccacatgtgtggacgagattaacggttatcggtgcgtatgccccccagggcattccggcgctaaatgtcaagaagtcagtggcagaccatgtattaccatggggtctgtgatacccgacggcgctaaatgggatgatgactgcaatacatgtcagtgcctgaatggtcgcatcgcatgctcaaaggtttggtgtgggcctcgcccttgcctgttgcacaaaggacacagtgagtgcccatcagggcagtcctgtatccctatcttggacgatcagtgttttgtgcacccctgtactggggtaggagagtgtaggtcctcctctctccaaccggtgaagacaaagtgcacctcggacagctattaccaagataattgtgcaaacattacttttactttcaataaagagatgatgtcaccaggcctgacgacggaacacatttgctctgagctaagaaacttgaacattctgaaaaatgtgagcgctgaatactctatctacattgcctgcgagcctagcccaagcgctaataacgagattcatgtggccatctcagcggaagacatccgagatgacggtaatcccattaaggagatcaccgataagattatagatcttgtgtctaaacgagacgggaatagctctctgattgccgctgtggcagaggtaagggtccaaaggcggccactaaagaaccgcaccgattttctagtgcctttactgtccagcgtgctgaccgttgcatggatttgctgccttgtgacagccttttattggtgtctgcgcaaacgcaggaagccaggctcacacacccacagcgcttccgaagacaatacaaccaacaatgtgagagagcagcttaaccagatcaagaacccgatagaaaagcacggtgccaataccgtgcccatcaaggattacgaaaataaaaattctaaaatgagcaaaattcgcactcataactcagaggttgaagaggatgatatggataagcatcagcaaaaagcaaggttcgccaagcagccagcctataccctggtggacagggaggaaaaacctccaaacggaaccccgactaaacacccaaactggacaaacaagcaagataatcgggatctcgaatctgctcaatccctgaacagaatggaatatatcgtctag

SEQ ID NO: 4592 - protein, 680 aa, Artificial Sequence
  derived and/or modified sequence
MVPGVPGAVLTLCLWLAASSGCLAAGPGAAAARRLDESLSAGSVQRARCASRCLSLQITRISAFFQHFQNNGSLVWCQNHKQCSKCLEPCKESGDLRKHQCQSFCEPLFPKKSYECLTSCEFLKYILLVKQGDCPAPEKASGFAAACVESCEVDNECSGVKKCCSNGCGHTCQVPKTLYKGVPLKPRKELRFTELQSGQLEVKWSSKFNISIEPVIYVVQRRWNYGIHPSEDDATHWQTVAQTTDERVQLTDIRPSRWYQFRVAAVNVHGTRGFTAPSKHFRSSKDPSAPPAPANLRLANSTVNSDGSVTVTIVWDLPEEPDIPVHHYKVFWSWMVSSKSLVPTKKKRRKTTDGFQNSVILEKLQPDCDYVVELQAITYWGQTRLKSAKVSLHFTSTHATNNKEQLVKTRKGGIQTQLPFQRRRPTRPLEVGAPFYQDGQLQVKVYWKKTEDPTVNRYHVRWFPEACAHNRTTGSEASSGMTHENYIILQDLSFSCKYKVTVQPIRPKSHSKAEAVFFTTPPCSALKGKSHKPVGCLGEAGHVLSKVLAKPENLSASFIVQDVNITGHFSWKMAKANLYQPMTGFQVTWAEVTTESRQNSLPNSIISQSQILPSDHYVLTVPNLRPSTLYRLEVQVLTPGGEGPATIKTFRTPELPPSSAHRSHLKHRHPHHYKPSPERY

SEQ ID NO: 4593 - DNA, 2043 bp, Artificial Sequence
  derived and/or modified sequence
atggtacccggggtccctggcgccgtattgacactgtgcctatggcttgctgcatcatcagggtgtctggcagctggccctggggcggccgccgctcgccgtctggacgagagtctctccgcagggtcggttcaaagggccaggtgcgcctcccggtgtcttagtctgcaaattacaaggatcagcgcattctttcaacacttccagaacaacggctcactggtatggtgccagaatcataagcagtgttcgaaatgcttagagccgtgcaaggagtccggcgatttgcgcaaacaccagtgtcagtctttttgtgaacctctcttcccgaagaagagctatgaatgtttgacctcgtgtgaatttctgaagtatattttgctggttaaacagggtgactgcccagcaccagagaaggcaagcggctttgcagccgcctgcgtggaaagttgtgaggtcgacaacgagtgctcaggagtcaagaaatgctgtagtaacggctgtggtcatacctgccaggtgccaaaaacattatacaaaggggtgcctcttaagccccgcaaagaactgcggttcaccgaacttcagagcggccaattggaagttaaatggtcctcaaagtttaacattagtatcgagcccgttatttacgttgtacagagaaggtggaattatggcattcaccccagcgaggacgatgcaacccactggcagacggtcgctcagacaaccgatgagcgtgtgcaactgaccgacatcagacctagccgctggtatcaatttcgggtggcagccgtcaatgtgcacggcacacgcggctttaccgccccatccaaacactttcgatcttcaaaggatccttcagcccctccagctcccgccaatctgcgcctggcgaatagcaccgtgaattcagacggaagcgtgacagtgaccattgtgtgggacctgcccgaagaacctgatatccccgtgcaccactacaaggtgttctggtcatggatggtcagttccaaatctttggtgcctacaaagaaaaagaggcggaagacaaccgacgggttccaaaatagcgttattctcgagaagttacagcctgattgtgactacgttgttgaactacaggcaatcacctactggggacaaacaagactgaaaagcgcgaaggtatccttgcacttcacaagcacacatgccaccaataacaaagagcagttggtgaaaactcgaaaagggggaatccagactcaactaccctttcagcgcaggaggcccactcgccccttggaggttggcgccccattctaccaggacggccagctgcaggtcaaggtgtactggaaaaagacagaggatcctaccgtgaacagataccatgtcaggtggtttcccgaggcttgtgcacataatcgcaccaccgggagcgaggcctcttctggcatgacgcatgagaattacataattctgcaagatctctccttttcgtgtaagtataaagtcactgtgcagccaataaggcccaaatctcattcaaaagctgaggccgtgtttttcactacgcccccatgctctgccctgaagggcaagagccataaaccagtgggctgcctgggggaggccggacatgttctgtcaaaagtactggccaaaccagagaacctgtcagcctccttcatagtccaggacgtgaacatcacagggcatttttcttggaagatggcaaaggcaaacttgtatcaacccatgactggctttcaggtgacttgggccgaagtgacaacagaatctagacagaatagcctgcccaattctataattagccaaagccagattctgccttccgatcactacgtgctcacagtccctaacctgagaccatcgaccctgtacaggcttgaagtgcaagtgctgactcctggtggagagggcccagcaacaattaagacctttaggactcctgagctgcctcctagcagtgcacacagatcgcatttgaagcaccgccatccacatcattacaagccttcacccgaacgttactag

SEQ ID NO: 4594 - DNA, 6314 bp, Artificial Sequence
  derived and/or modified sequence
gtcggcgaggagggtccggccggagttgaaggattgaactttccggctcagtcgcggcgtctgcctggtcctcagcagtgcagccccggcgcggagcagggagcctcggcccgcgcccggcgccctcgccctcgccctcgacccgcagccatggtgcccggggtgcccggcgcggtcctgaccctctgcctctggctggcggcctccagcggctgcctggcggccggccccggcgcggctgctgcgcggcggctggacgagtcgctgtctgccgggagcgtccagcgcgctcgctgcgcctccaggtgcctgagcctgcagatcactcgcatctccgccttcttccagcacttccagaacaatggttccctggtttggtgccagaatcacaagcaatgttctaagtgcctggagccctgcaaggaatcaggggacctgaggaaacaccagtgccaaagcttttgtgagcctctcttccccaagaagagctacgaatgcttgaccagctgtgagttcctcaaatacatcctgttggtgaagcagggggactgtccggctcctgagaaagccagtggatttgcggccgcctgtgttgaaagctgcgaagttgacaatgagtgctctggggtgaagaaatgttgttcgaatgggtgtggacacacctgtcaagtacccaagactctgtacaaaggtgtccccctgaagcccagaaaagagttacgatttacagaactgcagtctggacagctggaggttaagtggtcctcgaaattcaatatttctattgagcctgtgatctatgtggtacaaagaagatggaattatggaatccatcctagcgaagatgacgccactcactggcagacagtggcccagaccacagacgagcgagttcaactgactgacataagacccagccgatggtaccagtttcgagtggctgctgtgaatgtgcatggaactcgaggcttcactgcccccagcaaacacttccgttcttccaaagatccatctgccccaccagcaccggctaacctccggctggccaactccaccgtcaacagtgatgggagtgtgaccgtcactatagtttgggatctccccgaggagccggacatccctgtgcatcattacaaggtcttttggagctggatggtcagcagtaagtctcttgtcccaacaaagaagaagcggagaaagactacggatgggtttcaaaattctgtgatcctggagaaactccagccagactgtgactatgttgtggaattgcaagccataacgtactggggacagacacggctgaagagtgcaaaggtgtcccttcacttcacatcgacacatgcaaccaacaacaaagaacagcttgtgaaaactagaaaaggtggaattcaaacacaactcccttttcaaagacgacgacccactcgcccgctggaagtcggagctcccttctatcaggatggccaactgcaagttaaagtctactggaagaagacagaagatcccactgtcaaccgatatcatgtgcggtggtttcctgaagcgtgtgcccacaacagaacaaccggatcagaggcatcatctggcatgacccacgaaaattacataattcttcaagatctgtcattttcctgcaagtataaggtgactgtccaaccaatacggccaaaaagtcactccaaggcagaagctgttttcttcactactccaccatgctctgctcttaaggggaagagccacaagcctgttggctgcctgggcgaagcaggtcatgttctttctaaggtgctagctaagcctgagaacctttctgcttcattcatcgtccaggatgtgaacatcaccggtcacttttcttggaagatggccaaggccaatctctatcagcccatgactgggtttcaagtgacttgggctgaggtcactacggaaagcagacagaacagcctacccaacagcattatttcacagtcccagatcctgccttccgatcattatgtcctaacagtgcccaatctgagaccatctactctttaccgactggaagtgcaagtgctgaccccaggaggggaggggccggccaccatcaagacgttccggacgccggagctcccaccctcttcagcacacagatctcatcttaagcatcgtcatccacatcattacaagccttctccagaaagatactaaactgttcaaaaagattttgtgaaattgcacagatgtgtaagcttgttgaacttcggccacgagacatgcacacttccagaggcagtgggaactgctcagaggcccggactctcctatgtgactttagtgcaggaagaacttctgtcaatcatggacgcatctggagacaagtgagaaacagtagattggtgaagacagacaccagttccctacaagcatggagaaaatgaagaataggcctgtttaatgctaaattttgttttcatgtatggtgtcgctcatttctattgaattacaacagaactcagttttccctgaatttggagcaccaaactccgccccaaaaaggagagtaacaaatacacaattcacacataacactaagcgtaaatctaatcaataaaatatatttttgactaaattattgattcgatatgaaaaatcaactaagattacacagctttgtttttttgaatctttcctaagatcatttttatcctaggtgatttttaaatgaaaatgtgtaatctaaaatataccagcgaatttaaatctaaaaatgctcctactttaagtaccttgtgctgctctttatgcaaaggtaaatcaaagttccctctataaattatgatttacaaaagacacccaagccagaggaactcaatgaaataagctgctaatcagattttaccttggagaaatgaaaattatttcttggggatgccttttaatatttgatcctattatgtgagagattttcctgatatgttatcttatttatattttcccttattttcctcaatgcagataatagcttttggtgcacttttgtttcaccatctgaaaattcacaaaacttcttgcttcaaatgaaaaaatcccaactattgagcatgtttaaatctttgcagagatttgccttttcttaatcaaagaaaggtctttgtgtgctagaatattattggtaatgttttaaaaattcctttgattgatagagaaggacagttatttgcatttaattcacccatatgctttcaaatctagtatatcttactttttggaaatgttttatgctacaaattagtgccttgtagcatgaacttaagtcaaaacgtgttatcaatatagagtgttgcagtgtatattgtaacaacctaaaacgcagagaagtttaatttaatactgttttttttcttgaaggaatactcacatacatggtttgaaatgtgcatagatatgcatgtctatataattataaatgcatgtgtatatatatgcaaatatatgtacatatacatgtatatacacacagacacatgcatatacatgaatataccttgagcatgaatccctggagaaatcgttttcgtagctcaccaatggtgagtaaagatacagctcttttaaaggtcataaggataatatattttccccatcaatgctgattctgagaaaagagcaatttatcaaaattaaacactgtaaaagaaaggtgtccatatgtctttacctacctaagtaaaacaggaagaaaatcagtaacattatccttaggttttgacaatggtacttgcttcttgttgttttattgtttcctgaattcatgcagatgcctggccattcctgggaagagtggataactcagaagtcactgtactccacagagcctcactgcagtgtctaaaggtagatgcaaattaaaatgcagggaaaataacttttctgatgttgatgcatgtctttgggaaacacatttataaacatggatacctgataatagatattgaaacccatttcctgtgtgttaaaatatttaaaaagtggatattccaggaatgttttgcagctttgtacaagtaacataaattggacacctcagaatgaaagttcatgttggttctgaatggttcactgcagctcctgtcacaagctgggatggatttatcacattgagttatgaaattacctggttctaagaatttttgagtggcaaaaatagaaaacaatcttcatttgaaaacatccctaagcttgaataaatggataccatagatagcttctcttttttattctggtgtcattaccagcatctgaatttcaagttcttaaaatttcaaaaattaaaatttttcattattagctatccatttatcttttacatgaacttgtcatgaacaaattcaaatgtttatgccagcaaatttttgtactgttgcatagttaaaaatgctgggagtctctgcatagatacaaaatattattaaattattacataaatttaattttataaaatttaatcatgcttcttttgtctgggtaatagacattggacagatatttttagttcagatggtgattctgaagcttacatctcccttaaaaaaatctaaagcagctcttatgggcttctaattttaatataaataaataatttaaattttattggtgttattggaagaaaaatgctattaatgggctaataaaaaacatgtgtttctcttatggattttaataagctccagtattattcaaatgatcaaaaatatagttataattttttgaattttaaaaatgtgattgctctaataaagaataaaatctatgctttttaacaaacatagttttggtgcctaattctgtaatatgttttattgaaattagattcatttctctaatgtgagaaaaatatatccagtaatagtattgactgtttaaaaaattgagctcatcaaaaatattgtcatcaaatacaggtggttaatctgacatacattgcagttacatgcattatttttatttacaacatttgctccttaatgatgaatttatctgtgttaccctgtttttctacctggaactccatagaatgatgtttgcaaaccaacatgtgctcttttcagtcattcactgttttaatatgacatggtagagaagataaggtttatggcaggtaattttttgtaatgtgtattaaacgaagttcaaagattagaaatacatctgtgtcctgaaaaccttagatacatagccgactgtatacagaggttcatctcaacctcaacactattgacttttggggctggatagttctctgttgtgggggtttgtcttgtgcactgtaggtttttagtagcatccacactttctcctcaccagatgccagttgcaccctcccccaagttgagacaaccaaaaatgtctccagatattgccagctaccccttgagggatggtacctctggttgagaaccattgctagagaatgatctttactgaatttgccctttataagaaacccagtgaatttctagagcaagtcccaaaaactaagggacagctaagaagttattatggttgacttcaaaggcctaaactgtgttttttatgtccactaaacaacttgattaaaagacggaattttgactcgtgtctgtatcatacaagtacaaatactaattttgccctatgtatccgtaaatgtcatttgtgattttgacttatttatttaatgccctttcttatgccgtgggttttcaagtttactcatttctatggttgcaaataactctaaaacttattatataaactttcatattataggcagaacacaatggctaaatatctgttgcatgtactttaaagtttattataaaatataaacagatatataaagatgttgactcttacctgtgattttgcatggtcagactcggtgtcaggtacggagaggattctcatgactgtcttacctctactgaatattctagtgagttatatgatttacggagtgattaacagaggtctatataaagttacttttcccctttacttaattatattgtagtgtgcagataacaaaactgctaccttctcatccaagtggtctgtagaattcatgtcccttacagtggtcatttaaagtcaatatttatttatgtatgtaataaaaaaagttggatttttgtgtatgtctgtcacattatttagagagaagtaatcttgtaaaaatgttttgtaaaaaacaaaaaagtattgtaaatagtcttgatattctgtgactcattattttcatgttagagtttgtacatactggttcaataataaagtatccttaaaccaga

SEQ ID NO: 4595 - DNA, 2043 bp, Artificial Sequence
  derived and/or modified sequence
atggtgcctggggtgcctggagctgtgctgaccctgtgcctgtggctggccgccagcagcggctgcctggccgccggccctggagctgctgctgcccggcggctggatgagagcctgtctgctggctctgtgcagagggcccgctgtgccagccgctgcctgagcctgcagatcacccgcatcagcgccttcttccagcacttccagaacaacggcagcctggtgtggtgccagaaccacaagcagtgcagcaagtgcctggagccctgcaaggagagcggggacctgaggaagcaccagtgccagagcttctgtgagcccctcttccccaagaagagctatgaatgtctgaccagctgtgagttcctgaagtacatcctgctggtgaagcagggcgactgcccagcccctgagaaggccagcggctttgctgctgcctgtgtggagagctgtgaggtggacaatgaatgttctggagtgaagaagtgctgcagcaatggctgcggccacacctgccaggtgcccaagaccctgtacaagggcgtgcccctgaagcccaggaaggagctgcgcttcacagagctgcagagcggccagctggaggtgaagtggagcagcaagttcaacatcagcattgagcccgtcatctacgtggtgcagaggcgctggaactacggcatccaccccagtgaagatgatgccacccactggcagacagtggcccagaccacagatgagcgggtgcagctgacagacatccggcccagccgctggtaccagttccgggtggccgctgtgaatgtgcacggcacccggggcttcaccgcccccagcaagcacttccgcagcagcaaggaccccagcgcccccccagccccagccaacctgcggctggccaacagcacagtgaacagtgatggctctgtgacagtgaccatcgtgtgggacctgcctgaggagccagacatccctgtgcaccactacaaggtgttctggagctggatggtgagcagcaagagcctggtgcccaccaagaagaagaggaggaagaccacagatggcttccagaacagcgtcatcctggagaagctgcagcctgactgtgactatgtggtggagctgcaggccatcacctactggggccagacccggctgaagagcgccaaggtgtccctgcacttcaccagcacccacgccaccaacaacaaggagcagctggtgaagaccaggaaaggaggcatccagacccagctgcccttccagaggagaagacccacccggcccctggaggtgggcgcccccttctaccaggacggccagctgcaggtgaaggtgtactggaagaagacagaggaccccaccgtgaaccgctaccacgtgcgctggttccctgaggcctgtgcccacaacagaaccactggaagtgaggccagcagcggcatgacccatgagaactacatcatcctgcaggacctgtccttcagctgcaagtacaaggtgacagtgcagcccatccggcccaagagccacagcaaggccgaggccgtgttcttcaccaccccaccctgcagcgccctgaagggcaagagccacaagcctgtgggctgcctgggggaggccggccacgtgctgagcaaggtgctggccaagccagagaacctgagcgccagcttcatcgtgcaggatgtgaacatcaccggccacttctcctggaagatggccaaggccaacctgtaccagcccatgacaggcttccaggtgacctgggccgaggtgaccacagagagccggcagaacagcctgcccaacagcatcatcagccagagccagatcctgcccagcgaccactacgtgctgactgtgcccaacctgcggcccagcaccctgtaccgcctggaggtgcaggtgctgaccccaggaggagagggccctgccaccatcaagaccttccgcaccccagagctgccccccagcagcgcccacaggagccacctgaagcaccgccacccccaccactacaagcccagccctgagcgctactag

SEQ ID NO: 4596 - DNA, 2043 bp, Artificial Sequence
  derived and/or modified sequence
atggtgcccggcgtgcccggcgccgtgctgaccctgtgcctgtggcttgccgcaagcagtggctgcctggcggcaggacctggcgccgccgctgcgcgcagactggacgagagcctgtctgctggttcagttcaaagagctcggtgtgccagccgttgtttatctttacagattacacgtatatctgcattcttccagcacttccaaaataatggtagcctggtgtggtgtcaaaatcacaaacagtgctccaagtgcctggagccatgcaaggagtccggcgatcttcgtaaacatcaatgccagtccttttgtgaacctctgtttcccaagaaaagttacgagtgtcttacctcatgcgaattccttaagtatattttactggtgaaacaaggcgactgtcccgcacccgagaaagcatctggctttgccgctgcttgtgtcgaatcatgtgaggtcgataatgaatgttcgggcgtgaagaagtgttgtagtaacggctgtggacacacgtgtcaggtgcccaagactctatacaagggcgtgcccttgaaaccccggaaggaactccggtttaccgaactacagtccggtcaattggaggtcaagtggagctcgaagtttaacatttctatcgaacctgtgatttacgtagtccagagacgctggaactacggaattcaccccagcgaggatgatgcaactcactggcagacggttgcgcaaacgactgatgagcgcgttcagctgactgacatccgcccctctcggtggtaccagtttagggtggccgctgtgaatgtccacgggacccggggcttcactgccccatctaagcattttcgttcaagcaaagatcccagcgccccacctgcacccgcaaatctgcggctggcaaattccacggtgaattcagatggttctgtaactgtcaccatagtctgggatctcccggaggagccagacatccctgtgcaccattataaggtgttttggagctggatggtctcttcaaaatcactagtgcctacgaaaaaaaagcggcggaagactactgatggatttcagaactccgtgattctcgaaaaacttcagcccgactgcgactatgtcgtcgaacttcaggctattacgtattggggccagaccagactcaagtccgctaaggtctcactgcactttacgtcgacccacgccaccaataataaagagcagcttgttaagacgagaaagggagggatccagactcaactgccttttcagagaagaaggcctaccagacccctcgaggtaggagctcccttttaccaggatggccaacttcaagtgaaggtctactggaaaaagactgaagatccaaccgtgaatcgatatcatgttagatggtttcccgaagcctgcgcccacaaccgaactacaggtagtgaggcttcctccgggatgacccacgaaaattacattattttacaggacttatccttttcatgtaaatataaagttaccgtgcagcctatccggcctaagagccattccaaggcggaagctgtgttctttacaacccctccatgcagtgcccttaagggcaagtcccacaagcccgtggggtgtctgggagaagctggtcatgtcctttctaaagtgctagctaagcccgaaaacctctccgcaagtttcatcgtgcaagatgtgaacatcacaggtcacttctcctggaagatggcgaaggccaacttgtaccagccaatgacagggtttcaagtcacatgggctgaagtaaccacagaatctcgtcagaatagcctgccaaactccattataagccagagccaaatcctgccgagtgatcattacgtcctaaccgtgccaaatctgagaccgtcgaccctatatcggctggaggtgcaggtcttgacaccaggcggggaggggcctgccaccatcaagacattcaggaccccagagctgccacctagttccgcccaccggagccacctgaaacacaggcatccccatcactataagcccagtcctgagcgctattag

SEQ ID NO: 4597 - DNA, 2043 bp, Artificial Sequence
  derived and/or modified sequence
atggtgcccggagtgccgggagccgtcctgactctgtgcctttggctcgcagccagctcgggctgtctggccgcaggtcccggagccgcagcagctaggcgactggatgaaagcctgtccgcagggtctgtccagagggctcgctgcgcctccaggtgcctctcactgcaaatcacccggatatctgctttcttccaacactttcaaaataacgggtccctggtttggtgtcagaaccataaacagtgctcaaaatgtctagagccctgtaaagaatcaggagatcttcgaaaacaccaatgccagtcattttgcgagcctctcttcccaaaaaagtcttacgagtgtttgacaagttgtgaattcctgaaatatattctgcttgtgaagcagggggactgcccagcgccagagaaagcaagcgggtttgctgctgcttgtgtagaatcctgtgaggtggacaatgagtgtagcggagtgaaaaagtgctgcagtaacggctgcggccatacatgccaagtcccaaaaacactctataagggcgtgccattgaagcctaggaaggaactgcgcttcaccgaactgcaaagcgggcagctggaggtcaagtggtcaagtaagtttaatatttcaatcgagcccgttatatatgtagttcagcggaggtggaactatggcatccatccatctgaggatgatgccacacattggcaaacggtcgctcaaacgactgatgaacgcgtccagctgaccgacatccggccaagtcggtggtatcaattccgagttgcagcagtgaatgtacacgggacgcgcggttttactgcaccaagcaagcactttcgatcttcaaaagacccgtccgctccccctgcacctgcgaatctgcgcctggctaactcaaccgtgaatagcgacggcagcgtgacagtcactatcgtgtgggacctgcccgaagagcctgacatccctgtgcatcattataaagtgttttggagctggatggtaagctctaagtctttggtgcctaccaaaaagaagcggcgaaaaactacagatgggtttcaaaactcagtgatccttgagaagctgcagcctgactgcgattatgtcgtggaattgcaggctattacctactgggggcagacacgcctgaagagtgccaaagtttccttacacttcacaagtacccacgctaccaataataaagagcagctcgttaagacccgtaaggggggtatccagacccagctgccttttcaaaggaggcgaccaactaggcccctggaggttggagctcccttttaccaggacggacagctccaggtcaaggtctattggaagaagacggaggatcccacagtaaatcgttaccacgtgcggtggttccctgaagcctgcgcccacaaccggacaacaggatcagaagctagctctggaatgacacacgagaactatataattctacaggatctgtcattctcttgtaaatacaaggtgactgttcagccaatcagacctaaatctcactctaaagccgaggccgtgtttttcaccaccccaccctgttccgcactgaaaggcaaatcccacaagccagttggctgtctgggggaggcaggtcacgtgctctccaaggtgttggcgaagcctgagaatctgtccgcctcattcatcgttcaggatgttaatattactgggcactttagctggaaaatggccaaggccaatctttatcagcctatgacgggatttcaagtcacctgggccgaggttactacagaatctaggcagaactccctccccaacagtatcattagccaatcacaaatcctgccttccgaccactatgtgttaacagtgcccaacctgagacccagtacgctgtacaggttggaagtacaggtccttacccctggcggtgaaggcccagccactatcaaaactttccgcactcctgaattgcccccatcatcagcacaccgaagccacctgaaacaccgacaccctcatcactataagccgtcccccgaacgatactag

SEQ ID NO: 4598 - DNA, 2043 bp, Artificial Sequence
  derived and/or modified sequence
atggtgcccggcgtgcccggcgccgtgctgaccctgtgcctgtggctggccgccagcagcggctgcctggccgccggccccggcgccgccgccgccagaagactggacgagagcctgagcgccggcagcgtgcagagagccagatgcgccagcagatgcctgagcctgcagatcaccagaatcagcgccttcttccagcacttccagaacaacggcagcctggtgtggtgccagaaccacaagcagtgcagcaagtgcctggagccctgcaaggagagcggcgacctgagaaagcaccagtgccagagcttctgcgagcccctgttccccaagaagagctacgagtgcctgaccagctgcgagttcctgaagtacatcctgctggtgaagcagggcgactgccccgcccccgagaaggccagcggcttcgccgccgcctgcgtggagagctgcgaggtggacaacgagtgcagcggcgtgaagaagtgctgcagcaacggctgcggccacacctgccaggtgcccaagaccctgtacaagggcgtgcccctgaagcccagaaaggagctgagattcaccgagctgcagagcggccagctggaggtgaagtggagcagcaagttcaacatcagcatcgagcccgtgatctacgtggtgcagagaagatggaactacggcatccaccccagcgaggacgacgccacccactggcagaccgtggcccagaccaccgacgagagagtgcagctgaccgacatcagacccagcagatggtaccagttcagagtggccgccgtgaacgtgcacggcaccagaggcttcaccgcccccagcaagcacttcagaagcagcaaggaccccagcgccccccccgcccccgccaacctgagactggccaacagcaccgtgaacagcgacggcagcgtgaccgtgaccatcgtgtgggacctgcccgaggagcccgacatccccgtgcaccactacaaggtgttctggagctggatggtgagcagcaagagcctggtgcccaccaagaagaagagaagaaagaccaccgacggcttccagaacagcgtgatcctggagaagctgcagcccgactgcgactacgtggtggagctgcaggccatcacctactggggccagaccagactgaagagcgccaaggtgagcctgcacttcaccagcacccacgccaccaacaacaaggagcagctggtgaagaccagaaagggcggcatccagacccagctgcccttccagagaagaagacccaccagacccctggaggtgggcgcccccttctaccaggacggccagctgcaggtgaaggtgtactggaagaagaccgaggaccccaccgtgaacagataccacgtgagatggttccccgaggcctgcgcccacaacagaaccaccggcagcgaggccagcagcggcatgacccacgagaactacatcatcctgcaggacctgagcttcagctgcaagtacaaggtgaccgtgcagcccatcagacccaagagccacagcaaggccgaggccgtgttcttcaccacccccccctgcagcgccctgaagggcaagagccacaagcccgtgggctgcctgggcgaggccggccacgtgctgagcaaggtgctggccaagcccgagaacctgagcgccagcttcatcgtgcaggacgtgaacatcaccggccacttcagctggaagatggccaaggccaacctgtaccagcccatgaccggcttccaggtgacctgggccgaggtgaccaccgagagcagacagaacagcctgcccaacagcatcatcagccagagccagatcctgcccagcgaccactacgtgctgaccgtgcccaacctgagacccagcaccctgtacagactggaggtgcaggtgctgacccccggcggcgagggccccgccaccatcaagaccttcagaacccccgagctgccccccagcagcgcccacagaagccacctgaagcacagacacccccaccactacaagcccagccccgagagatactag

SEQ ID NO: 4599 - protein, 495 aa, Artificial Sequence
  derived and/or modified sequence
MTVMSGENVDEASAAPGHPQDGSYPRQADHDDHECCERVVINISGLRFETQLKTLAQFPNTLLGNPKKRMRYFDPLRNEYFFDRNRPSFDAILYYYQSGGRLRRPVNVPLDMFSEEIKFYELGEEAMEKFREDEGFIKEEERPLPEKEYQRQVWLLFEYPESSGPARVIAIVSVMVILISIVIFCLETLPELKDDKDFTGTVHRIDNTTVIYNSNIFTDPFFIVETLCIIWFSFELVVRFFACPSKTDFFKNIMNFIDIVAIIPYFITLGTEIAEQEGNQKGEQATSLAILRVIRLVRVFRIFKLSRHSKGLQILGQTLKASMRELGLLIFFLFIGVILFSSAVYFAEAEEAESHFSSIPDAFWWAVVSMTTVGYGDMYPVTIGGKIVGSLCAIAGVLTIALPVPVIVSNFNYFYHRETEGEEQAQLLHVSSPNLASDSDLSRRSSSTMSKSEYMEIEEDMNNSIAHYRQVNIRTANCTTANQNCVNKSKLLTDV

SEQ ID NO: 4600 - DNA, 1488 bp, Artificial Sequence
  derived and/or modified sequence
atgaccgtgatgagcggggagaatgtcgacgaagctagcgcagctcccgggcatccccaggatgggtcatacccccgccaggctgaccatgacgatcatgaatgctgcgagagagtggttataaatatatctggactgaggttcgaaacccagctgaagactcttgcgcagtttcccaataccctgttgggcaatccgaagaaaagaatgcgctactttgacccactcaggaacgagtacttcttcgaccgcaaccgaccaagtttcgatgctatcctatactactaccaaagtgggggccggctgcggcgtcctgtaaacgtcccactcgacatgtttagtgaagaaatcaagttttacgagcttggcgaggaggctatggaaaaattcagggaagacgagggcttcatcaaagaagaggagcggcctctccccgaaaaagaatatcagcgacaagtatggctccttttcgagtaccccgaaagctccggcccagcccgtgtcatcgcaattgtctcagtgatggtaatcctcatcagcattgtgattttttgtttggagactctgccagagctgaaagatgacaaggactttacaggaaccgtccatcggatcgacaatacaactgtaatctataattccaatatcttcacggatccatttttcatcgtggagacgctgtgcataatttggttctctttcgaattagtcgttcggtttttcgcctgtccatctaagacagacttttttaagaatattatgaactttatagatatcgtggccataatcccctattttatcacgcttgggaccgagattgctgagcaggagggcaaccaaaaaggcgaacaagcaaccagcctcgccattctcagggtaatacgactcgtgcgggtgttcaggatcttcaaactgtcccgccacagtaaagggctgcaaattcttggacaaactttgaaggcgagtatgcgcgaattgggactgttaattttttttctgttcattggcgtgatccttttctccagcgcagtgtatttcgccgaggccgaggaggccgaaagtcacttctcaagtatccccgatgcgttttggtgggctgtggtgtccatgactacagtgggctacggcgacatgtacccggtgactatcggaggtaagattgtggggagtctgtgtgccatcgctggagtgttgactatagccttgccagtccccgtgatcgtgagcaactttaattatttttaccacagagagaccgagggcgaggaacaggcgcagctgctccatgtgtcctccccgaacttggcttccgattctgacctgtctcggagatcctcgagtaccatgagcaaatctgagtatatggagatagaggaagacatgaacaactcaattgctcattatcgacaggtgaatattcgcacagccaattgtactaccgcaaatcaaaattgcgtgaataaaagtaagctgctgacagacgtgtag

SEQ ID NO: 4601 - DNA, 1488 bp, Artificial Sequence
  derived and/or modified sequence
atgacagtgatgtctggagaaaatgtggatgaggccagcgctgcccctggccacccccaggacggcagctacccccggcaggccgaccatgatgaccacgagtgctgtgagcgggtggtgatcaacatcagcggcctgcgctttgagacccagctgaagaccctggcccagttccccaacaccctgctgggcaaccccaagaagaggatgagatactttgaccccctgagaaatgagtacttctttgacaggaaccggcccagctttgatgccatcctgtactactaccagagcggcggccgcctgcggcggcctgtgaatgtgcccctggacatgttcagcgaggagatcaagttctatgagctgggggaggaggccatggagaagttccgggaggatgagggcttcatcaaggaggaggagcggcccctgcctgagaaggagtaccagaggcaggtgtggctgctgtttgagtacccagagagcagcggccctgcccgggtgattgccatcgtgtctgtgatggtgatcctgatcagcatcgtcatcttctgcctggagaccctgcctgagctgaaggatgacaaggacttcaccggcaccgtgcacagaattgacaacaccaccgtcatctacaacagcaacatcttcacagaccccttcttcatcgtggagaccctgtgcatcatctggttctcctttgagctggtggtgcgcttctttgcctgccccagcaagacagacttcttcaagaacatcatgaacttcattgatattgtggccatcatcccctacttcatcaccctgggcacagaaattgctgagcaggagggcaaccagaagggggagcaggccaccagcctggccatcctgcgggtcatccggctggtgcgggtcttccgcatcttcaagctgagccgccacagcaagggcctgcagatcctgggccagaccctgaaggcctccatgagggagctgggcctgctgatcttcttcctgttcatcggggtcatcctcttcagcagcgctgtgtactttgctgaggccgaggaggccgagagccacttcagcagcatcccagatgccttctggtgggccgtggtgtccatgaccaccgtgggctatggagacatgtaccctgtgaccatcggcggcaagatcgtgggcagcctgtgtgccatcgccggcgtgctgaccatcgccctgcctgtgcctgtgattgtgagcaacttcaactacttctaccaccgggagacagaaggagaggagcaggcccagctgctgcacgtgagcagccccaacctggccagtgacagcgacctgagcagaagaagcagcagcaccatgagcaagtctgagtacatggagattgaggaggacatgaacaacagcatcgcccactaccggcaggtgaacatcagaacagccaactgcaccacagccaaccagaactgtgtgaacaagagcaagctgctgacagatgtgtag

SEQ ID NO: 4602 - DNA, 1488 bp, Artificial Sequence
  derived and/or modified sequence
atgaccgtgatgagcggcgagaacgtggacgaggccagcgccgccccagggcacccgcaggacggatcatatcctaggcaggccgatcatgatgaccacgagtgctgcgagcgggtcgtcattaacatctcagggctaagatttgaaacacagctaaagactctcgcccagtttcctaacactcttttaggaaacccaaagaagagaatgaggtattttgatcctttacggaacgaatactttttcgacagaaaccgcccaagcttcgacgccatactatactactaccaatctggcggccgcctcaggcggcccgtcaacgtcccactggacatgttctcagaagaaatcaagttttatgagctgggggaggaggctatggagaagttccgagaggatgaaggcttcatcaaagaagaggaaagacccctgcccgagaaggaataccagcgccaagtgtggctgctgtttgagtatccggaatcaagtggacctgcccgtgtgattgccatcgttagtgtgatggtgattctaataagcatcgttattttctgtctagaaaccctgccagaactgaaggacgataaggactttacagggaccgtacaccgaattgataacacaaccgtcatctataattctaatatctttactgacccattctttattgttgagacactgtgtattatctggttctccttcgagcttgtggttcggtttttcgcgtgcccatcgaaaacagatttcttcaagaacataatgaactttattgatattgtcgccatcatcccttattttattaccctcggtactgaaattgctgaacaggagggcaaccagaaaggagagcaggctacgagtctcgcgatactccgggtaatcaggttggtgagagtattccgaatattcaagctttcaagacactcaaaagggctccagattctgggacagacactgaaagcgagtatgagggaactgggactcctgatcttttttctctttatcggggtcatcctctttagcagcgccgtttatttcgccgaagccgaggaagccgaatcgcacttcagtagcatccccgacgccttctggtgggctgtcgtgtctatgacgaccgtgggatacggcgacatgtaccccgtgactatcgggggaaagatagtcggctccctgtgcgcaatcgccggcgtgcttacaatcgctctgccagtcccagttattgtctctaattttaattacttttaccatcgggagaccgaaggagaagagcaagcccagctgctgcacgtgtcttcaccaaatctggcatccgactcagatttgagtaggcggtccagtagcaccatgtccaaaagcgagtacatggaaattgaggaggatatgaacaattccatcgcacactatagacaggtgaatatccgcacagccaactgtacgactgcaaaccagaactgtgttaacaagtccaagcttctgactgacgtctag

SEQ ID NO: 4603 - DNA, 1488 bp, Artificial Sequence
  derived and/or modified sequence
atgaccgtcatgtctggcgaaaatgtggatgaggcctccgctgccccaggacatccccaagacgggagttacccgagacaggcagaccacgacgaccacgagtgttgtgagcgcgtggtaattaatattagcggattacggtttgagactcaactgaagacactcgcacagtttccgaataccctgctgggcaatccaaagaagaggatgaggtactttgacccactcaggaacgagtattttttcgatcggaacagaccctctttcgacgccattttgtattattaccaaagcggagggaggttgagaagacctgtgaacgtacccctagatatgttctcagaggaaatcaaattctacgagctcggagaagaggccatggaaaagtttcgggaagacgaaggttttattaaggaagaagagcggccactgcccgagaaggagtaccagcgccaagtgtggctgctctttgagtatcctgagtcttcaggtcctgctcgagtcatcgccattgtgtcagtgatggttattcttatttccatcgtgattttctgcttggagacccttcccgagttaaaggacgataaagactttactggcacagtgcataggattgacaataccacagtcatctacaatagcaacatctttacagacccttttttcatcgttgaaacactgtgtattatatggtttagcttcgagttagtcgtgcggttcttcgcctgcccttccaagactgacttctttaagaatattatgaatttcatcgacatcgtcgccattataccctacttcatcacattaggtacagagatcgctgagcaggagggcaatcagaagggagaacaggccacatcccttgccatccttagagtcatcagactggtccgagtcttccgcatttttaaacttagtcgtcactccaagggacttcagatcctgggacagaccctcaaggcctctatgcgggagttgggtctccttattttctttttgttcattggcgttatcctgttttcaagtgctgtttattttgctgaggctgaggaggccgagtctcatttctcctcgattcccgacgcattttggtgggccgtggtgtccatgactaccgttggctatggtgatatgtatcccgttacaatcggcggaaagattgtggggtccctgtgtgctatcgctggcgtcctgacaatcgccctgcctgtgcctgtcatcgtgtctaactttaactacttttaccatcgggaaacagagggggaggagcaggcacagctcttacacgtgtccagccctaatctggcatctgacagcgacttgagcaggcgttcctcttcaacaatgtccaagtctgagtatatggagatcgaggaagatatgaataattctattgcccactatcgccaggtaaacattaggactgcgaactgtaccaccgccaaccagaattgcgtaaataagtctaagctgctgaccgatgtttag

SEQ ID NO: 4604 - DNA, 1488 bp, Artificial Sequence
  derived and/or modified sequence
atgaccgtgatgagcggcgagaacgtggacgaggccagcgccgcccccggccacccccaggacggcagctaccccagacaggccgaccacgacgaccacgagtgctgcgagagagtggtgatcaacatcagcggcctgagattcgagacccagctgaagaccctggcccagttccccaacaccctgctgggcaaccccaagaagagaatgagatacttcgaccccctgagaaacgagtacttcttcgacagaaacagacccagcttcgacgccatcctgtactactaccagagcggcggcagactgagaagacccgtgaacgtgcccctggacatgttcagcgaggagatcaagttctacgagctgggcgaggaggccatggagaagttcagagaggacgagggcttcatcaaggaggaggagagacccctgcccgagaaggagtaccagagacaggtgtggctgctgttcgagtaccccgagagcagcggccccgccagagtgatcgccatcgtgagcgtgatggtgatcctgatcagcatcgtgatcttctgcctggagaccctgcccgagctgaaggacgacaaggacttcaccggcaccgtgcacagaatcgacaacaccaccgtgatctacaacagcaacatcttcaccgaccccttcttcatcgtggagaccctgtgcatcatctggttcagcttcgagctggtggtgagattcttcgcctgccccagcaagaccgacttcttcaagaacatcatgaacttcatcgacatcgtggccatcatcccctacttcatcaccctgggcaccgagatcgccgagcaggagggcaaccagaagggcgagcaggccaccagcctggccatcctgagagtgatcagactggtgagagtgttcagaatcttcaagctgagcagacacagcaagggcctgcagatcctgggccagaccctgaaggccagcatgagagagctgggcctgctgatcttcttcctgttcatcggcgtgatcctgttcagcagcgccgtgtacttcgccgaggccgaggaggccgagagccacttcagcagcatccccgacgccttctggtgggccgtggtgagcatgaccaccgtgggctacggcgacatgtaccccgtgaccatcggcggcaagatcgtgggcagcctgtgcgccatcgccggcgtgctgaccatcgccctgcccgtgcccgtgatcgtgagcaacttcaactacttctaccacagagagaccgagggcgaggagcaggcccagctgctgcacgtgagcagccccaacctggccagcgacagcgacctgagcagaagaagcagcagcaccatgagcaagagcgagtacatggagatcgaggaggacatgaacaacagcatcgcccactacagacaggtgaacatcagaaccgccaactgcaccaccgccaaccagaactgcgtgaacaagagcaagctgctgaccgacgtgtag

SEQ ID NO: 4605 - DNA, 1488 bp, Artificial Sequence
  derived and/or modified sequence
atgacagtgatgtcaggcgagaatgtagatgaggccagtgctgcccccgggcatccccaagacggctcataccctaggcaggccgatcatgacgaccacgagtgctgcgaaagagtggttattaatatctccggtctcagatttgagacgcagctcaagaccttggcacaattcccgaataccctgctaggaaaccctaaaaaaaggatgcggtatttcgacccgcttcggaatgaatattttttcgatcgtaacaggccaagctttgatgcaatcctttactattaccagagtgggggacgactgcggaggccagtgaacgtccctttggatatgttctccgaagaaataaaattctacgaactaggcgaggaggctatggagaagttcagagaagacgaggggttcataaaggaagaggagaggcctctgccggaaaaagagtaccagcgacaagtatggttgctgtttgagtacccggaatcttcaggacccgctcgagtgatcgccatcgtttcagtgatggtgattctgatctctattgtgatcttctgtctggagaccctgccggagcttaaggacgataaggatttcaccggcaccgtgcataggatagataacacgacggtgatctataactccaacatctttactgatcctttcttcatcgtggaaacattgtgtatcatctggtttagcttcgagcttgttgtgagatttttcgcgtgcccttccaaaaccgacttttttaagaacattatgaattttatcgacattgttgcaattataccctatttcatcactctgggtaccgagattgcggaacaggaaggaaatcagaaaggggagcaggctacctctctcgcaatcctgagggtgatcagactcgttagggtcttcagaattttcaagctgtctcggcacagcaagggcttgcagattctggggcagactctgaaggcttcaatgcgtgagctgggcttgctgattttctttctgtttatcggagtgatattgttctccagcgcagtgtatttcgcagaagccgaggaggctgagagccattttagcagcatacccgacgccttttggtgggcggtggtctcaatgacgacagtgggctacggtgatatgtaccccgtcacaatcgggggcaagattgtaggttccctatgcgccatagctggcgttctgactattgcactccctgtgcctgtgattgtgagcaactttaattacttttatcatagggagactgagggggaggaacaggcgcagctgttgcatgtaagctccccaaacctggcatctgatagtgacctgtctagacgctcatcttccaccatgagtaaaagcgaatatatggaaatagaggaagatatgaacaattctatagcccactacaggcaagtgaacatcagaacagcaaactgcaccacagccaaccagaactgtgtgaacaagtcaaagctgctgacagatgtgtag

SEQ ID NO: 4606 - DNA, 1488 bp, Artificial Sequence
  derived and/or modified sequence
atgaccgtgatgagcggcgagaacgtggacgaggccagcgccgcccccggacaccctcaagacggctcttacccacgtcaggcggaccacgatgaccacgagtgctgtgaacgggtagtgataaacatctccggcctacgatttgaaacgcagcttaagaccctcgcccaattccccaatacactgctggggaaccctaagaagagaatgcgctatttcgacccacttaggaacgaatatttctttgacaggaatcgaccctcttttgacgcaatcctctattactaccagtccggcggacgcctgaggagacccgttaatgtcccactcgatatgttttcggaagagattaagttctacgagcttggcgaggaggctatggagaaattccgggaagacgagggctttattaaggaagaggagcgtccactacccgagaaagaataccagagacaggtgtggctcctctttgagtaccccgagtcaagcgggcctgctcgggtgatagctatcgtcagcgtgatggtgatactgatcagcattgttatcttttgtctcgagacactgcccgagctcaaggatgataaagatttcaccggaactgtgcacagaatcgataacacaaccgtgatctacaattccaacattttcaccgaccccttcttcattgttgaaactctgtgcattatatggttcagctttgagctcgttgtacgctttttcgcctgtccgagtaagaccgacttttttaagaatatcatgaacttcattgatattgtggccatcatcccatattttatcacgcttgggacagagattgctgagcaggaaggcaaccagaaaggagagcaggccacctctctcgcaattcttcgtgtgatcagattggtccgcgtattcagaattttcaaactgtcccgacatagcaagggtctccagatcctcgggcaaacactaaaagcatcgatgagagaactaggacttctcatcttcttcctctttataggtgtcatactgtttagttctgccgtgtacttcgcagaggccgaagaggcggagtcacacttttcatccatccctgatgccttctggtgggccgtggtcagtatgaccacagtcgggtacggtgatatgtaccccgtgactattggcgggaaaattgtgggctccctgtgtgcgattgctggcgtgctcactatcgctttacccgtgccagtgatcgtctcaaacttcaattatttttatcacagagaaaccgaaggtgaggaacaggcccagctgcttcatgtatcctcacctaatctggcctcagactccgatctgagcaggcgatcatcttctacaatgagtaaaagtgaatacatggagatagaagaggatatgaacaatagtatcgctcattacagacaagtcaatatcaggacagccaattgcactacggctaaccagaattgcgttaacaaatccaagttactgaccgatgtgtag

SEQ ID NO: 4607 - DNA, 1488 bp, Artificial Sequence
  derived and/or modified sequence
atgacggtgatgtctggggagaacgtggacgaggcttcggccgccccgggccacccccaggatggcagctacccccggcaggccgaccacgacgaccacgagtgctgcgagcgcgtggtgatcaacatctccgggctgcgcttcgagacgcagctcaagaccctggcgcagttccccaacacgctgctgggcaaccctaagaaacgcatgcgctacttcgaccccctgaggaacgagtacttcttcgaccgcaaccggcccagcttcgacgccatcctctactactaccagtccggcggccgcctgcggaggccggtcaacgtgcccctggacatgttctccgaggagatcaagttttacgagttgggcgaggaggccatggagaagttccgggaggacgagggcttcatcaaggaggaggagcgccctctgcccgagaaggagtaccagcgccaggtgtggctgctcttcgagtaccccgagagctcggggcccgccagggtcatcgccatcgtctccgtcatggtcatcctcatctccatcgtcatcttttgcctggagacgctccccgagctgaaggatgacaaggacttcacgggcaccgtccaccgcatcgacaacaccacggtcatctacaattccaacatcttcacagaccccttcttcatcgtggaaacgctgtgtatcatctggttctccttcgagctggtggtgcgcttcttcgcctgccccagcaagacggacttcttcaaaaacatcatgaacttcatagacattgtggccatcattccttatttcatcacgctgggcaccgagatagctgagcaggaaggaaaccagaagggcgagcaggccacctccctggccatcctcagggtcatccgcttggtaagggtttttagaatcttcaagctctcccgccactctaagggcctccagatcctgggccagaccctcaaagctagtatgagagagctagggctgctcatctttttcctcttcatcggggtcatcctgttttctagtgcagtgtactttgccgaggcggaagaagctgagtcgcacttctccagtatccccgatgctttctggtgggcggtggtgtccatgaccactgtaggatacggtgacatgtaccctgtgacaattggaggcaagatcgtgggctccttgtgtgccatcgctggtgtgctaacaattgccctgcccgtacctgtcattgtgtccaatttcaactatttctaccaccgagaaactgagggggaagagcaggctcagttgctccacgtcagttcccctaacttagcctctgacagtgacctcagtcgccgcagttcctctactatgagcaagtctgagtacatggagatcgaagaggatatgaataatagcatagcccattatagacaggtcaatatcagaactgccaattgcaccactgctaaccaaaactgcgttaataagagcaagctactgaccgatgtttaa

SEQ ID NO: 4608 - DNA, 7983 bp, Artificial Sequence
  derived and/or modified sequence
aaatggaccgagcggacccgccgccgcacgcaccctgctccactccaagctcctaagggctcctggcgcgccgcgtagccttggcgaggtccgcgctggggtgcggagagcgaagggaactggagagccatgtagatccaggctctcgcccgcccgcctccttcgggatcgaatcaagggctcccatagtgttaggagggggcgagagtgctgtttatcgtcatttgcctcggagcttcgagagagggtggtattttgcttttccgccccgcatcctccggaactccctgcaccggagagaggacggcgtctccaggttgctggcaaccggtgagaatgggggtagggaaggaacattttcgccgtagctgctccgtaaagcgattgtccaactgagaggggcgtcggacgagtggaccagggcggcgagtttgcccggcgcgtctcggatgctgctgcggcggccgccgcggctcccgccagggcactgcaaagacgacctgccgcattcccactcgggctctccgctgactcagcaccgcccctgcgccaagccagccggccagcgtgcatcgatcgccctggtgggagcttagaaggcggcaggcgaagaggggtaggaggggggagagccgaggagaagcagagagggtggcaggcgtggggatctgccgagccggcactgcaccgggtcctaggaaggctctcggaggggaggggaggccagggcgacccccgaagcaatggcccagtccgctagaacggcactgcgttaaggcacctgggatcaggaagaaatatctaaacaacaacaacagaaaaccaacaaacccccaaacccaaacccaaccctctgcaaaaagctgcacccggcccgcaggcgagggggattccaaactgagtgaaaggcagggtggaggggaaggcagcgagaggcaaagtcgcagatctcccgacctgctcgtgttgaagcacctccccctgggcgtgagggagacgcgcgctccggtgggggggccgcttgggtcccccccacccctggtccctggctgcttcccaccccgggctctctcctggcctcccacccccgcgcccggcttccaccatgacggtgatgtctggggagaacgtggacgaggcttcggccgccccgggccacccccaggatggcagctacccccggcaggccgaccacgacgaccacgagtgctgcgagcgcgtggtgatcaacatctccgggctgcgcttcgagacgcagctcaagaccctggcgcagttccccaacacgctgctgggcaaccctaagaaacgcatgcgctacttcgaccccctgaggaacgagtacttcttcgaccgcaaccggcccagcttcgacgccatcctctactactaccagtccggcggccgcctgcggaggccggtcaacgtgcccctggacatgttctccgaggagatcaagttttacgagttgggcgaggaggccatggagaagttccgggaggacgagggcttcatcaaggaggaggagcgccctctgcccgagaaggagtaccagcgccaggtgtggctgctcttcgagtaccccgagagctcggggcccgccagggtcatcgccatcgtctccgtcatggtcatcctcatctccatcgtcatcttttgcctggagacgctccccgagctgaaggatgacaaggacttcacgggcaccgtccaccgcatcgacaacaccacggtcatctacaattccaacatcttcacagaccccttcttcatcgtggaaacgctgtgtatcatctggttctccttcgagctggtggtgcgcttcttcgcctgccccagcaagacggacttcttcaaaaacatcatgaacttcatagacattgtggccatcattccttatttcatcacgctgggcaccgagatagctgagcaggaaggaaaccagaagggcgagcaggccacctccctggccatcctcagggtcatccgcttggtaagggtttttagaatcttcaagctctcccgccactctaagggcctccagatcctgggccagaccctcaaagctagtatgagagagctagggctgctcatctttttcctcttcatcggggtcatcctgttttctagtgcagtgtactttgccgaggcggaagaagctgagtcgcacttctccagtatccccgatgctttctggtgggcggtggtgtccatgaccactgtaggatacggtgacatgtaccctgtgacaattggaggcaagatcgtgggctccttgtgtgccatcgctggtgtgctaacaattgccctgcccgtacctgtcattgtgtccaatttcaactatttctaccaccgagaaactgagggggaagagcaggctcagttgctccacgtcagttcccctaacttagcctctgacagtgacctcagtcgccgcagttcctctactatgagcaagtctgagtacatggagatcgaagaggatatgaataatagcatagcccattatagacaggtcaatatcagaactgccaattgcaccactgctaaccaaaactgcgttaataagagcaagctactgaccgatgtttaaaaaacaaaggcaagcaaacaaaaaagccccacttagcagctcaaaagacttaaaaaacaaaacagaaaacctagtgactcatgtcacgctttgtagatactttactaagtagacttggaatgctctatttaactgtcaatgcgttgttgcattgaggattttgggggtggtgaaccagaagctttcaagatccatgacaaaataaactattttccttttattaaaaaatgggaaaagagagagtattttctaaaactggcttaaaaagattcagtccacgaactagtctaggtaaaataataatcatatgcttccccaaactgaaacatttttaatgctttggtttctttaacttttttaaaaactcagaacaagatgatcacttagaaatatgaaattgaaattcgcatgggactccagtaaaacatctttgcaaactgcgtagcacattgaagacagtgcatcagatgtattatatgtaacatgatagaccagccaaaatggacaatgaatagatatttttatttcgatcaactgaactgcatattacaaggtgaaaaaagaaaactccgattacttaagactggttcacaaagcaccttataaattggatactggtcctgatctgtagggatttccccctgggcccattctctttctaatccagattattctctaagaaaaagttaactgaattaaattaattgattcttctgcagtgccgctaaatggtctcaactgcagatgagccaaatacaggtcttttctcaccaggcctgcactccgacccctggctttcagaactggatgtaaaaccttagcctccttattgcaagagagcacaaatgaagttaaatgtaagcatgtttgaatctgatacaatttattttataatcgcatgctgagaagttaacccagacaataggggataagcttaagttgaaatcgattcttctaaaaatagatcctttttcatttgcattcaccaaaagtgcactcctccatttattaactattttattagtaaataaagtactgtatttaagtgcatatgttagtcagatgggaacaataactttttggagctcaaagcatgttctcttattcagcattatggcctatttgactaagatgtaccttgaattaattaatgcatgatttcagtaataaaaattttaaaagtaataaaaattacaagtctgtggggtgaaaggcccaatagaaattatggggggtgggggtgggggcactcagtcaattttcctgcctttgctcagggaaataccaggtttttgtgcaggtataggcggagagaggaccaatatgcccatcccttaaagggaagccatgtgaaaaactcaataagtcatcaaagtacatatagcaacacctaagaacaagtattctttctagctgaagacaaacacaagcaacacaaacaagcaaacaaacaaacaaacaaaaaggtgcaatactgcatgttttttggtgcattcttaggatgtaaatgaaaatgtttctctattatatgcatccgaagcagagctgatttttttttctttgcagtcattctttgaagtctgtagagacttcagccctccccttgaggctccctgaagaaactaaaccaattgatttaatagttgcttagtgcctttatcctgtacccacagtgaactgtagaaagtgcctccttaacacagctgagaagttaggtagcaaaagtggggaagggttggggcacagaccttttgctttttctttttccattctcgctctctcatttcaccactgtgagaagaccacaccaccctaaaccctggagaggagagacccaggagggtgctgtctctctggccatctactagcattggtccctttgacagcctgacgctggatgtgaactgagacccatctttgaactggacatgaactgtgaacttgttttttcctctctccaccaaagccaagataaactttttgggaatttgtttcctatcgagggccactttggacacacaaggcttcctcaggtccagtgtagtgctcctggcacctttccttatttttttctctgtcggtaacagcactttgcaaatctctctgacggtccagtcttttcaggcattgttgtggatgtgggaacactcagttcataataacctttcctaggccttccctcctggtctacccctttcagatatttcctgatgcccctatgatcttcccacctggcagtcacttcacaggttgaacatctaacttctgctgcccccccgttacccagcccagagaatggtggggaccctgttcctggctgaaagagagccacggaacacaggcctctggagctcggcagctgcccaccggtggagaggtactcacagcctttcaaaggaccctgaggtggggaatcttcattctgcacttagcatgtggctgcctgttacctgacattctggcccagcttcttctgaaaatctgtcctgcttctcccacccctttcccccatcctgtcctagaactagcagtgaggcaatcaccctagaaactcgagttacacccattctggctaactcgattaaaagaaagaacatggatatcttattttcctatgtgacttttgtgaatctgtgagatgaacacaacacacatcgtggaagatgaggggccaagaactgcgcagcatccgactacagggcattaaaccctcccatgtgatgtctccttctcgtctgaaccttaactcattctggcgattcctttcctacttgcttaaaaatccccaattaggaaaaaaatgccaacctcctcccaggcttggggttatcttgatctttcatttcaacgttgaggtctagtgcacacagaacttgaaacaccgcactctgtcaacagcaataatccactcagtactgtgggatggatgggttaatggatgagaaaacggcaccaagactgactttgggtatttggtatatttaccgtggttacactctggactggttgattcttctgcatgtgatatagaaaaaagtgctgcatgcggtgaacctgtcagtctgggactgggggtgagttgttgttatgagtttggggtggtgtgaggaaagtgaatgctgcttagctcatctgtagctcattgcaatgaattcagtaagaatggagtacagggattatctgtgtagcataggcatgcaatgtttgaccaagctcttaccctcgcactgtaatgtgttgaaatgtctttgtagacctgaaggtgcacttaacaaaactgcctattaagggatgactattttttggtttacttattcatatttattttagcagcctttttaccttttcttccccttcctaggcatggagctgtaacagctcatgtcctgactatgtgttttctccagaaggagaagacttctgatgtgctgatagctataattcctctcttccagtctattggggccctagttcaatagggtggcaatagaagagttggtcacaccagggctgttagccatcccagaatctctgaagtggttaactcacctgaagtgatctgaatcagagagaccaaagacattcatttcctctgtcctcagatttctagaagacaaattctagccaggaaaactttctgtttttgcatctcccttttcccatttgtgcccaactccccttgcactccctggagacttgagttctgattttcagttatatcagctcattgggagtgtgttcgtgggtgagccttgcagaatcagataaaccaatagcaagtccttctccaggattctggccagtgggcagtcatttccctgaaatgaattgtagggcaggtttagattccactatggtggacgtgaagcacaggtggtgtcacaatcttgatttgcttgagaattaaaaaaatacatgtaaatggtaaatgaggaatacatttttttaaagtagaaatttggtttagcctataaaaggccttcttcacattgtgtatagttacacgtttttcaaattaggtaccatctaaaagtcaataaaaatagtttcctagccctctcatttaatataggagacctcaaaacacatgctttttaacaattttacattttaattcttagtttggtagattggattgaaagaaaggagaaagaacattagcagaaggcactttcccattttcttccaggaatgacttattcctggggtggtgagaattggtgggtggtaaccatccatagtataaaattgttagaaagaatataaactgccaaacaagcatgttatcttcaggcttttccaagcaagaatgaagtcttttgatgtttatgttcattttaagaagacaaacaaactaaaattttaagaccagacacaacccaagttgaattgtgatctcaggaggtgaactctcattcaccatgtggcatattactacctgtatttatatcatggaatttcagggtatatgtgaacatgtctagtatgactcaggtaaacctttaaagaatgtatgttacttaccatttttgtaaagaagcaaacaggagctgaattgttaaccaaaactgttccattaccttgggtcactgtgcaaactaattcagggtacagatataaagtttagaagccttgggattaaatgccagcctctttgctcaggcaaaatgaccctgggctttcttgggaagtccagcatgtatgtaaggggtgaggccctgctgacctcagggcttttcgctttaaggagattaaccctagtcacagtgattttcatttaggagctaactaggagtttactctttatgacgtgaaacttcaaagagtatagaaaacttttgtaccacaatcaaagaagaagaaatggtgtatggaaagaaaacaaaacaaaacaagaaatctcttgtaaaatattccaggtcaaagttgtctcctctccaaaccttgcagaagcacctttcttctcttcagcgcactgttttgggactgtttatgcagcagatgtaagtagacaacatggactccatgtgacatgcctctaatagtaaagataaagtattactgaggttaaaaataaaaattgagtagtattaatttaaagtgcaccatcaggacaacaaaccatttaagctgaaaaaacgctattttatttcttgagtttgccagttgcttccaccttgagttaaggacgtgtctcatcttcacctactgcgcattctcccttctctaactgtgtaatatgtcaggtcaaggacattgaatgttatgaattgagaacctaattgatgcgcatagttttcatctatgcaattttacttgcttctgtcactttacgatctgttcatatttggcatcaattaaagatactttttaaggatcttatcaaggaa

SEQ ID NO: 4609 - DNA, 1488 bp, Artificial Sequence
  derived and/or modified sequence
atgacagtaatgtcgggagaaaacgtggacgaagcctctgccgctccgggtcatccccaggacggaagttatcctagacaggcagaccatgatgaccatgagtgctgtgaaagagtcgttattaacatcagtggtctacgattcgaaacacagcttaagaccctggcacagttccccaataccctcctggggaacccgaagaaaaggatgagatatttcgatccacttaggaacgagtatttttttgaccgcaacaggccttcttttgatgccatcctctactattatcagagcggaggtcgcctcagacgtcccgtaaatgtgcctcttgacatgttctctgaagagatcaaattctacgagctcggagaggaagccatggagaagtttcgagaagatgaggggtttattaaagaagaggaacggccactcccagagaaggaatatcaacggcaagtctggctgctgttcgagtatcccgagtcaagcggacccgctagggtgatagccatagtgtccgtgatggtaatcctgattagcatcgtcattttttgcttagagaccctgcccgagctcaaggacgataaagacttcacgggcacagtccatcgcatcgacaacacaaccgtgatttataatagtaacatcttcaccgaccctttttttatcgtggaaaccctgtgtattatatggttctccttcgagttggtggttcggtttttcgcttgcccgtcaaaaactgacttttttaaaaatattatgaactttatcgacatcgttgcaataatcccttactttatcacgttgggaaccgaaatcgccgagcaggaaggaaaccagaagggcgagcaggcaacaagcctcgccattttacgcgtgattagacttgtgagagtattccgcatttttaagctgtcccgtcattccaagggccttcagattttgggacagacattgaaggcatcaatgcgggaattgggacttctcatcttttttcttttcataggcgtaattcttttctcctcagctgtgtacttcgccgaggcagaggaggccgaatcacatttctccagtatccctgatgcattctggtgggctgtggtttcaatgacgacggttggatacggtgacatgtatcccgtgactattgggggaaagatcgttggtagcctgtgcgcaatcgctggcgtcctgacgatcgccctgccagtgcctgtgatcgtgtcaaacttcaactacttctatcaccgcgagacagagggcgaggagcaagcacagcttttacatgtttccagcccaaatttagcaagcgatagtgacctgtcacgcagaagttcttcaacaatgtctaagagcgagtatatggagatagaggaagacatgaataatagcattgcccactacaggcaagtcaatatcagaaccgcgaattgcaccacagcgaatcagaactgtgtgaataagtccaaacttctgacagatgtgtag

SEQ ID NO: 4610 - protein, 676 aa, Artificial Sequence [sequence omitted]

SEQ ID NO: 4611 - DNA, 3262 bp, Artificial Sequence
  derived and/or modified sequence
gcggcggggctggcagcagtggctgcccgcactgcgcccgggcgctcgccttcgctgcagctcccggtgccgccgctcgggccggccccccggcaggccctcctcgttatggccgcggcctcctccccgcccagggccgagaggaagcgctggggttggggccgcctgccaggcgcccggcggggcagcgcgggcctggccaagaagtgccccttctcgctggagctggcggagggcggcccggcgggcggcgcgctctacgcgcccatcgcgcccggcgccccaggtcccgcgccccctgcgtccccggccgcgcccgccgcgcccccagttgcctccgaccttggcccgcggccgccggtgagcctagacccgcgcgtctccatctacagcacgcgccgcccggtgttggcgcgcacccacgtccagggccgcgtctacaacttcctcgagcgtcccaccggctggaaatgcttcgtttaccacttcgccgtcttcctcatcgtcctggtctgcctcatcttcagcgtgctgtccaccatcgagcagtatgccgccctggccacggggactctcttctggatggagatcgtgctggtggtgttcttcgggacggagtacgtggtccgcctctggtccgccggctgccgcagcaagtacgtgggcctctgggggcggctgcgctttgcccggaagcccatttccatcatcgacctcatcgtggtcgtggcctccatggtggtcctctgcgtgggctccaaggggcaggtgtttgccacgtcggccatcaggggcatccgcttcctgcagatcctgaggatgctacacgtcgaccgccagggaggcacctggaggctcctgggctccgtggtcttcatccaccgccaggagctgataaccaccctgtacatcggcttcctgggcctcatcttctcctcgtactttgtgtacctggctgagaaggacgcggtgaacgagtcaggccgcgtggagttcggcagctacgcagatgcgctgtggtggggggtggtcacagtcaccaccatcggctatggggacaaggtgccccagacgtgggtcgggaagaccatcgcctcctgcttctctgtctttgccatctccttctttgcgctcccagcggggattcttggctcggggtttgccctgaaggtgcagcagaagcagaggcagaagcacttcaaccggcagatcccggcggcagcctcactcattcagaccgcatggaggtgctatgctgccgagaaccccgactcctccacctggaagatctacatccggaaggccccccggagccacactctgctgtcacccagccccaaacccaagaagtctgtggtggtaaagaaaaaaaagttcaagctggacaaagacaatggggtgactcctggagagaagatgctcacagtcccccatatcacgtgcgaccccccagaagagcggcggctggaccacttctctgtcgacggctatgacagttctgtaaggaagagcccaacactgctggaagtgagcatgccccatttcatgagaaccaacagcttcgccgaggacctggacctggaaggggagactctgctgacacccatcacccacatctcacagctgcgggaacaccatcgggccaccattaaggtcattcgacgcatgcagtactttgtggccaagaagaaattccagcaagcgcggaagccttacgatgtgcgggacgtcattgagcagtactcgcagggccacctcaacctcatggtgcgcatcaaggagctgcagaggaggctggaccagtccattgggaagccctcactgttcatctccgtctcagaaaagagcaaggatcgcggcagcaacacgatcggcgcccgcctgaaccgagtagaagacaaggtgacgcagctggaccagaggctggcactcatcaccgacatgcttcaccagctgctctccttgcacggtggcagcacccccggcagcggcggcccccccagagagggcggggcccacatcacccagccctgcggcagtggcggctccgtcgaccctgagctcttcctgcccagcaacaccctgcccacctacgagcagctgaccgtgcccaggaggggccccgatgaggggtcctgaggaggggatggggctgggggatgggcctgagtgagaggggaggccaagagtggccccacctggccctctctgaaggaggccacctcctaaaaggcccagagagaagagccccactctcagaggccccaataccccatggaccatgctgtctggcacagcctgcacttgggggctcagcaaggccacctcttcctggccggtgtgggggccccgtctcaggtctgagttgttaccccaagcgccctggcccccacatggtgatgttgacatcactggcatggtggttgggacccagtggcagggcacagggcctggcccatgtatggccaggaagtagcacaggctgagtgcaggcccaccctgcttggcccagggggcttcctgaggggagacagagcaacccctggaccccagcctcaaatccaggaccctgccaggcacaggcagggcaggaccagcccacgctgactacagggccgccggcaataaaagcccaggagcccatttggagggcctgggcctggctccctcactctcaggaaatgctgacccatgggcaggagactgtggagactgctcctgagcccccagcttccagcaggagggacagtctcaccatttccccagggcacgtggttgagtggggggaacgcccacttccctgggttagactgccagctcttcctagctggagaggagccctgcctctccgcccctgagcccactgtgcgtggggctcccgcctccaacccctcgcccagtcccagcagccagccaaacacacagaaggggactgccacctccccttgccagctgctgagccgcagagaagtgacggttcctacacaggacaggggttccttctgggcattacatcgcatagaaatcaataatttgtggtgatttggatctgtgttttaatgagtttcacagtgtgattttgattattaattgtgcaagcttttcctaataaacgtggagaatcacaggctgggctgggcactgctctcaccttggttcctggggcatccatggggtctctcacagacaggacccctgcagttcccctggaagcagtgcccaggtggctgtggaataggaacgctaaaaaaaaaaaaaaaaa

SEQ ID NO: 4612 - DNA, 2031 bp, Artificial Sequence
  derived and/or modified sequence
atggctgctgcttcatcaccaccccgggctgaaagaaagcgctgggggtggggacgcctcccgggggcaaggaggggctcagcaggcctggccaagaagtgcccctttagtctggagttagctgaaggggggcccgctggtggcgcactgtacgcacctatagcaccaggtgccccaggccccgccccccctgcgagtccagccgccccagccgcacccccagtcgccagcgacttgggtccccggccaccagtctcccttgatccccgggtctccatctatagtactaggagacccgttctcgctaggacacatgtacaaggacgtgtgtacaactttctggagaggcccacaggctggaaatgctttgtataccatttcgcagtcttcctaatagttctcgtctgcctcattttttccgtactcagcactattgagcagtacgctgctcttgccaccggcaccctgttttggatggagatcgtgctcgtggtcttctttggaaccgaatatgttgtcaggttatggtctgctgggtgtagatccaaatacgtcgggttatggggaaggttgcgctttgcacgcaaacccatcagcatcattgacttgatcgtggtggtagctagcatggtagtcctgtgcgtcgggagcaaggggcaggtgttcgcgacatccgccatacgggggattcgattcttgcagatactgcggatgctacatgtggatcggcagggcggcacctggagacttctggggtcagtggtattcattcacaggcaggaattgattacgacactctacattgggtttttaggcctgattttttccagttactttgtgtaccttgccgagaaggacgccgtgaacgagagcgggagagtggagtttggatcttacgccgatgccctctggtggggcgtggtgaccgtcaccaccattggttatggggacaaggtgccgcaaacatgggtgggaaaaactatcgcttcttgcttctccgtttttgccatttctttcttcgcactgcctgctggtattctggggtcaggtttcgccctgaaggtgcagcagaagcagcggcagaagcacttcaaccggcaaatacccgctgccgcctccctgatccagaccgcatggcggtgttatgccgcggagaatcccgactctagcacatggaaaatctacataagaaaagctcctcggtcccacacactcctgagcccttcacccaagcctaaaaaaagtgttgtggtgaagaaaaaaaaatttaaactcgacaaagacaacggggtaacgccaggggagaaaatgttgaccgtaccccacattacctgtgatcccccagaggaaaggcgcctggaccatttctcagtggacggctacgactcctcagtcagaaagagtcctacgctgctggaagtgtccatgccgcacttcatgcgaaccaatagctttgccgaggatctggatttggaaggcgaaactctcttgacccccattacgcacatctctcagctgcgtgagcatcatcgagcgaccattaaagttatccgccgcatgcagtacttcgtggccaaaaaaaagttccagcaagcacggaagccttacgacgtccgggatgtcatagaacaatatagtcagggacacctgaatcttatggtgagaataaaggagctacaacggaggttggatcagtccatcggaaagccctctttatttatttccgtctctgaaaaatcaaaggatcgaggtagcaatactataggtgcgagactcaatcgggtggaggataaagtgactcagctggatcagcgtctcgctctgataacagatatgctccatcagttgctcagcctgcacggaggatccacccccggatcgggaggtccacctagggagggcggagcacacatcacacagccctgtggatctgggggctctgtggacccagagctcttcctgccttccaacacactgcctacctatgagcagctcacagttccccgccgtggtccagatgagggcagctag

SEQ ID NO: 4613 - DNA, 2031 bp, Artificial Sequence
  derived and/or modified sequence
atggctgctgccagcagcccccccagggctgagaggaagcgctggggctggggccgcctgcccggggcccggcggggcagcgctggcctggccaagaagtgccccttcagcctggagctggccgagggcggccctgctgggggcgccctgtatgcccccatcgcccctggggcccctggccctgcccccccagccagccctgctgccccagctgcccctcctgtggccagtgacctgggccccaggcctcctgtgtccctggacccccgggtgtccatctacagcaccaggaggcctgtgctggcccggacccacgtgcagggccgggtgtacaacttcctggagcggcccaccggctggaagtgctttgtgtaccactttgctgtgttcctgattgtgctggtgtgcctgatcttctctgtgctgagcaccatcgagcagtatgctgccctggccaccggcaccctcttctggatggagatcgtgctggtggtgttctttggaacagaatatgtggtgcggctgtggagcgctggctgccgcagcaaatatgtgggcctgtggggccgcctgcgctttgccaggaagcccatcagcatcatcgacctgattgtggtggtggcctccatggtggtgctgtgtgtgggcagcaagggccaggtgtttgccaccagcgccatccggggcatccgcttcctgcagatcctgaggatgctgcacgtggaccggcagggcggcacctggaggctgctgggctctgtggtgttcatccaccggcaggagctgatcaccaccctgtacatcggcttcctgggcctcatcttcagcagctactttgtgtacctggccgagaaggatgctgtgaatgaaagtggccgggtggagtttggcagctatgcagatgccctgtggtggggcgtggtgacagtgaccaccatcggctatggagacaaggtgccccagacctgggtgggcaagaccatcgccagctgcttctctgtgtttgccatctccttctttgccctgcctgctggcatcctgggcagcggctttgccctgaaggtgcagcagaagcagaggcagaagcacttcaaccggcagatcccagctgctgccagcctcatccagacagcctggcgctgctatgctgctgaaaatccagacagcagcacctggaagatctacatcaggaaggcccccaggagccacaccctgctgagccccagccccaagcccaagaagtctgtggtggtgaagaagaagaagttcaagctggacaaggacaatggagtgaccccaggagagaagatgctgactgtgccccacatcacctgtgaccccccagaggagcggcggctggaccacttctctgtggatggctatgacagctctgtgaggaagagccccaccctgctggaggtgtccatgccccacttcatgaggaccaacagctttgctgaggacctggacctggagggggagaccctgctgacccccatcacccacatcagccagctgcgggagcaccaccgggccaccatcaaggtgatccggaggatgcagtactttgtggccaagaagaagttccagcaggccaggaagccctatgatgtgagagatgtgattgagcagtacagccagggccacctgaacctgatggtgcgcatcaaggagctgcagaggcggctggaccagagcatcggcaagcccagcctcttcatctctgtgtctgagaagagcaaggaccggggcagcaacaccatcggggcccggctgaacagagtggaggacaaggtgacccagctggaccagaggctggccctgatcacagacatgctgcaccagctgctgagcctgcacggcggcagcaccccaggcagcggcggccccccccgggagggcggggcccacatcacccagccctgtggcagcggcggctctgtggaccctgagctgttcctgcccagcaacaccctgcccacctatgagcagctgactgtgccccggcggggcccagatgagggcagctag

SEQ ID NO: 4614 - DNA, 2031 bp, Artificial Sequence
  derived and/or modified sequence
atggccgccgccagcagccccccccgggccgagcggaagcggtggggttggggtaggcttcccggtgcacgcaggggaagcgcagggttggcaaagaaatgccctttttcgttagaacttgctgagggtggacccgcagggggggcactatatgcgcccattgcccccggcgccccaggacctgctccccctgccagcccggctgcccctgctgcccccccagtagccagcgaccttggcccacgccctcccgtttcacttgatcctcgcgtgagcatttattctacaaggagacctgtgctggcaagaacacacgtccagggtcgcgtgtacaactttcttgagcgccccaccggatggaagtgtttcgtgtaccattttgccgtatttctcatagtgcttgtgtgcctgatctttagtgtgctctctaccattgaacagtatgctgctcttgccacgggcacgctgttctggatggagattgtgcttgttgtgttttttggaacagaatacgtggtccgcttatggtccgcaggctgtcggagtaagtatgtggggctctgggggagactacgctttgccagaaagcccatttcaataatcgacctgatcgtggtcgtggctagtatggtagttctatgcgtcggctcaaaagggcaagtatttgccacttctgcaattagaggcattcggttcctgcagattctccggatgctgcacgtcgatcgtcaagggggaacttggcgcctcctgggtagcgtggtctttatccaccgacaggaactgatcacaaccctctacatcggcttcctcgggctgatcttttcaagttacttcgtgtacttagccgaaaaggatgccgttaacgagagtggccgggtagagttcggatcatacgcagatgcactatggtggggagttgtaacggtcaccactatcggatatggtgataaggtcccccagacctgggtggggaagaccatcgcctcatgcttctccgtgttcgcaatttcgttctttgctctgcccgctgggatcttaggttccggttttgctctgaaggtccagcagaagcagcgtcagaaacacttcaataggcagattccagcagctgcatccttgatccagactgcttggcgctgctacgctgctgagaaccctgactcgagcacttggaaaatttatatacgcaaggctcccagatctcatacactgttgtcaccctcccccaaacctaagaagtctgtcgtggtgaaaaagaagaaattcaaactggacaaggacaacggcgtcacgccaggtgagaaaatgctgacagtgcctcatatcacatgcgacccccctgaggaacgtaggctagaccatttttctgtggatggttacgacagcagcgttcggaagtctcccaccctcctcgaagtatcaatgccacacttcatgcggacgaactcattcgcagaggatcttgacctggaaggagagaccctgctcacacctattactcatatctctcaactccgcgaacaccatagggctacaatcaaagtcattaggcgcatgcaatatttcgtggccaagaagaaattccagcaagctcgcaaaccctatgatgtgcgggatgtgattgagcagtactctcagggtcacttaaatctgatggttcgcatcaaggagttacagcgccgcttagatcaatcaatcggaaagccttcactgttcatctccgtctccgaaaagagcaaggatcggggctcaaatacaatcggagcccgactgaaccgggtggaagataaggtgacccaactcgaccagagactggctctcatcacagatatgctccatcagctcctctcactccatggcggttcgacgcccggctcgggtggccctcccagagaagggggagcccacatcactcaaccatgcggaagtggcgggagcgtggaccctgaactgttcctgcccagtaataccttaccaacgtatgaacagttgaccgtaccaagacggggccccgacgaagggagttag

SEQ ID NO: 4615 - DNA, 3127 bp, Artificial Sequence
  derived and/or modified sequence
gcggcggggctggcagcagtggctgcccgcactgcgcccgggcgctcgccttcgctgcagctcccggtgccgccgctcgggccggccccccggcaggccctcctcgttatggccgcggcctcctccccgcccagggccgagaggaagcgctggggttggggccgcctgccaggcgcccggcggggcagcgcgggcctggccaagaagtgccccttctcgctggagctggcggagggcggcccggcgggcggcgcgctctacgcgcccatcgcgcccggcgccccaggtcccgcgccccctgcgtccccggccgcgcccgccgcgcccccagttgcctccgaccttggcccgcggccgccggtgagcctagacccgcgcgtctccatctacagcacgcgccgcccggtgttggcgcgcacccacgtccagggccgcgtctacaacttcctcgagcgtcccaccggctggaaatgcttcgtttaccacttcgccgtcttcctcatcgtcctggtctgcctcatcttcagcgtgctgtccaccatcgagcagtatgccgccctggccacggggactctcttctggatggagatcgtgctggtggtgttcttcgggacggagtacgtggtccgcctctggtccgccggctgccgcagcaagtacgtgggcctctgggggcggctgcgctttgcccggaagcccatttccatcatcgacctcatcgtggtcgtggcctccatggtggtcctctgcgtgggctccaaggggcaggtgtttgccacgtcggccatcaggggcatccgcttcctgcagatcctgaggatgctacacgtcgaccgccagggaggcacctggaggctcctgggctccgtggtcttcatccaccgccaggagctgataaccaccctgtacatcggcttcctgggcctcatcttctcctcgtactttgtgtacctggctgagaaggacgcggtgaacgagtcaggccgcgtggagttcggcagctacgcagatgcgctgtggtggggggtggtcacagtcaccaccatcggctatggggacaaggtgccccagacgtgggtcgggaagaccatcgcctcctgcttctctgtctttgccatctccttctttgcgctcccagcggggattcttggctcggggtttgccctgaaggtgcagcagaagcagaggcagaagcacttcaaccggcagatcccggcggcagcctcactcattcagaccgcatggaggtgctatgctgccgagaaccccgactcctccacctggaagatctacatccggaaggccccccggagccacactctgctgtcacccagccccaaacccaagaagtctgtggtggtaaagaaaaaaaagttcaagctggacaaagacaatggggtgactcctggagagaagatgctcacagtcccccatatcacgtgcgaccccccagaagagcggcggctggaccacttctctgtcgacggctatgacagttctgtaaggaagagcccaacactgctggaagtgagcatgccccatttcatgagaaccaacagcttcgccgaggacctggacctggaaggggagactctgctgacacccatcacccacatctcacagctgcgggaacaccatcgggccaccattaaggtcattcgacgcatgcagtactttgtggccaagaagaaattccagcaagcgcggaagccttacgatgtgcgggacgtcattgagcagtactcgcagggccacctcaacctcatggtgcgcatcaaggagctgcagaggaggctggaccagtccattgggaagccctcactgttcatctccgtctcagaaaagagcaaggatcgcggcagcaacacgatcggcgcccgcctgaaccgagtagaagacaaggtgacgcagctggaccagaggctggcactcatcaccgacatgcttcaccagctgctctccttgcacggtggcagcacccccggcagcggcggcccccccagagagggcggggcccacatcacccagccctgcggcagtggcggctccgtcgaccctgagctcttcctgcccagcaacaccctgcccacctacgagcagctgaccgtgcccaggaggggccccgatgaggggtcctgaggaggggatggggctgggggatgggcctgagtgagaggggaggccaagagtggccccacctggccctctctgaaggaggccacctcctaaaaggcccagagagaagagccccactctcagaggccccaataccccatggaccatgctgtctggcacagcctgcacttgggggctcagcaaggccacctcttcctggccggtgtgggggccccgtctcaggtctgagttgttaccccaagcgccctggcccccacatggtgatgttgacatcactggcatggtggttgggacccagtggcagggcacagggcctggcccatgtatggccaggaagtagcacaggctgagtgcaggcccaccctgcttggcccagggggcttcctgaggggagacagagcaacccctggaccccagcctcaaatccaggaccctgccaggcacaggcagggcaggaccagcccacgctgactacagggccgccggcaataaaagcccaggagcccatttggagggcctgggcctggctccctcactctcaggaaatgctgacccatgggcaggagactgtggagactgctcctgagcccccagcttccagcaggagggacagtctcaccatttccccagggcacgtggttgagtggggggaacgcccacttccctgggttagactgccagctcttcctagctggagaggagccctgcctctccgcccctgagcccactgtgcgtggggctcccgcctccaacccctcgcccagtcccagcagccagccaaacacacagaaggggactgccacctccccttgccagctgctgagccgcagagaagtgacggttcctacacaggacaggggttccttctgggcattacatcgcatagaaatcaataatttgtggtgatttggatctgtgttttaatgagtttcacagtgtgattttgattattaattgtgcaagcttttcctaataaacgtggagaatcaca

SEQ ID NO: 4616 - DNA, 2031 bp, Artificial Sequence
  derived and/or modified sequence
atggcggcagcctcttctccaccaagagcagagcggaaacgctggggatggggcaggctgccaggtgccagacggggtagcgccggtctcgccaagaagtgccccttttctcttgagttggcggaggggggacctgctggtggagcactttatgcacccatagccccaggagccccagggccagcaccacccgcatctcccgctgctccggcagccccacccgtggccagcgatttggggccacgcccacctgtctccctggatcctagagtgtcaatctattcgaccaggcggcctgtccttgcacgcacacatgtgcaggggagggtctacaacttcttagaaaggccgaccggatggaaatgttttgtatatcactttgccgtcttcttaatagttcttgtctgtttgattttttccgtgttgtccacaatagagcaatatgcagcactagccaccggcactctgttttggatggaaatcgtgctggtagtgttctttggcacagaatacgttgtgcgactgtggagtgccggttgccggtctaaatatgtcggtttgtggggacggttgcgattcgctcggaagcctatctccataatagatctgatcgtggtagtcgcaagcatggtggtgttatgcgtaggtagcaaaggccaggtgtttgctaccagtgcgattcgcggaatccggttcctacagattctaaggatgctccatgtcgacaggcaggggggtacttggcgtctgctcgggtctgtggtttttatccacagacaggagttgattacaactctgtatatcggtttcctgggcttgatatttagctcatattttgtatacctagctgaaaaggatgccgtcaacgaaagcggcagggtcgaatttgggtcatacgcagacgccttgtggtggggtgtagtgacggtgactaccattggctatggcgacaaggttcctcagacatgggtgggaaaaaccatcgcctcgtgcttcagcgtcttcgctattagctttttcgccctgcctgctggtatcctcgggagcggctttgctctgaaagtgcagcagaaacagagacagaagcacttcaatcgtcaaattcccgctgccgcttccttaattcaaacagcctggaggtgttatgctgcagaaaatcctgactcaagcacttggaagatatatatcagaaaagctcctcgaagccacacactattgtctccaagcccgaaaccaaagaagtcggtggtggttaaaaagaagaaattcaaactcgacaaagataacggggtaactcccggagagaagatgctcactgtaccccatatcacatgcgatcctccagaggagagacgactggatcattttagcgtcgacggctatgacagttcagtaagaaagagtcctaccctgttagaggtctcaatgcctcattttatgcgaacgaattccttcgccgaggatctcgacttggagggggaaaccctcctcacccccatcacacacatatcgcagctccgcgagcaccatcgtgctacgataaaggtcataaggcgtatgcagtattttgtagcgaagaaaaagttccagcaggcgaggaagccctacgatgtgcgcgatgtgatagaacaatactcccaaggacacctcaacctaatggttagaatcaaggaactgcagcgcaggttggaccagtccattggcaagcccagcctcttcattagtgtgtctgagaaatctaaagatcgcggatcgaatactataggagcacggttgaacagagtggaagataaggtgactcagctagatcagcggctggccctaatcacagatatgctgcatcagctcctgagcctccacggcggaagcactccaggctccggcggaccacctcgcgaaggaggcgctcacatcactcagccatgcggaagtggcggatcagttgatccggaactcttcctgccaagcaacaccctgccgacatacgagcaattgactgtccccaggaggggaccggacgaaggctcttag

SEQ ID NO: 4617 - DNA, 2031 bp, Artificial Sequence
  derived and/or modified sequence
atggctgccgcttctagcccaccgcgcgccgagaggaagagatggggatggggcaggctccctggggcaagaagggggtctgctggcctcgcgaaaaagtgccctttcagtttagagctggcagaaggaggaccagccggaggcgccctctatgcacccatagcacccggggcgccgggacctgcccctcccgccagccccgctgcccccgctgccccccctgttgcctccgatctcggaccacgcccacccgtcagcctggacccgcgagtatccatttattctaccagacgtccagttctcgcgcggactcatgtgcagggaagggtctacaacttcctcgagaggcccaccggctggaagtgtttcgtgtaccacttcgccgtgtttctgattgtattggtgtgccttatctttagtgtgctgtctactatcgagcaatatgccgccttggctactggaactctgttttggatggagatcgtgttggtggtcttttttggcaccgaatacgttgttaggctttggtctgccggttgcagaagtaaatacgtcgggttgtgggggcggctccgttttgccagaaaaccaatctccatcatagacctgatagtcgtggtggcttctatggtggtgttgtgcgttggatccaaaggacaggtgttcgccactagcgcaatcaggggcatacgttttctgcaaatactgagaatgctacacgtggacaggcaaggaggaacatggagactccttgggtcagttgtgttcatccatcgccaggagcttatcactacactttatatcgggtttttgggccttatcttctcttcttatttcgtatacttggccgaaaaagacgctgtgaatgaatcaggtagggttgaatttgggtcctacgctgatgccctttggtggggcgtagtcacagttaccactatagggtacggtgataaagtgcctcagacatgggtgggcaagacgattgcatcctgttttagtgtgttcgccatcagcttttttgcacttccagccggcattctcgggagcggcttcgccctgaaagtccagcagaagcagcggcagaagcactttaatcgccagataccagctgccgcctcactgatacagaccgcttggagatgctatgcagctgagaaccccgacagctcaacctggaaaatttatattagaaaggcacctagaagtcatactctcttatccccttctccgaaacccaaaaaatcagtggtcgtgaagaaaaagaaatttaagctagacaaggataacggggtaaccccgggggaaaagatgctgacagtcccacacataacctgcgaccctccagaggagcgaaggctggaccatttcagcgtggatggatatgactcgagtgtacgcaaatcacctactctactcgaagtgtctatgccccatttcatgagaaccaactcttttgcggaggacctggacctagagggcgaaacactgcttactcctattacgcatatttcacagctgagggagcaccacagagccacaatcaaggtgataaggcgaatgcaatattttgttgctaaaaaaaaatttcagcaagctcggaaaccctacgacgtgcgcgacgtaattgaacagtattctcagggccacttgaatctcatggtgcggataaaggaattacagcgacgactggaccagagcatcggcaagccttcactgtttataagcgttagtgagaaatcaaaagaccgcggatctaataccattggggccaggctgaaccgggtggaagacaaggttacccagctggaccaaaggctggccctcatcactgacatgctacatcagctgctgtccctgcacggaggctccacacccggtagcggaggacccccaagggaaggtggggcccacattactcagccgtgcgggagcgggggcagtgtagatccagaactttttttgccatccaacaccctcccaacttacgaacaactcaccgtccctaggcggggacccgacgagggctcctag
